United States Patent Application Publication US 2022/0102000 A1 - sequence listing, part 5

SEQ ID NO: 838 - DNA, 30389 bp, Unknown
  16S sequences of unknown bacteria
tcaaaagaattttcgaagattttcaaagcactatttaattatcaaggttcatgttttcaactcgctgtctcaccgacagcttgtttactttatcatatccagaagactttgtcaacaacttttttcattgttttttgtctttctttttatgattgcttaccgtttctcgcggtcagcttgtttatcttatcatcagagcatataattgtcaatatgttttttaattttttttatctactattttcgttcactttttatgtgctccggatccgcaaaaataccttcttatatatgaaacatcaaaagcattccaaccagcaacagcagattattattgtacaactccgaaagccatacactctgattgattatcttataggctgcgtctccccaggaagtataactgaagatcgcaacgatcagaaacaagatccacagaaccagcatctgctgcagcaatccaaatgctgcacctgccagacgattcagaaaacttaagcccggaacttttgtaagcacacgtaaagatgacatggctgtacgcaggatcaaccgcaccaccacataggtagcaaccagcgaaatcactctggctgccaggatccgtacatattcttctgcctgatcctgaaatccgctgagcatgaccaggcggtacagatcattatctacactgatgttgtcaagattcagaaacgacggcaggatctggcgcaaaaaattctccacataaggagagatcagatacacaagaaaaagggagcctacggtgaagagaagggatgccccctttttcaccagcccctttcggtaaccatccagcaggccgaatcccagaaacagaaagcctgccagatcagcaatatttacaatatccatcaattgatttcctcccctatttcagacgaatctgatcggtttttcccgcatgcaacaccatatagcggttatttcctgacagggtgtataaatctgatatggattcctcaaaggttccttcaaaaaagatatttcctgcatgattcatcatcgtatattcaaagtcgttgtagatcagtatattatttccggagaatttgagggtcgtgtaatcctggtcgaactcggtccgaaattcctgttttccctgcatattgtatacttgaagtgcataggatttctcttctccttccgtgaccacacctacatatttactggatgagaagatgctcaggatcttctgctcgatggtcacatccgcagtctcttccggtatctgcgttccctcaaaaaacagcagttcacccgctcctgcaaagaagcagtgggtgctgtccgtatactgtacatccggcataaccgttccctgcaggatcttcgaggccaccagatgatcttcgtagttttctcctacagagtcgaaattataaaatgccacacaactgctgatggagccattctgcacctgcaaaaagctcacagccagttttgtcgcatccgcactgagggcaatacgcagcggataaccggtctcactcaattcaaatttggattccacgatctgagaaccatcttttgcgtagagattgactctgctggtatcaccatcttccagaagaaccgccagaactccctgctgagatacggatatctgacgaatcggaagcagtgtctgtacctgtccctgcatacctgtctggttaaagattatcacatctgtaccatttctgtctgcgatggcaaggctgtcctgacacacattgatcaccggatcctgcatattataagtctgactccataccagattattttctgaatccacgcaagagattccatccttgctgtatttgatcacataagagagaaactctgtgtattttgttgtaatcgtatctgatctgtcaaaactgcggaccacttcgcaggtggtatacgaacgatgatccagactgattttgattccatacaggcacaatccgataatagcgatcacagccacaaccattccagctgttttcagcttatgctggcggagatttttctcataggacaacatatcctgatccacattgtttttctttaccaactgtatattcatagatgaattccaatctttcattttctaatgtggacattatagcaccatcttttatggaagtaaaaggatttgtcctgcataaatgtgatcaccatcatccagaccatttaacgcgcagatctcacctacttttgtctcatctccataccagtttctgcaaatacccagaagagtgtcaccttttctgacttcatagctctgtggttctgtcgcattttctccagaagatgtattttccggatcttccgtcagatcttcttctgtatcctcaccggcagcttcttccgcagtgccttccccatcatccccggctgcttccgcagcgtcctcattgtttctggcatcccccagctcttctgctgcaataccagctgcttcctggttcgccagtgcttcctgattctcttccgttgcctgttgttccagtgtatcttgattctgctctgtactttcctgatccaatgtctgcgagatctgatggatcgctgtctccatattggtcatccgatcataattgttcatcatagtcacaccgatcaccaggatcaccagcaccagaaaggtgcttgcggtatacagaaatgtcagcattttcttctggctgttctgttcctttttctccatcatgacactcctgaactttgcagccgcccggtctctcaggattccttccggttcgatccccgctccgcctctctgctcactcatgtatgcctgcatagtgtcattcttttcataataaatataataaccaggagcagcggtcagacccacatctgattttatgaaaaaatctgcatcattttccatcacatccatcaaaaacaacacatgcttgtccgatggaaaatgtttttcatgaagtgtacgtagttcctctgtcagctgtaccgggaatccaggattggacagaaaccaccccacaacctccagtcccgaaaaccactgctgcacctctgcaaatacatcccgccactgctcatttgtaaaccacttcttctgatcctgtcccatatccgcttctaccgctgcctgaatacagattcgtccgtcttccgcatttcccagaagaacagctgtcttcatgcaggtcagattctgctctgccatctgatgcagataggtatatgcataatcctcgatcagaattctcgtactgcttcccggctccccgatctgccgcacattcttcggcagtttccagatacctttttcttttttattttctgtcagttccatcatgatttccctccactttcctaacatcctagcatatagcagagggctattttgacgaaacggcagtcaataaccgtctttgtcatcgacaaaaaaagaccaaagcaaccacattctggtcactctggtctgagcatttctcttatacaaacttatagatggtcacactatgataagcttctcccgcttcaaccactggctgcagaaacgaaggaatgttaatgctatttggaaaatactgtgtttccaggcacagtgcacagcgttttccataggaagcaccgtccttacctgtctgcggatcgataaaattgcctgcatagaactgcactcccggaagatcggtatatacttccatggtccgtccggccttctcgtcttccacctgggcaaatttctgtacttttccaaattccgtattcagcacccagttatggtcgtaaccaccagccagtgtgagctgcggccacgcatcatcaatatgatcacccactcttctgacagttcggaagtccataggtgttccttctaccggaatcacttttccagtacagacagaaccctgtccaagctctgtaaatgcatctgcatcgatcatcatcttttcatcacagatgctgccggcatcatgtcctgccagattaaaataactgtgattggtcatgttgattatcgtcttcttgtcactgataccgtcataactgatctgaagactgttatcattcttcagtgtgtaggtaacagatatcttcagattcccaggaaagccattttcgccatcgggactattgtaagaaaatacaactgcattttctccatctttcatatctgcattccacagaaccttatggaatccgtggtaaaaatcagaatgtagattattttcattttcattggctgtcagatgatatgtcacaccatcaatctgaaaagcagctccgccaatgcgattcgcacttcttcccaccgtagaaccaaaaaaattcggattctcctcatactgttccagatgatcaaagcccagaaccacatctgccttttctccatctttgttcggaacgatcaattttaccagaattgccccaaaatcagatacaactgcttccataccatttttattgattatagtatataaagaagcctttctgccatctcttgttaccccaaaatcagttttactgactcccatgaatcttcctccttacagctccacgcggccttccagcgcacgaagcaaagtcacttcatcaatatactccagatctccgcccaccggcaccccgctggcgatacgactcaccttgatcccggtcggcttcaccagcttgctgatatacatggcggtggtctcgccctccagactggaattggtggcgatgatcacttcatccacatccttttccagccggtgcatcagttccttcaggcgaatatcggaaggtccgattcccagcatgggtgatattgctccatgaagcacatgataaaccccttcatattttcctgtcttctcataagcgctcatatcccgcggattctccaccaccataatgactttgtggtttctctgaggattagcgcaaatagggcataattccttgtctgtcaatgtcagacattctttacaatagcggatggttttcttcgcttttacgatgctgtctgccagcttctccacccgttcttccggcatatcaataatatgaaatgccagccgctgtgcggtctttgctccgatacccggcaaagaagccagttgttctaccaactggctgatctgactgctgtaatattccatcagagaccaaatcctcccagccctccggtaagcttggccatatttgctgctgatgcttcgtctgctttgcgcagtgcctcattgaccgctgccatgatcacatcttccagcatctctacatcatccggatcaactgcttccggatcaagtttcacttttgtcacttcttttttacctgttacagtcacttctactgctccgccgcctgcagttgctgtaaattctgctgtctccagctcttttgcactctcttccatctgacgctgcattctctgtgcctgtttcatcagattactcatgtttcccggcattccgcctcctggaaatccacctctttttgccatatttctatcctcctgttttctatggttcaatgtcaatatccatatctataaaccctgacagatccgtcacaggatcctgcggtcttggatctgtatggggtgtatgaatctgtactttcatgcggaccttaagttctctttcaatcattttttccacgctgtccgccagttcctgttcatccaccggcagttctcttgccagaatgatctgcacaccggttccatccggcagttctcgcaaagccgcatccttcaactgctggctctgcattccacccatctttctgcggagttcctgaaagcggtctacaaacatccgcacatctgtagataaagcttctcttgggagcttctcctgactgcgggactctgtctcctgccgggactgtgccgctcctgattccactgctgccatcataggaatccctttttccatctgctgttccagcacacggatcctctgcaaaatagaatcataattctgttccattgccggacggcacagcttgatcatggccagttccacaagcacacgcttctgcgtcgcataacgaagctgtcctgataattctgacaacacacgaatataacgcatgagcgtatccgtatctgtcagatctgcttcttttttcatctgtgccagacgttccgttgatacatccagcacatcttccatattctgatcgctctttaacatcagaagattgcgaagataccagataaaatctgtgacaaactgagacagttcccgaccctgcagaatgatctgttccagttcccgcaccacatctgtaagcttctgatcacagatcttacggaacagatcaccgaatacatctgtgtccactgctcccagcacatccagtacatggtcataggtcagcttctggccaagataaaaggcaatacactgatccagaaggctgagtgcatctcgcatggaaccgtccgctgcttttgcaatataggtaagagccttatcttctacttccacctgttctttttctgtcagttctctcaatcggtctgcgatggtctctaccgtgatccgacggaaatcataccgctggcatctggacagaatcgtaataggaatcttatgggcttctgtcgttgccagaataaagatcacataagaagggggctcctccagtgttttcaataacgcattgaatgcgccgatagaaagcatatggacctcatcaataatgtagactttatactttccttctgtcggtgaatatgcaacctcgtcccgtatctcacggatattatccacgccattattagatgccgcatcgatctcaatcacattcatcgatgttcctgcggcaattgcccgacaggacgcacattcgccacaaggattcccatccactgggtgttcacagttgaccgcttttgcaaatatttttgccacagtggtcttacctgtacctctggttccacagaacagatacgcatgtcctatacgatccgcgttgatctgattcttcaatgttgtcactatatggtcctgccccttcacatccgaaaactccgaaggacggaacttccggtataatgcggtgtaagacatgtctatcctctcctgttctgtctgttaatctccaaaactgataccgatcatctttgcttcttcaatgatgccggaattcggatcgaccattttcagtttacctgccacatcgccaagcggcactttacaggtctctccattaataatgcctaccatgtatccgtattcttcctggatgatcagctgtgcagctcttgcgcccagacgggtggaaagcacacggtcataaggaaccggagagcctcctctctgcgtatgtcccggaacagtcacacgcacatctgcgccggtccgctgcatgatctgttctgccagctcataagatacagacggatactgataatttgccagtttatttttatattccttcttggacagagctgcatcttccttggagatcgcaccctctgctactgctaggatcgtgaatccttttttcgctttgtttctcttctgaatcgcttcgcagactttatcaatatcatacggaatctccgggatcagcacgatatctgcaccgcctgcaatacctgcatgaagtgtcagccatcctactttatgtcccataacttccacaataaatacacgaccgtgagaagctgctgtggtatggatacaatcaatacagttcgttgcgatatcaactgcactctggaatccaaaggtcatgtcggtaccccagatatcattatcgatggtcttggggagatggatgatattgagtccctcttcacacagaagattggctgtcttctgtgttccattaccgcccaggatcaccagacaatccagatccagtctacggtagttctgcttcatggctgctaccttgtccagtccgttttcatccggtatgcgcatatttttaaaagactgacgagagcttccaaggatcgtacctccgcgggtcaggattcctgaaaaatctctggctgtcagcagacgatattcgttgtagatgagacccttgtatccctcttcaaatccatagatctccacatcgcttccgagttcattatataatccttttccaacacctctcatagtggcattcagcgcctgacagtcaccaccactggttaagatacctacacgcttcataactcactctccttcactgtcgttttttgcaaaaagcatttgagtttattataccctacctgtctggttttcacaagcacacgtaaaaaaaagccccgatgccgcgtgtgacatcagggtctcattctttatttttaatccgtgcatcccgctttgaactgtcgaccgccacgttacctgcacagttaactcagaccaggcaccctcgcggcacacaggagatcccgcttagtgctgctttgttcccaacctgacacggttcacaggttcctgttgcgcaagacccgggcatcaatgccacttatgcagggcagctgacgatcgaacagcccgaggcaggatatcacctctactaaggcggattgtagatacagggcaccgccatctccccggctgcacggaaatcttatgacatttttacttgcaattctcttcaagaatgcctgtccagtatatcgccttttggaaggtttgtcaaaccttttgcaccttgattttcctcagtttacggaaaaattccttgagaagcgtagagcattcttcctgaaggattccttcggtcagctccacctgatgattgaaagccggcacattaagaagattcaggatcgaaccggcacatccggctttaggattccgacatccgatcacgactcttggaatccttgcctgtacaatggcaccggcacacatctgacaaggttccagtgtaatgtacatggtacattcctccagccgccagtctcccactgccttgctggccttacgaatcgcctgaagttctgcatgtgcaagggtatttttatccgtattccttcgattataccctcttgcaatgatcttcccatcttttacgatcacacaaccgatagggacttcacctagcttctccgctttctttgcctgccggagtgcttccttcatatatttctcttcttctgtcattttctttcactccgctcttctcacatctgccaaaccatggacagcagatgcaccggatgcctccttccggatataatacaaaacgcttcgtatccaccggataatcatcccattccgccacatagtctcttccaccaggacgcttgacccagattccgtgagtgtctgcaaatcggattccctttcccagaatatcttccgcatccagttctccctgccattccagtgcaccgttctgattcttcagtgctccaagatagatccctatggttctgtcctgatgataaaaataaatataaacatttccggcggcttcacccggatggcaatatccacgaagatgcagtgccagcctgcagtgtccgccccgttcttctgcctttacaaaacctgtactgcggagctgttccccgcgctcataggcgtaaagatatgcgatctgtctcttatattcctgcatagaatgtcctccctgtctttcaggtctattctatgcgggacgcgaaatatttatgactgttattgtcttgcttcttccaccagatccgcaaactctgcaaactgctgaagactcagtgcctctccacggatcgtggctgacagtcccatcttttccagattttccgcgatcagttccttggatataccaagtcccggatcgtggcttacactgttctggagggtctttcgtctctgattaaaagaagcccggatgattccaaacataagcttttcattcttcaccttcactggcggatccacatgagtctgaagacggatcactgcagaaccaacattaggtcttggcataaaacagtttggcggcacattagccacaatatacggatctgcatagtactgaaccgccagggacaatgcaccataatccttggaacccggtcctgcctgcatccgctccgccacttccttctgcaccatgaccgtaatattatccaccggcacatggctctcgaacaatcccataatgatcggtgtggtgatgtagtatgggagatttgcaaccaccttcaccggtcttccatcattcatctcttctgccagctggttcagatccactttcagaatatcttcattgatcaccgtcacattatcataaggagataaggtatctttcagaattggaatcagtgcacggtcgatctccaccgctgccacgcctctggccgcatgtgccagatactgggtcatagttccgatacccggcccgatctccacaacaaaatcatccggtccgacacctgccgcctgaatgatcttctccagtacatgttcatcgatcagaaagttctgtccgaattttttctgaaacacaaatttgtatttctgcaatatttctatggtatttttcggatttccaagggttggctccggtctgctcattgatatcttctccttctactgtattccataaaatcttctggcattctcctctgtaatacggatcacttcttccggtgtgatcccttttaacaccgccagctcctgcaccacatacttcaacattcccgaatcattgcgctttccccggttaggcaccggtgccagatacgggcagtctgtctccagaagcagatattccataggcgactccagtaccgtctccttcagcttcttcgcattcttgaaggtcagcacgccgccaattcccagataaagtcccatcttccggtattctcttgccatctccggcgaataagaataacagtgcatgaccatgggcatctctccatggtagtttgctttcagaagttccatggtgtccgctgctgcctcccggctatgaatgatcactggctttttcagctcctttgccagcttcagctgtcgcagaaaccattttttctgaaggtcatggccttccttatcccaatagtagtcaagcccaatctctcctaccgccacgactttcggtttctgaagctgttccctcatccactccatatcctcttcccgaagttcgcccacttcgtcaggatgtacgccaacggcactgtatacaaactcatactcttcacttaagcttaccgaacgcctgctgccttccatactcgcacccacgttcacgactgttcctactccccgcttccgaagagaagtcagcacctcatctctgtcttcatcaaatgcttcatcgtcatagtgtgcatgagtgtcaaatatcatcgtatggtctgctcctgtctgttttatggatatttccctaacagtataccgattttaaaatatcaatgcaactattctttagcaaaatgagcccatgtcagttttgttcaccaaacaactgacacagactcatccttatttttatgaaatcatacttctcagttctcttccttctgtattccagaaagctttcatttttgcaagctgatctccaagtgcaaaatctttcactcccaatttcatgtaatattccgcatctttcggactgatgatttcacaccgtggtctcactccatgttccagcgcggttcgaatacatttttcttctgcttcccgaatatcttctgcatggtctgctctgttccaacttctgctcatgcaataatcattcgggccgaactgaatcatatctactcctggtatggaacagatctcttctatctgatccaccgcctcttttttctcgatcataaaacacaaaactacatcattcaatctctcgacatgatccagaatcggaatatgtgactgtcctcctatatatcttccattaggatatccaaacacacctgttccatcttctgtttttggtctcacaagatttacactttcacgaacctgatctgcggttgtgtggtctacaaacataatgctctgaaatcctgcctgaattgctttctgagctacaaatccccggttctgataatcaaccttaatcattgttcccatattattcagttcggctgctcttgccatattcggaagatctgtcagatcatatggcgcatactctgcaagaaattccacataatcaaatattcctgtttctccaattgcttcccagaaaaacggctgagtactccagaatctggtagccaagagcggaagtccattttttatatgttcccgaagtttattttttttcatttcaaaatacctcttatattagcctctgtattttcctgtctttatctgatacataatctccggatctgtattttccgcaaacaagcgctgtttcgttgcctcatattcattgatcagatgactccgtctgcatacttcttccagatacttctccggaaacttcactgctccattttcatccatatgaataatatcccctggcattacctgcatatcacagatatccacaggtgtgttgatttcctgaataacaaacggaccatgtccagcagttacacctgtcagcatatactgaattccaattgttctgacttcatcaatatcacgtgacggtccatcagagatgactccaacacatcccagagatttaaacgccgtcatcatatttccacctgcaagaccatttttctttttataccgctccgggaaattctgttttatgcaaagtacaacaggtttcggcgaatcagcaagtgcctgataaagttccttaaaactaatgccgcttgccccctgactcggcagcccaaaggtcacagtcaccgcataccctacctgtcttcccaactctggatacatacatttcaaatcctgattggtataccaactgctctcccatgcatcataaagtccaagacagaattctttattgcttgcatatgttgcaaccacattcgtaatagtaggagtatcaaactgctttaattcttccataatctcttgtggagttcttttttccatgcctctctcctccgtcattcaaccggcagtttcatcacaattttcagatagtctcctggctgttccttatctctgcaaggcatatgtgcatcttccggataagcaacccagcacattcctggttttacttccattaccgttccatcctcttttttccctgtaaaaaatgcgatatcagcttccggatcatatgctttgtattcagccagttttgctactggctcataatatgccttttctccacctttgatcatatactggacatcaatatatttttcatgagtctcataagcattctcatcaaatggttttgtagttcctctttgtacaaacaggaatccaccttcataatcatatcgtcctgttgggaattcttcctttctcaatttttccacacactctaatgcaaaatttaactttggaagaattttttcatattttttcagttcttcatatttacaaataatcatttatctgtctcctcttcccagaagctctttacctgttgttttgcaccactcagaagcattccaagttcgcttcccttattaaatacggtcattcccattttctggcatgcacgtaagtactgcagatttgcagatacagttccgctttgcttcccatatttccgggctgcctctgccactttttctgccgctgctaacagtttttctgatttcaggtttcctggatcacccagatcagaagataagtcagatggaccaacgaccagcacatctatacctgcaactgcggctattttttctacattttcaaccgcttcctcagtttcaatctgtgccagtaaaaccgtttttttatttgcctgttccatatattctgaaagctttggtggattataatttgtatgcgccctcgtagtggaaattcctctttttcccataggagcatatttggaatactgaaccagtttttccgcttcttctactgtatttaccattggtacaagaaacccatctgctcccatgtccaataatttggtaatcattccccgatcaatccccggaattctgatcagcacatccagacctatactgtttcccaaagctaccatagctgcaaactgtgtcagatcaaacggaccatgctctccatcaataataacaaattcaaatccgccatttttcataatacgaagtatattgggatatcctatctctgaaatcatcgtgccaagtacgatttctccgtctgttattttttgtctcagcatcgtacacctctacttctgcagcgaaaatactctgcattcttctaaactactgcacttaccactgcacagcaaactcaattgatacatacctgccagcgcttcatctgccattggggacaaacaacattctttaccagatatttcggaaagcatctgccgaatttccggtgttttccagttcacaccgcctgcgcacaccagccttttaatgttctttttatcagttcccagtttctgaataaacctccagtatgtttccgccatatcatgaaatgccgcataaaaaacggtctccaaatgaagatttgcatgggtaattcctgtgattgctcctccatccgggaagaatggatttctgtagaaagaagtctctactctcagatcctcatctggaatcagctttgctttatgcacactcttccagacatcctgtgcagaaatgtttccatctgtaattgtatttatcatttcttttataaaacgaatcaaaacatccaggttacgtcctgaaggcatattggaaatcgtatacaaataactgccttcaaggtaaggacgaatttcatattctcccggcttaaattcagtatcgtatcgaattacctgggctcctgttgcaatatttacaactacatctcctgcacggattccgcttcctgtaattgaaatctgcatatcgccataatcaggatggatcttcaaagaatatccattagactcatattgaccacatacttcataatcattttcagccagctttggaagtttcacattctccagatgaaacctgtttaatatttctttattccaacaatgatgtgccacatctgcaagtcccaatggtgcagcattactgatatgacagatattatttccggttaatgaatagataacatacgatcccagtgtatgtaattcaccatcgcgccttaactctttattctcttccagtaatgtatacaaattacaaattccaagtgatggttttaaatacactccatggttttccatctcttgcggtgtaatctgttcctccatccactgaagatatgtttttttcgcacctgacatcctgttcatacaccgcatatcctgccaggatatatacatatcttctttttccggaatcgcatatacaaatccgtgcatttgtgtggaaataatcaatccctcaatatctgaatattcttttgtgtaatgatccacaagttgctttactatctccactattttttttgcgggaatctcaaaataattagggttcttatacggttctttctcaggggtggccattttgtcctgatccacaatttttccctgatcaagatccattaaaactgcttttataaaactgcttcccagatcaactccgatgtatttcatctcatcctcatttctctgatgcctgttcctccatcttttccaaaccggcacgctcaattgccagcataatatcattcttagtcgcattcattgcgtggtagcggatatattctattacatcctcattcttctccatcaacatttccagaatctttttatgggactcatagtaaccatgctcattctgttccggttccagggttgcattgagttccacaattgtctgaagcataggagaaattgtccgatgacattgtaataatggtatattatctgtcataacaaataattcaccatgaaaatcttcattaattaatgccaactctgttcttcgatcttttccctgtggctgattctgaaatacgtaaaactggccaaccagctgaagtaattttgtaaaatcacaggattctttcgagataatcagctttactgcttcgcactccagaacacttctggtcagacacaaatcttctatatattttgcgtccacttttttcaaaagtttccttccattaggctgaaccgtaatcagtccatccctctccagaatctggaacgcagaacgcacagaacttctcgacacctgatattgttgcgctatttcagtctcgctaatctgcttttcccctgaaaactttccaagaatagcatcttgtcgaattccctccaatacagttgccacggttgcctgcctgctgatttctgtttgtaacatatattatccccacccaatacatttattttcagaaagttggcattacatataccaactttctgacattatttaccaatattatactggatttcctgcgttttggcaccagctattatttgttcttttcaattgctgctacaagtgcattatacagatccggatttacagaattctgaatctcagaccaagtatcttttgtagcttcacggcatttttcaagatcctcatctgcaaactcgtatacttcataaccgtaatcgttctttaacatttcaagactcttattgtcaccagcttcaagatctgcttcattttcttttgcatagttgcatgcatccatcagttcctgctgctgtttttctgtcagactattatagaattccaggttgataaagaatggatgtaccgtaacctcatgttttgaaattgtcgcatagttagttacttcatacaggttatagttggcaagagtagcagttgtggtattttcctgtgcctctacaacaccctgctgtaaagcagtgtacaactctgtaaatgctacagttgtcggatttgcacccagctgtgtccataaactgatatgatatttattatccattacacgaatctgaagtcctttaatatcttcatagcaggttaccggtttctgtgaaaataaggttctgaatccctctgcacgtaacacaccaagtttcagacctttttctgcaagcactttatcaagctgagttaccagttcttcatcactggttgcatttctcatctgccagtagctgtcatatgcaaatggaaggtcaaatgcacttaaatccggaactacatttacaaagtttgctgccgcacctgatgtcatctgaatactgttctcaacaatactttctgcaagctctgtatcacttcccaactgacctgccgggtaaagatccattctcagatcatccgtattttcctccagatactgctgaatggtcaggaaaaactgtcccaaagttgattcgttagtacttgcatgtgcagcgacgaaagttgttatatccgcagaatcccctgtctgctccgtaccttctgcctgttctgtacttccattggttgttgtggctgcagtgtccgaactgcctccgcatgctgtaagtgaaaatgccattgcaattcccattaccagagctaccacttttttgtttttcattttttatcctccttttatttgcaggtgtttttctcgttcacccttttatcaaatcagcgccagactaattaccggtacaaatgtaatgaacaatagtgcaatcataaatgcaataataaacggcattgcatgttttgctaatttcattacaggaacttttgtaagcgcagatgtaacaaacaagttgattccaactggcggagttacaaatccgattgccaggttgcataccatgatgataccaaaatggataatatccataccaagcgcctgacagattggccacaggatcggtgcaaaaatcaagatggcaggtgttgtatccataatgcatccaataaacagaaggaatacattaatgaacagaagcacagctacttttccatggaatgttgttaatacaaaactggaaattgcatctgttacctgaagtagtgccaatgcacgtccaaatacagaactaacaccaatgataatcagtaccggagcaatagaaccaagggcttctttcatgattcccggaagttcctgtatttttaatgttctatagaagaacagacttacaattagtgcatatgcaactgaaatagctgctgcttctgtcggagtaaagattccactgtaaattccaccaagaataataacaggagataacaatgcaagtgcactgtcccaaaatgtccgaatcaaacctttttcatgcaagtgatcgtaattatcctgcagttttttcatatctggcggattctttccacaataatagatacaatatacgatcatacaacctgcaatcagaaaacctggaataattcctgcaataaacatatttcctacagaagctcccgttgcagatccatacatgatcatcggaatactgggtggaataataactccaagtcctcctgcaacggctacgattgcagccgcaaaatccaaactgtatcccatacttgtcaataccggaactgtcattgcacctactgctgctgccgttgccggtcctgatccggaaattgcaccataaaacaaacaggtaacaattaccgtgatcggcagtccagctttggactttcctgtaaagtaggcaaaaaagttaaacagcttatcagcgattcctccttttgccatgatctgtccagaaagtacaaacaaaggaactgctacaagtacaaaagaatccaaagatgtcgtcattgcctgaaacatatatgtaggattggtaataatctgaggcatctgaacccagatcgcaatacaggaaacaccaatagatactacaatcggtacacctaaaaacaaaaggataaaaaataatgccagtgaaataatgatgatactcattttttattttcctccttttcccattctaccgataagtattttaatatatttctctattactctgagtgccgccaagatcaaaccaatctccataatagagtaaatataaaatgtcggtattcccataaccgctgtggttgcacctgatttcattgttgcacctaatttacttactccataataagcaacaaaaatgcaaaacaggcaggtaactatatctccaaaaatgtccaatgccgcttttgatttaggaaccaaggtctgaataatatctactttaatgtgctttcctgcctgaactccataagacactcccattgcagcaatcacaatctcacagtttctggacatttcctgtccccaagtaattcctgttcccaaagcggttcttccgattacatctatcagcacaacaaccgtcagtacacttaacgcaattcccataattaccaattcaatgttatcatccagccactttactattttcatgaatagcctcctgttatctgttagtccttacctcatttacagcatcataattcaggcaccatgtcggcttctttccagtcagcacttctaccattcctcttgccgcatcataactcatcttatccatcgcttcatcagtcagtgctgcgcaatgcggagaaagaagtacattatctagtgaaatcagcggattgtccggttttgccggttctgtagaatatacatccagtacagctcctgcaatttctccttcttttaatgctttcgccagttcctcctcaactaccaacgcacctcttgcaatgttgacaaagacagctgtttttttcatcattttcaactgctcttttccaatcattccaattgtctgaggtgttgctcccacatgaagagagacaaaatcagattctttatatatacaattaatatcctccgtatattcgatataatccggtaacatttctttcttcacaaacggatcatatccgattactttcatagaaaatccttccgctgcaatttttgctactctacggccaatatttcccaatccgataagtccaattgttttattattaatctcatgcattccaccacaattctgagattcaaaatccagctcctttgttgccagatgctgctttacaattttctgtgaaaaagctaaaattccggcaattgttttttctgctacagagtccgaattggcacatggcgtattcacaacatataatcccagtttcgttgcggttgccaaatctacaacgttgtcaatacccaccccatgttttgcgacaacctgcagattttttcctgaacttaaaatatcctctgtaagaaagaatgttttcgaaataactgcgtcacagtctttaatcagttctttcataagctccggatcttccttaggagccataacgatttcaaatcctgcttcctgtactaacttttttccagattctgacatgtcctgcgcatataaaatttttttccccactataccttcctccttatttgtcgacacatttatttaattgtcgacatttattgtaagttcattatatccataactagtcataaatgtcaacaaattaaatttttaacaaatagtttttggcatcttgaacaattttattttctatttttatacaattcgacagatataatctattttttcagaacattaaagatatgcctcatattccgcgcccgcaaatgcgacccgcatgccattatccagcggaaacagttcatagggattgagctgatgctgtcctgcccgggttccattagtagaattcagatcctccaacaggtaacagccctcttccttgatgatccgagcatggatccgacttactgtaggcgccggaacccagccatccacactttccttccttttaccgatcaagaagctggtgccttccactttaagatccgggtagtcaggatttttacttttcaacaaaagtccataatgtttctcttctctgagaaatgttgtttcccctgcatttccctgctctcgaagaaacaacacggatccgctcttgatctgatccgcttccgccacgtaagtttccacaggctgctttttcttcttatgaaagaaattcttccagcttccggtcttttccaggatctcttcctgtacggattttttgccagatgacagcgtctgcgttcctgttacaggctccactgcttccaccacaggcaaagcagtttcttcgtttttctccggattttccatctccgtatgactcttcagaatctccatcaagctgaaatttggttccaacgcacactgatagagatcatacccgaattcgatccctttccggtcacttttatccagttttcccataagatactccgccagatcaaggaacgattcccggatctttttctcataacctggatagtaacagacatgcagccgttctgtccgggtatccaggtacagatattccggaagtaatacaaaatgatctgcattcaacaaatattcttccgatgcattgaggatctgcaaaagatcctttaagagatccacaagctgttcataggaaacctttcttcgttcatagagaagttccatactctgccgtccggtgatctcataaaaatactctgtctgcttttctttcttctgctccacacatggaagaaatccatagatccgattctcggttatcatccggtcttcgtagatttcctccctcttctctgcatctgtcatgatcatataattactgttcagatctcttttgtatctcacatccatcatctgtttttattcctcccctgatcttatcatccacctgctcctgcgaataactttgcacggtcttaccctatataacttttctactgtcttaatctctatctgagccggaagaaatcgacctttacccgaaacctttacttctgcctgaagcggacctacacgcacctctacttctgcatcctccatccaaagcagcctctcacttagctttctgctcagatcttcctgcatctgttctctgatcgcctcgtctgatcttccatccctgtagattcctttgactccggattccagtatgccatgagtcactaccgcacagtcatgtgtgtagagcgtaaaataaaccagatagaccagaagaatacagatcatcggaaccagaatggacgcttccagcacaaactgtcccttttttctgttccaccgtcttttcatataatcgtcctcccaactgtcagcacaaagcccacagtaaaaaacggcaccagcggaatttcttttttcccggacaagaacccataacctgctcccgccagcaggccaaggaacagaattcccatcaatatttcatacggcagccacattcccagtgcaagcaataaccacccatctcccagaccaattctttctccgctcaatttccccacgaccagcagaaaaagtcctggaaaccacaccatctcccgaccattccaaagagccgtcagcagaccggtcagcagaagctccaacaacagccagaaagaaagcatctgatctttcatatcctcccatgacaggatcaagagatgcagaaagacccagaggacactcatgatccaccgcacccctggcagcagcgcattcctccagtctgagaataaggaatcgccatcaccgtccgctttagtccccggcaagtctttcgattatgatagttggttccataattggtaatatagaccatagctcctggtttctctttctttacacagtatacacaggctgtataccggctcccatcccagtttctcgcagcatcaagctgtccggcagcgatactctggatactcacgttcagataccgacagtccctgcttctgtgatatacctcacctttgggtgttacatagacaaatatctcgccgtctcccgaaaagctttctccagtatagcctacccagtctctgaccaccacccgctgcactaccgaacggcttccaaaggaaaatgcgacaaacggaagtgttacctgatcataggcatacagacgggtatacggatccccctcatccgctccctgtcccacagtcaccgccagcaactgtgcctgctgtgtcaatgtccgatatttttctgcctgaaatccggtcatcacaaaaacatagagcatcgccgttaccgcgcagagcagaaatggcaacactatggaagtttccagtgtcagacttcctctttgaaaggcacaggggcagactctcctgctcaccaccttttggagacgccataaccgtcgggatgtctgaacaccttttttatatttttcacacctgcagaagagccttcccccatgcctttccttttgtttactcatatccatatgtccgctccagataaatgccatccatccacacctgcgccgtcatacgttccacacaatgatccagatgaatctgttcacaaccttccatcatccgcagttctccttcaatcacatccagcgagcgcattgccaatgtctttgcaggaacaacggtcaacagcatacgcaaatagtcttcataatcaagtccgctctgttctgctgtctgtgcatcataacttccgggatttcccagaaaacgtagaaccgcactcaagggaacctgccactgatcctccccttttaccactgccagttcataaccgcccagaagctgacgcacttctgcaatactttccacataagcccatccgatcaggatcagatgcttgactgcctggatcaggctgtcattccccgtaagacccgcaattaccaaagcaagaatttctgcctgttctttatagttggagtgtgtcatcaagaaggtgtaatttgctccttccctcaatgtcagcaatgacaggatcgtcaattccagatttctttgatccgatggttgtcctgcaaacaagtactccatctgatagtccagataaccatcctctcttccctctgcgagatggtctgatgcttgtgtcagatactcacaggcatatccgataaaccactgcttctggatcagagcatcctcgtttccctgtgcagcccctgctccttctgacaactgtcttaccgtcggtatatttacagtattgatggttttctcagagagaatactgccggaaggcaccgccatcttgaagaaaaatccatccagaaaactgctccaggaagacgcctcccctgacaattcatcgtcttcgtcatcatagtccatcacgacccggcggctttcttcatagtcccgctgcatctcttccgcctgcgtcagcagctcctcccgctgctcaggcccaagcaaccagtcctccaccagatcctgtccccatttttccttcatgacctctatggcctgatgataaaatacagcaccgtctccatccgtcgcccgtaccaggtcttcaaggtttactccctgaaggttcaagccatccaacggttttccacggacattcgtaatattttcctgtataaatttccacagatgactgcaaagttcttctcttttctccgttccgccctgaaaggaagtgtctatataaaacaaatcccacttatccagcagatgcggctcatattcagaaaacagcgagaacattccattttccacagcctgttctgcccgcctttttgccgactgcttctgtaccgactgaagacagatcagatacagtccaaggaacacgagaaaactaagtgtcagccacacagtgatcgatccttttttcttagatccgactggtctgtgaaacaattttttcaaaaatatcattcacgactcctgtaatctttcctttaaaaataatgaccaatcccacaagaaccacaataataagaatgacttcaactgttcccatcccttttttatctttaaagatatttctcaaccaatctctcataatattcctcctatcttacccggcaaatgatgacaccgccggatacatgatcataatcaaaatgctcaacaacattaaaagcatcggtaacaacaatctgctttcacactcttcaccgatcttccgtgccagtgctttgcggtcctcaaaggcatcttttgcttctgctttcagcatttcagcaagattgcctgtcccaaggcgcagattctggctgagcaaggttccaagcttcagataagaagataaccgacaatccacaccaaactgctcataggccacagtctctgctacaccgttctgcatctgacgcaatgccagcttcatctgctcataggcgtcctccgaattaccggtcatctgcctctgcttctcatacccccgtatgattcgttcccaggcgtgacggatactgatccctgctcccatgtaaagacttaagcgattcacaatgtcaggataggcaagctgcatctttcgctcatatttctgttgtctctgttcatcctcccgcttctttcctgtccataatccacataaggctgctcctgtgagaagagttgtccacagccagcgggtatctctctgtggataccaggtaactgcctgctctgatacttcgacaggtaattgaactgtctcctcatacccgacctgacactcctgaagctgatactgaagcatccgaaccatcatggctgtatccggcgcttccggtggacagatctgtatggtccggttccaggtcagattctcctccccaaagctcaggagcgcctgtacctgtatccataccggttcctcaagtccttcatttttcaatgttccgtccggttccagatacttccaggaatccagataccattgaaccgccacttcagaatcccctatctgcgtgggcatatgaagatccatggtcacatgatcaagcgatgtattctgtcccagaaagatcgtttccagattcttggatgcctcccggatccttgtctgttcttccttccggtcataaggcactgctgccactgttacatctatcggcgtcttatcttctcctatctgcacctgcagatgctctgttacactgtctgcgccttttcccggtcgggacagctccgtaagaggctgctgctcccacagactgcagatcagcagcagaacgctgaccgccatgcccacacatcccgtcatcacaactttggtcttatatttcaaactgcaccatcctctttcccatcaagtaagcagccccgtagattcccaggcagacgctcatgacaagtgcaccagtcatgttatgatacagcccttccagaaattctcccgatccaagccggatgtacagcaacaccgccgccggcatcaccgacatgatcctctgctcatagactcttgcggccaacaatgtgcggatctcccttcgggtatccatgatctccgccatctgcgctgccgtcccacgaatcactgtctgaagacttcctccactgatccgtgccgccttaaacacttccgcaaagctttgtacttcttcataaggatatttttccgccagttcatcaaacaggatctctggtctttgattattccctgctttggccagcatcatcttcagttcttcctgcataatgcctcctttcggaaacatcagacacaattcctgataggactgtaccaatgcattttccattgaatagcccgccgtgagagatgacgccagtagcaggatccattcccggaacatttttcgaaacagctcctgtcttttttctcttcgcacattttctctttccttatgccaaaaccatatcaatgggattaaaaaaggaattgcaagaaaactgtcgtagtagagccacgacaaaagaatcgtaagaagtccgccttccagcccgtcaagaagcactgttttcccgaggatatatgatcccggcacgctgaaatttttcaatctgcttcattactcctgtcttttcctgtatcccgcagactctgccggatatctgcccggtttcccggaagagaaacagaggatttaactccacctgttccccttccataccggttacttctgtaatttccagtattctgcggctcttatcccgcagacgtccaagataaacgataatatccacccctgaggcgatctgtctgcggatcgcctgtaaaggaagttctctgttcatcaagaccatggtctccatgcgtgcaaccgtatctttcgtactattggcatgacaggtactgatactcccatcatgtcctgtgttcaggcaggtaagcagttcaaatgcctcggcgcccctcacctctcccacaataattctcgacggtctcatcctgagcgatgcccggatcagatcccggatcgagatttctttacagtcctccgttcctgcagaccgggtctccagcctcaccagattgggcacatgctgtatctgaagttctgcggtgtcttcaataaccacaacccgttcctcttcaggaataaattccgaaagtgcattcaaaaaagtcgtcttgccgctgccggttccgcctgcgaccagaatcgaatagcccgctctcaccgcatccgccagaaaatcaatctcctcctgagagatactgtccatctccagcagccgtttcatggtcatcggctcttttggaaatcgtcgtatcgtgatgatcggtccgttgaccgccaccggcggcagcaccacatggacacggtctccgttttccagcctggcatctacgataggctgggattcattgaccgcccggttgcatgcgctggtgatctgccggatcacgtccagtatccgttctcctgagtaaaaattcttctcccatcggctgagcgttccatccttctccagaaagatcccgttcatgccatttaccatgatctccgtcacatccggctcctccagcagctcctgaagaacatccatcttgcggagtgcatgaaacagttcttttttcaggcggcacctttcattcagcgaaacagcctgctctttcccatacgaaatcacaacttcgtcgatcagttcctgcatctcttcatcagacacatcccgactcaggtctacacgctctaaaatctgtctcttcagctctgtaaatacttcttttgcctctgatacatctcccatgatccctcctaacttgtcagcagttcccggatataactccccagtctctgctccggcagcatacttaagtctgattcgctgtccgacccggttccatcgggcggcagctcgagcttctgcagcagttccagaatatccagtccgtctaaaatctgaatatagcgatcccactgttcgatttttccacgggagatcggatctttctttactggcatatagattccatcacattgtctcagcaattccagttcatgaccggtgctggttcccatatccaatataatgacatcatacgtgctctggcttcggatcagatgcagaagttttttccattcttttactgtgatctgacaaaaatctgtataggaatcgcagggtggaatataatccattgctccgaacttctgaaccatactgttgagacgatagagaaactgagatttattctgacgaagaaaatatatgagatccgccatattccaatggtgctctcccaacaaccccgtcagtcctgagcattcttccatatttagatataatacatgttgtgtttcccccacaatctggcccagcgtcagcgcaaactgcgtctttgcattagcatctgccggtgaatataccccgatcaccctgttatcctttcgtactcccgccggatacagctcccggttgtcctgctccgaataataatacatgatctcccgcagaatcgtttccacggactgatacttgtacacggttggataagaagtaaacttccctggcagatttccctcagagagcagaatcacacatttaccctgaagcacatctttccatgcctcataccattttgctgttatcagcaggatctctgtctcgtctccatccggtgtctgttccatccgtgtctgatccgtgcaggcacaaacctggaataaataacctttttttagattgacatactcggcaaatgcctgtacataggcaagatccgggtctgcaatccataattttgtgtttttcaaaataacctcctgcaacaaatactcccgttattatgctgcaaatttttggaatttagctttgaatgacaagcctgtagcgaattgctacatagtagacaaacgtttatcatgcgcctattataaatcacggatttttatatgtccatggtgtttacagtttgttcatattttttagcaaaaactcacaaaagatgaaaagctgacactgcgtaaagcaaagaaactccgctgaatccgagggttccagatgtcaaaagactgaccgggccaagtcctacctgacagtcgatcccccatcttttcaacattgaattgatcagacagatggcgatcccacccataactgtgcgaataccgaagttcaacatccattccatccggttttttatgcttccaatcagcagcaccagcacacaggcccctgcgatcagcagcattcctgttcctttttccattctgctccacctccagtacatgtatatgacagaaagatattactatgcaaaaaacacacgaaccagatgtcagaacatcctgattcgtgtgttttatgattatcctctttgagctacatatttaaatgaagtatatttggggaggtaataagcatccgtgtattctaccagttcatccgtactgtcataaccaagataatggaatccgaataccttttttccttcttccagtttcataagtgccgtatattctttcggcaatgtcacgatctgcagataggattctaccctctccggcatctttcctttggtgtccatatattcatacagagacccctcaccgaattcataccggtctgcatcccagaacagatcctgcggaatatatgctttctgaagtgcataaggttcattatttacataagacaggcgtaccagttcaaataacatttttctgtccggaaacttctcggccagaattccttttaccggaaccaactgaagcgaaacaacttttctgaacgattcatatcctgactgccggatctgcatactcaggctgatcgttgccgttgtgccctgctcgatccttgccatattttccggtattttcactacaaatgtaccttttccgagcagcgggcggatatagccttcttcctccagcatcttcagagctttgcgaacggtctgtcggttgattccatactgctgtgccatcacacgttccgaatccatcttatctccaacctgatattctccgcgccgcatcttatccagtattcgattcataagttgtatgtaaagtgcattatattccattactgtttgcttacgctcctgaatttgtaaaaatcactgatagccacaatttcaaaatattcaaacggaatgccttcttccacataagaagttccccgaatcatcagacactcctgatcctttgtctgcaaaagttcctgttccttagggcttggtgtgacgaccagaatctcttcttcgcttttctgggtcacatatccgaatttttcacggatcagttcatagaacgaacagtgttccagatcttccttttc

SEQ ID NO: 839 - DNA, 4249 bp, Unknown
  16S sequences of unknown bacteria
agcttaatgcagaaataaacgagaatttagagcagcaagctcaggcactttttaagtcatggttccttgattatgagccttggaacggtatagtccctgattcttggattaatggcaagctgggtgattttgctgatataaaacgtggtggttcgcccaggccaattcaagaatatctatccgaatcaggattacgctggcttaaaatatcggatgtaacaagccttcaaactccgttcgtcatagatatcaaggatcacataattgaggaaggactgaaaaaaacagtctttctcaaggcgggatcacttgttctttccaatagtgcgacgccgggtgtacccaaaatccttgatgtcgatagttgcatccacgacggatggctctattttccagagtccaagttttccaaggaatatctgtatttgtttttcaaatacatccggcagcagctggttaatctcagcaacggcagtgtctttaacaatttaaagaccgatatcctcaaaggatatcccacagtattaccggacgaggagacgcttacacgctttaatgaagtcgtgcaaccaatgttcctccaaatgcagaacctcactcgtgaatcacataggctcgcagatgcacgggatgccattctgccacaattgatgtccggcgaactggatgtatctgaccttgctctctaagccgctaaattctcgtttatttctgcattaagctgtatttttttgtcaagcgcctccaatagtcctgcgattttttcctgttcttcatatgtgaaatcaggaacctggtatttcataatggctgctttatccccacgtggcatctttgtgccttttgaggtggccatcgagtaattgaaaaaagtatcatctgcaagcacgtagtatagaaaccgctttgacacaccctccttagttctgaacacaagaacatcgttagagcatccgccgtcaaactctgcaaaccatatcttcttaaagtatggtctaatattggaaacgaggacatccccggcagaaaaagactgtgtttgcgctactgtcggtaaagaagacgctccggtgattccacctttattgggcatcatgttctccgtagagatatatgtatcctcatccagtacagaaacattaatcttgcccttggcgtagtcgcatatatccgaaagattatatttcatacccaatcgccctcagctttctcctgatttcctcttccagttcacgggacttggcaaacataccagacagttccgatgtcagccttgccattttctcttcaaacggctcgccgtcatcttcctgctcttcaatgccgacatagcgtcccggtgtcagaatgtaatcctgctttgcaatatcctgcagggtagcgacagaacaaaaacctttcacatcctcaagcgttccgttctggaaggcctcgaaagtatccgccagtttttgaatatcctcctcggagaaatccctgtgttttctatcgaccatgtgtcccatcttgcgggcgtcgataaagagtgtcttgcctttctgcttcttgcccttggtaatgaaccatagtgtaaccgggatggttacgctgtaaaaaagctgtgtcggcatggcgatgatgccttcaattaaatcatcctctatgattttcttgcggatttcaccctcaccgcttgactgcgtggaaagggctccgtttgcaagcaccagaccaattttgccgttaggcgcaaggtgatgaatcatgtgttgaatccatgcatagttggcattgcccgcaggtggaataccatatttccaacgcacatcttccaggagtttctcctgattccacggatgatagttgaagggcggattcgcaagaataaagtccgctttcaaggtcgggtgcagatcgttcgtaaaggtatctgcttgataaggaccaaagtcagcatcgatgccacgaatcgccatattcatcttcgccatcttccatgtgtcggcgtttgcctcctggccgtaaacggcaatggctccacgcttaccggagtgagcctgaataaattttgcactctgtacgaacataccaccgctgccacagcagcaatcgtatacacggcagttgtcaaatgggcgaaggatagagacgagcgtcttaaccacgctggaaggagtatagaattcgcctccgccgacaccttctttttctgcaaactgtgcgatgcagtattcataggtacggccaagaaggtcttcactctccgtggtgttgctcatgtcgatgttattagtaaagatgtcaacgacatcacccagcacacgcttgtccaaatctgggcttgcataatttttcggaaggacattcttcagagtcttgttctcagcttcaatggctctcatagccgtatcgataaccgttccaatttccggagtatgagctgctgaagcaattgtgctccatcttgcttcttccggcacgaaaaacacgttctccatcgtataagcatcacggtcatcctcgaatccgtcaccctccgcaacaagctcctgatatctcttatcaaaagctgcagaaatataacgcaggaaaataagaccgatgattaccttcctgtattctgctgcgggaatatgtccccacaggacgcaggccgcatcccacagttgtttttcaaagccgatgttggcattggttttatcagccatctgaatctacctccaagtaatcacatgtatccatgcttattctattctttctgttgtaccaaaaaacggactcagtcttcatcgaccatttccattatgtcgctgacatcgcattgcaaagctacgcagattttctgtataatctctgtgtttacattctcattctttccgagctttgtaacggatgccgcactgatcccagccacacgctgcaaatcttttttcttcatatctttatcaatcaacagcttccataatttcttgtaactaatggccatgtgctaacctccattttctgccaaaatgtctatacataaactctgacttatttattatatcacaccgaactttaaatttcaagattttctcctgcgattgcaggatttatttttgttttctcttgaattttacactctgatctgttataatgtataagatggctggttattcagccaattttgcactaaggaggagtgtcgttcatgatctttattagcggtgttcatggtgtaggaaagtcctacttctgtgatatggtcaaggcggccaccggcattgagtcctactctgccagcacattgataacacagaaaaagcattcaggctttgccaaagacaaactcatacctgatattgacgacaaccagcaataccttcttcaggcagtcaatgagttaaagggctccgggcagaatttcattctggacggtcatttctgtctgcttaacgcaacaggcgatatcactcgtatcccgtatgacaccttcacctctttgaagccagatgcgattatcctgctgacggagaagtcagaggtaatcgcggctcgtcgcagagagcgtgatggaattgaggcttccatacaagaaatagaagcttttcagcaggaagaatgcgcctacgcaaaagaagtcgctgcggatattagtgcgagactctttgtttctggcggtgccggagaccttacacaggcgattgaatttataaagtcactttaaggaggagctgtttatggcaggcaatttttctctcaagaaattcagcgatatcgacctaaacgatcccttcttcgattctttgaaggcagattacccggttggcggcaaagtaaagccattcgaggtgtggtttccggaaaaagctcaggaaggccgtacagctttggtattcgacgatgaaaatggccttggtgcctttgtgtgtataaaggacgaaacggaaaacattgtacttacggattcgaccttgccaaagaagaccagatgcaagatcactaccatcaagattgcagaacgttttcgcggccagcgtcttggagaaggtgctatcggtcttgtgctttggaagtggaaagatctgggctgggaagatatctacgttaccgtatttgataaacacgatcttctgatcgctcagctcaccaagtttggctttatcaaggtcggctataacccgaatggtgaaggtgtatatctccgtagtcgcagtagcgtagattacagtgatccatacaagtcattcccgtttattaatccggattttcaaaatgcaggatacctgtg

SEQ ID NO: 840 - DNA, 4686 bp, Unknown
  16S sequences of unknown bacteria
ttgttctttttcatatatgtctccttttttgcaatcttatttttgtcattcgaaagtttgtcattcggggcattttgattgcgcggagaaaacgtccgcaaagctatctgtacatcggactcacctcaaaattaaatgcggaaaatatgtttttatcctttcaaccgcattttaccttatttttccgaaactgtcaataaaaatatagcgaaacacagcacaaatattgcgaaaactttagggtatattgcacaacggctgtcaaaatgttaaaacagaaaaaacgacagctttttatgtctgtcattttgacggaaaatttgaaaaaacggggcgtttttgcgaaaagtttcaaaaaggaagggtcaaaaagattgacacaatgcgttttttatgataaaattgccttataaaagttttaatttgtgaaattgtgctaaattcggaggagacgcctttgggtaaggttatttgtgtcggttcgggaaagggcggagtcggaaagacggcggttgccgtttgccttgccgaaaccttggccgaaagcggcaaaaagaccctcctttgcgattttgccatgccatacggcaccgcggacatatgcctcgagggcggggaaagggcggttttcgacctttcggattttgcacttcgccgcgccgagctttccgacgtcgccgtggaggtttcggacaatttgttctttgccgcggcgggcaaggcctccctttcggaaaaggagcttgccgactgcgtcaggaggatcgaccgtctttgcccgaggtatgattttatcgttgccgattgccccgtcgacagccgcatggccgtcgaaaaaaacttttcaaaaatcatctcgctgtgcgtcacgcaaagcgattcggcgtcggtccgcgccgcagcggcctatgccggccttgtttctcggctttcgccgtcggtttgcaagttcgttttaaacggcttttgccgcgaaaagaagcttgatcttgaccttttgaccgattcggtgggtctttcccttgcgggaatcgtccccgagagcggcgaaatgaggctttgtctcgaaaagggcgagggtttaaaacggggaacggccaggggcgcttttgagcgcattgccgaccgtatctgcggccgtcacatcccccttcccgatcttcggagaatataaaatacaataatcagagaggaagattatttatgcatatagctttaattgcacatgattccaaaaaggagcttatgattcagttctgcattgcctattgcggaattctcaaccgccacagtctttgcgccaccgccaccaccggaaagctcatttccgaggccaccggccttaaaatacagaaatatttaagcggccctcaggggggagaccagcagattgcctcccgcatcggctgcgacgaaatcgatcttctgctctttttccgcgacccgctgaccaagggcgattttgagcccaacgacgcaaatcttctgcgcctttgcgacgttcacaacgttcccgtcgccaccaacatcgccaccgccgaggtgcttattcacggcctcgagcgcggcgacatggattggcgcaacatcgtcaaccccatcggctgataaatttaatttgagcaaagcaaatgccgtcccgaaaggaacggcattttttatgttttaatgaaccagtttttgcattattcttcgtcggaaaggcgatattcggtgtcgtcctgatgacggtagagcttgcggtcgagaccccaaacgcgtcccgtggtcttgcctttgtccactccgtcgattgccgccagcatttcaaagagcgaggcgtcaagacggtcgatggcggaaacgacctcggcctcgggaaacatggggggaatggggctgccgtattcgggaataccgtggtgggagagcacaatgtgctcgagcagcatgaccgtttcggggtcggtgccaagctctttgcccgcaaggccgatgtctatggctccgcccacaatgtgtcccacaagccctccgacgggcgtatattccgaggcaagtcccgtatcggcgaagcttatttccttgagtttaaacaggtcgtggacgataattccggcatatacaaggtcttttctcaaaaaaggataaaccgagcagaccgccttgcccacacggagcatggagagggtgtgaaaaagaaggccgccgcgcatggcatggtgcattctcagcgcggcagaacaaatcagcagcttgtctccgcagtcgtcgagcagtttgttcacaagctctttaagtccctcgtcggaaaagccgtccaccgtcgcctttatttcggcaagcatatctttcgggtcaagctttgttgcggccaccagctgcgacatatccacgtcgtcaagcggcgccgtgtggcgtatacgctcgattttaaattggcttgcatttttccatttgtcgatttgccccttgacctttatgatttctccggcgttatattcgtcgtcgctgccctgataatcccacattttcgcagggatttcgccgcccttgtcggcaagaaccatatcaaggtagggcgaacccttgacggaaattttcttgtcggcggattttataagcataaatcccacggcctggccgttttgggcatttttttcaagctcggtcatttttttcactccgataaacattttattatattttaattataacacaaaaaggaaaaatgttcaatcaaaatatctttcctctctgtcccgccgcgctcgccgaattgtcccgcggactcattatcattttctgtatcagtatcattaacattatctttatctttatctttatcattgtcattatcggcttttttgggtttttataaaaagccttcgcttttttggctttttaaaatcgttttttgtatgacggtttataccgactgttccgtgcaaaaagcgcccaaacccgaggcttgagcgcagttttgtgttttaaattcaaagattaaaaggcggttatcttgccgacggaatactgcaaaatcatcagcgcgtcggaaacaccgatcatattgtccttgttcgcgtcgccgataagtttaaattcggattccggttccttataggagataaaaggattgggctcgggcaccggatatttgccgatgtgccacaccgacagctgcaaggcgaaaagcgcgtcgaccggagttattctgccgtcgcggtcgatgtcgccgtaataaaggtcgctttcggccgaaacatttccgggcagctcgatgtgcttaaattcgaaaaggtcaagatattcgtttttccacggttcttcccttaaagtcccgagagcctcaacaactatcaaatattttccgtaaaggaagacaccggagctgaatgtgtattcctgcggatttcctgtccaagaggcaattttcctgcctttatatgtttctgtcttttctatgcttgataccaaggagggatattctctttgaattacggtttcaagagtatctccgtcatttatttcgacgggcagtatggaaaatcccaacgctttgtacggatagtcatgaggttcaacaagccgaatatccgagtaaccgcttccgttttcaagaatagccttttcgtaaattttatgataatctatgacaagactgccgttgttgcaatagggtataggatagaaaccacggctccaaaatatcgagaggccgggatatttttctttgttttcttcactttggaaaaaattgattatttctttttcggaattattgtatattgcaggatcgtcgactgtcggctttgccgaaccggcagaggaagtgccgccgactgtcatggcaaacgaggaaaaagaaagagaaattgccgtaaaaacagcaatgattaaagaaagaatcttattcgttttcatgtggtttcctccttagaaccgtttcggaatattttgtgccgcttcctttttgcagacgtcgcaaaaatattcgcttttgtccttactttgcataaaatcgtttgtcatcaaacactctattttatacccagtttcgggataatgataagcgcaattcgggttggagcactttttatcggatttttcatccccggcacagtatgtattcggcaaaccgcaaagtgcgtgtccgagttcatgaaaaacggtaaaccttaccctttgcaccgaagaaaaggactcttgcggagtggaaccgtaagctccgttgttgagcatcataattcccgttgcttttttaaaaacaccccatgaaaaaccgccgttggtaaccctgttatctgaagtcacatcatcgggtgaatctgttggatcccaagtaaaatgtcccgtccaaaaaatcgggatgaacggatccgatgcagaaaaagccgaacagttttcggtaaaatttgttttgtatagattttgattgtctttatgattgacgccggttgaggcatagtgttcgcatttggcgttgagctgtgcgtttgttgaggcgccggtgcatttgtcggcaatgctttcaatgtgtacggtggggcctttttttatgtcgactccgtagtctttataaaactctatcgcctcgttaacatagtcgtcaatggcggttttcatttgcgcctcggacatgttccaccttgtcagcattccggtgtcataataattataaattgtgacctctgcgccgtagagccg

SEQ ID NO: 841 - DNA, 3488 bp, Unknown
  16S sequences of unknown bacteria
cacccgatacggcgccggcatattcgccttcaaccgcgccttccgcttcgagcaaagagaaggtgatctcacctttctgccgatccgcaacatggacaacgtcgtgctcagcgacctggtcggctatgagatgcagaaacagctgctcatcgacaacacgcgcgccttcgtcgaagggcgcagcgccaacaatgtcctgctttacggagacagcggcaccggcaaatccaccagcatcaaggcgatcgtcaacgagttttatcaagacggcctgcgcatggtcgagatctaccgccatcagttcaaggatctctccgcgctgatcgcacgcctcaagctgcgcagccaccggttcatcatctatatggacgacctctctttcgaagatttcgagaccgactataaattcctgaaggccgtcatcgaaggcggagtggagacccggccggaaaacatcctcatctacgccaccagcaaccgccgccacctgatcagggagacatggagcgaccgcagcgacatgaacgaggatgagctgcatcacagcgacaccgtgcaggaaaagctcagcctggtggcgcgcttcggcttgtccatctgctacgaacggccgaatcagaaaaactacatgaagatcgtatgcgaactggcaagacgctatccggagatcaccctgagcgaggaggagctgatcgcagaggcccgcaaatgggagctcagccatggcggcatgagcggaagggcagcgcagcagctgatctatgacctcagcggaaaagcgctcatgaaacaggcacaggaagcaaaaaaagaccgtgaacgctgatctttccccgtctgatgacaagggatgatcagggcttcacggccctttttcatttatgcgctcactgcggccagccgctgttttccggcatatgcccaaaacgccagggcgagcagcgcacacagcgcctccgtcagcgggaaagcacaccatacgcccgtgatccccagaacggcagccagcagaaacgtcgtcgggatgatcagcacaaagccgcgcagcagcgagatgacatgcgcctcccgcaggcgggcagccgaagtaaaatacatcgagaggatgatgttgaagccggcaaaaggcacagccaggaaatacagccgcatccccgcgtcagccgtctgctgcagctgcggatcacgcgcgctgttgaacacgccgacgatcccgtctgtccccagctgcgtgagcgcaaagacgagggcggagaagacgagcatgcagatcagcgcggcgcgcaggaccagccgcgcctccttgtttcggcccgccgcgcaggcgcgggtgagcagcggctggatgccctgcgcgatgccggtgcagatggagatcaccaccagagaaagattggcgatgacgccatatgccgccacggccgtattgccgcccagatgaagcagcaggaagttgaatacgatcatcaccacgccggaagacacctcgctcaccaatgaaggcacgccggccgaaagcagcgtcacggccttgcgccaggagagcgggcagcggatcacatgaaagccgcagcggctgcgcaggacatgcggtgagaggatgagcacgctgatgatcggcgccagcccggtcgctacagcggcgccgacgatccccatgccgcaagggaagatcatcacccagtccagcaccacattggaaagcgagccgatgatcatggcgctcatggccatccgcggcgcgccgtcattgcgaacaaagccgagcaggacattgttgagcaggaacgccgggccgaacgacatgatcacccgcagatagtcagcgctgtaccgcgccacccttccctgggcgccgaagattcgcacgatctgttctgcaccaaacgatcctgccacacagaccagcgcgaacacgcccgcgctcagcagcgcatgcgtgaagtacgcatccgcctccctgtcctgtccccggctcttctgcatcgtgaagcgcgtcgctgcgccgatgccgatcatcaggccgctgccatggatgaagctgtatatggggatggcgagattcagcgcggtgaggccgtccgcgcccatgccggcagagacaaaatacgtatcggccaggatgtaacaggacagcgcgatcatcccggccacgctcgctgagacataacggaagaagagattcaggttcatgcacattcctcccctgccgcaaaaaaaagcatcgaacacgcatcttctcaggcctgtcgatgcggctcaatgcttgcccggcggcaaatttatccaccctattctaatataccggaacgcagctgtcaatgcacccgcagccgttcgcccacacggatgcggtcaggatccgcgatgtgattccagctgaccagctgagccacgctggtgccatagcgccgggcgatggcgctcagcgtatcacccgcacgcaccgtatgatagctccggcttcgctcctcaagcagctcgttcacccgcttctgcacggcagcggcatcatgaccggcctgcgtaagacgctttgtccgcgtctctccattgccccatttgcctgcgatgacctcttccgccagctcatccacgctctttggcttcagcttctcgttcacgagcttctggatacggtcaggatcatgaccggccgccttcagccggcgcgtgcgttcctcgccgtttccccatttgcccgcgatcacttcatcggcgatctgcgcctcgctcttgcgcgccggcgccgccttcgccatctcatcccacgtgctgcgctccccatagaacacatccatgtcgagcgcgccgttccagcccttcagccggccattgtcgctccactgccagcagatgatcgaaggccagcggcgaaccgcgccgggcgtgccggccttgcgcatatcatactgatacgccggctgcgtgctgcgatactgcgccatccagagccggtaatccttcgccacgtccgtccagtcatagcggtttgccaccgattcgctcatgtagatccaggggcgcaccccgcttttttggtagacgatatccagccattccttcgcccacgccgtatccgagatggtgtccgcctcccagtccagcgccaggatggccttgccgatatacggctgaacgatcttcaggaaccactctgcctccgcctgcgccgtattcttgcccggatgcgcaaaatggtacatgcccagcctgcggccgctctgcagcgtctgatgcgcgagatcctttgcggaaggatccgcatagccgactccctcgctcgccttgacgatgacgaaatccgcctggatatcggcgatcctcagcccgcgctgatagttggaaatgtcgattccatgcagcatatgctcactcctttccctcatatcctatgcctggacaagacgcatgtctgggtcatgctcagggatccgtaagccggcgcgccagaaacagcgccgcgaggttgaggaccgtcatgcacc

SEQ ID NO: 842 - DNA, 32759 bp, Unknown
  16S sequences of unknown bacteria
gcagcttgaggtcttcgatctgctttagggtgctgaccttctgcgccgatgcaagggattcttccagttcggcatttttcgttttcagctttttgttttcggatgctgttttcgtgaaggctacgccatatttccgcagcagcgtgtccatcttctctacgctgggaatataggtatccagaatcttgcagatttcctccgcccggcttttggcgttaaagggattgattccagtgagcagatcctccagtttgcttttctgtttggtcagtctggtcatctccttaaatacgcggggcgggatatggtcgcgcccggtcaggctggcgctctcgccacgctccaaatctggaaacttcttgaccatgtgtttccaaaactcatcctgccaccaggtcagcttctttttattgcccataatgtctttggcgctgagcctgccgtcctcagtcagagggacaaagcaaaggtgcatatggggcgttttctcgtccatatgcaccacagcagatataattgtctctttggattgatgctgttccagaaagcgcagagcttcctcgaaaaacacgcgaatctccgcccgtttcttccccttgaagaactccgggctggcagtgaacagcgtctcgatcatacggatactgtctttccgggtacggcatccggcagcggcaatttgcctctctgactcggcccggtacttgccgggcggtttgaccagatggaagttgtacttgcttcggctggtatccacatcgggattactggcgtacttttcctttgtgcgctcgttatgggcctcgatattgccgatttcaggccccttatattttgcaaatcgcataatcgcgtactgtgctttttccatgctcaatccctccgtttctgccagacaatgtcatatcccagcacatcagccaattccacggcctcccgataccgcagcgattcccgctgcaatttcccggaaagattggatacgctgtcgctccaaccatattcatcgtgcagctggtcaacgacttcctgcatggtgtaaccggcgcggatgatctgcgccttgatttcgtttcggatacttgacttcataaaatattcctccattttcgcaagtgacactctttgtcacttgacagctaaaacatgattttcggttgcgtcataaaaagaaccggctgcgctggggagcgcaccggctttggtcaatggtgaaatttgcgtaagtgctgttttgcgatagaaatgattcctcgcgtatcggtggtcaacggcggaatattcgacttcgcagaaatgtggggcttttcactgttcgggctgtattgtcacaaaatgctgcaatctgtacgtcgttccgtgagccgccatccggcgaactgtatacggataaaagagaaacatttcgccgttttgagattgctctaaaatatgcctgcaaaatcaccgctttcccttgactgttttagacgcggacaaaaatgtccatgactactttgcttcgctaaagtggtcgggttcaaaatgacaccgaccacttcacatcacaaaaccgagaatatttgcattattctggtcgtacccaaaatgggcacgaccactttatccaaatgaagcacctctacaatatatagggtaataaggttaatcgctgcgtacatacgtaccggcgaccaaagcggaaatcaatcccgccagtcttccggtacgtacgtacactgtgaagcgtccgtaaactcgtttatatgcggccttgccactgcctcgatccccataaagccccatacccggcgtcctgccgaattgatgatcgtgttgcagtgttccagattgtacttgccgcaggctgccaccaacgcatcgctgaaactgcggcgtttgagtgcagtcagactattttcctcgcaccacatccggtaaatgtcatagcaatctttggagctgatggacgcatccgctttcagccggatatagccctcggattccagaaaatcgaacacattgttattgtcccgtttgacggcctcccggttctctctggtacgctggctctcggtgaacttgaagttgtttgccaccagccgctgcaatcccgcaaaagcccagaggaagatgccctcaacctccgctttcatcttttcagccaagtcgggatcatccacgcggtcagcaggtttctctttggtggtcaacaccagctgtcgccggtaaaagccatcgctgcggtcaaagagagcctgcaagtcgccgttgctgaatgccagcagccgggcgcacatccatccctgataactttgcttgcctttacgctccaaatccatcttgccctgagcggtgacgatggattttacatagttagtctgccgcagcgcctccatccgcatatcatcatcgacacatagcagaatgtgttccagatcagcgcgggcaaaacggttctcggaaattttaccgatgctgccgtccttcatgttgctgccgaacagggcggccagcaccgcgccgatttggctcttgccctcaccgccgttaccttttatgaccatcatccgctggcctttgttactggggatcaggcagtagccgatatattcctgcaaggtggggatgtcctccgggtagagcagcccatccagaaaagtcagccagcggggcggcgtgggtgcgacgggattataggctaccggcaggcgacagcgcacgatctccggcttgccctctgtaaaggtgccatccagaaacaacgtgccgtttgccagatggatgcggtctgtctccggcgggaaatcttccgccagtgcggccagcttcatcagttccacaatgttgctgattttgcggggaatgttactgaccgcgcagcatttcagttcctcaaaaatttctccacgcagcggcagttcatcggtcacgcgtccatcaggcgtgaaaaaagccccgtttgtgtagatgattttatgtctgctgagaaaatcatcacaaaacagggcttcattgatgctcttaccgtcaaaccagactggctggttggcctcacgcgattgctcgttcttcgccacggtgctgcacctccttttccagacgtttgagccgccgctccagcgcggtgatagtgccgtccttcagcagcatatccaccgccttcacacgctgctccagttccgcaaacatgagtacgtccagcaagtggtctacatattcgatcatatgacacgcctccacgaaacggtcgtctggttcgtcctctggtgactgcggcgcatactcggctttccatccttccagcagatgcagataatcgcacagcacccgcaggcaatgcatctcatcgttacggaaagcccgcgccagcggatagggctttttcagcgccacagctgccgggggcttgtccgggtcgatgccgaagtcataggccagcttctttgcggcctcatagctgctcaggccgaacagccgcgccacaaaatcgatcacatcgccggaggccccgcagccaaagcagtagaaataatccctgttcagcttcatgctgggatgccggtcatcgtggaaggggcagcagatcatgtcgccccggttgaccttgcagccatagtattcggcggcctgcttcacggtgacagcggattttacagtttcaaataaattcataggctttgtcctccattatttattgacggtatctgcccgtctgcctgaatatacggggaaaaagcctatagaccgaaaaatccgctaaaagtgcaagaaacgaaaaaatgccgccctgaaatcttgcaaaaatgcaagacctcagagcggcgaacccagccgaaagcatttgcccacgctggttttataaggtataatggataaagagagttttagaaaagaggtgcgtcacatggagggagcctatctgcccggcaatatccggcagcggatgcaggagcttatgaaggaacataaaattacccaggcacagctggcgacccgcatcggcagcaccgagagcgccatcagccggtttgtcagtggcaagaccgataagatcagcacagaacatttgctccgcattgcgaaagtgtttgaagtctccacagatttcctgctgggggaagtcaacacgcccgaccggacaaattttgatattgaagaactgggcctgtcggtgcaggcggcgcggaatctgtacaccggaaaagccaatgcagagatcgtcaaccgccttttggaaagccctcgctttgcagaagtcacctatatgattgagcaatattttgacgatacgctggccgccggtttcgccggacagaaccagatgcttactactctcagcgccatgctgcgccggaatgtgaaaacggatgctgcggtgcaggctgccagagcagtcaaccggcagaaagtccctgtctatcaggcagacctgacgatgatacagaacacatttatggcggcactgcgggaagtgaagaaagagatcggcaacgatttcacagcggtgcagtctttgaccaagggcattacccagcagatgtttaccgagttgacaaaaggccaggatgtccaggcaccggccatcacgccggaaatgatttccgccgccgttacccagagcgcggcaggaatggacggtgtacaaaaggaagcattggacaagtttggtcaggcgctgacggaatttctccaatccaccttagaccacgcgcaggagaagcaaaatgccgacccggagcaatgagcagctgtgcaggctggcacagaaaggggatacggctgcccgtgacattctgctggaaaacaatctgggattcatccgaaaaatagcgttggagcaataccggagcatggggctggatgaaaatgatattggaattgatttagatgatttggtgcaggagggaagtatcggcctgctgaacgcaatccctttgtttgatgccggacgtggcatgaaatttctgacttatgcagcaccggcgatccgcaacgccatgacagactgtatccgcgctgccctcgctcaatttgaacaacggatggtggataagagcgacggtcccggcttccagagagtatatctggatgacgttctctcagatgatgaacggatgctgcggattgaggccatagctgaccctcacacccaaacgccggagcaaatctatatccaaaaagaacagctgacggaactgtatgctgcgctggacaagctgactgccagagagcagacctatctgttgtaccgctatgggtttaccgatggaatcgcgcacccactgattggcgcggcgctccatttccacctcagcgagagccggacaaagaaggtggagggagaagcgatggacagcctgcgcgggaagctgccgtggtggttctgatacggtagtaagcagcggctgacgggggctttgatatacctttgttccgcaaatgacacagctgactgacagtgctcgctcgcactgcctgccagcctttttctgtcgtttatgccgccccgcaaggggcaacctttcccgccagaacgccgtaactgtagccacactttccggggtgtgctacaattccggctgccatctgctccacaaaggtataacacactagactttcctacggaaaatcgtgtgccaaggaaggcactgccctcctttggaaacctcccgccaaggggaacgctgttcccctctggacaccccgcctgtccgtgcagtagctatccatcctacccccacatgatggatacttcctgcccagacaggtaaaacaggcacagaaatttgcccggtaggcaggcaggttcctgtgcctgttcatttggcgaatatcgcaagagtgtgcgatattttcttgtttgtgacgacatattctgctataattagattagatttttatgccctggaggaaacgcaaatggctgtttcgtacaacagactttggaaactgttgattgacaagaagatgagtaaggcaaacttgcggaaagcagcaggaattgctcctaacactatgacaaaattgagccgtgatgaaacagtcacccttacggtactggagaaaatctgcgctgtggtcaaagcagactttggcgacattatggaatatatctcggaggaaaaacatgattaacatccgcaaactggaatcagaactatgggagtccgccgatctgctacgggccggctctaaactgacatccaatcaatattgtatgcccgttctggggcttatttttctccgctatgcctacagccgcttcaagctggtggaggctgagatcctgaaggaccggccggtgcgcaacggtcgggtgctaccggtggaggagagcgactttgcctcccgtagcgccctgtttcttccccgtgaggctcagtatgcctatctggtggatctgccggagaacatcgccgccgctggcctgaccaaccgaaacggtcaggtgatgaacagcttgggcgaggtggtcaacaacgccatggaactggtggaggagcaaagcgagcaactcgccggtgtgctgcccaaggactacaccatgttctccgatgagttgctggccgagctgctgcggatcttcaacaacagcgccctggacgacgtggggggcgacgtgatcggccgcatctatgagtattttctcaacaagtttgccaagaatattgcccaggacgatggggtgttctttacccccaagtctcttgtcaaaatgatcgtcaacattctggagcccaatgagggtatcctgctggatccggcttgcggcagcggcggaatgtttgtccagaccggcgactttgtggagcgcgccgggatgcttgccaacaacaccatgacattttacggccaggagaaggtagaatacaacgcccagctgtgcctgatgaatctggcggtgcacggcctgtccgggatcatcaaatccggtgatgaggccaacaccttttaccacgatgcccacaacttggacggctgctgcgactatgtgatggccaacccgcccttcaacgtggacaaggtgaaggcggagtctgcgcagaacgcagggcggctgccctttggcatgcccgcggtcaacaagaacaaagaggtcagcaacgccaattacctgtggatctcctatttttactcctacctgaacgagcacgggcgggctggttttgtcatggcttcctccgccacagacagccagagcagggacaaggacatccgggagaagctggtaaaaactggccatgtggatgtgatgatctcggtgggcaacaacttcttttacacgaaaagcctgccttgctccctgtggtttttcgataaagggaagaaagcagagctgcgggacaaggtgctgttcattgatgcccggaactactataccgtggtggaccgcaccctcaacgagtggagcgagtggcagctaaagaacctgaacgccattgtgtggctgtaccggggcgaggcggacaaatacagtgaattattggcagaatatgaaacgtcggtcaaaacagatgtactgaatttgcgcaaagaaggccaagaactggaacagttgctgagtaagggagcagccggccatttccgcggaaatatgcccgttgtagacccggaatttacaatggccgggatgaaagagcacttgaaccgatatctcgaaatcgtgaaagcatccgtccgccttacagcggaggagatcaaggcctgcagcaaaaagccacttgctgccgccgaatcggcctttacagaaaagatcaaagagatactcattacgatacaagaatatgagtggctgacagaaaaattcggcgagggcgcatataccgatattcccggcctgtgcaaggtagccaccctggaggagatcgagcagaagggcttctccctcacccccggcgcctatgtgggggtggccccggtggaggacgatggggtggatttccacgagcgcatgacggagattcacaaggagttgctggaactgcaagccgaatccgaccggctgatggcgaccatctcgaagaattgggaggagatggggctgtgaagtgggaaaaagtccgacttggtgatgttacagattcatgtctcggaaaaatgctcgatcaagaaaaaaataaaggagaatatcagccgtatcttgcaaatttaaatgttagatggggcgcatttgatttggataatttatcccaaatgagatttgaagatgacgaacaggatcgctatggacttagatatggtgatcttgtcgtttgtgagggtggagagccaggtagatgtgctatttggaaagatcaattacctggtatgaaaatccaaaaggctttacatcgggtacgagttcataaatgccttgattatcggtatctgtattattggtttctcttagcgggaaaacggggcatattggagcaatacttcacaggcgctactataaaacatctgccagggcaaaaacttaagagtgtcgttatagatatgcccccaatcgaaacccagcgccgcatcgccgacattctctccgcctatgacgacatgatcgagaacaaccgaaagcagatcaaactgctggatgaggcagcccagcggctgtataaagagtggtttgtagacctgcgcttccccggccatgtgcacaccaaaatcacggacggcgtgccggaggggtggaaaaggcggaaactggttgatattgcccaggttcaatatgggtatgcctttgatggatcattgttcaattctcaaaaaataggaacccccattatacgtattcgcaacatcccgcaaggccagactgaggactatactccagaaaatgtagattctcaatacttggtttataacggggatattattgtaggtatggatggtgaatttcacatcaacacatgggccggtgatacagcttatttagtgcaacggacttgtcggataaaagctttaacttctgatttgaacggtttcctattatgggctatctacgaaccgattaaatattttgagaaaacagttgttggtgcaaccgttgcacatctcgggaaaaaacatatagacaccgttgaaatacttgttccaacagaaaagttttatcttccgttcaagtcactgtttgaggcgcgtttattgctgatgaatcaaaacagggccttggcagaggcacgcgaccgcctgttgcccaaactgatgagtggagaagtggaggtgtaatttgtatggaaactttgcagtgggtttttgatgggattggaactgagcttcttagtttagttatcggtggaattgctggcggatttgctgggtacaaaataggaattaaaaaaagtggaaagcaagtacaaaaagctaagagtggagctaaacagcggcaggaaatgattgttgatagcgatataatcgttagagaaaaaaacaatgcgcaaaacagcattagacagactcagaaggccggaaaaaattctgaacaagtgcagattgggagaattgaggatggaaaacggtaaacaaatacaaaaagcaggagagaattctcagcaaattcaagcgcaaacagtgatagtcaaccagggaatctcagaagagcgagtacgcataattttttctgaaatgcttccatatgccctacaagaatatacatgtgatgcttatgctgaggccagccaaagaatcggaaaattagagtccaatattttgccgaaacttgataaagtagatggcctacttcaagcatttgctgatcctgcgtttcaaattttactgcggaaagcccagcaggcttcagcggcaactgaacgagaagacgattatgcattactttcagagttacttgtatgtcatgtgcaaaaagggacagataggaaaaaccgcacaggtatcaatcgtgcggttgaaattgttgatcagatcgacaacgatgctttatgtgcattaacagttgctcattcagttctctgctaccttcctacagcaggaggatgcaaggaaggacttggtacgctagatgcccttttctcgcaactaatatatcaagcactacctaccggaactgaatggcttgatcatcttgatattttaggggctgtgcggatttctacgatgggaacaatgaaaaaaatatccaactgttacccaactctattggatggatatgcttgtgttggaatcaaaacagattctgatgattataaaaaggctgttgaactattaaccgaagtcaatataaattctgagtttctcgttccaaacgagtgtttagaggggtatgtacgacttaacatcaggaatgaggatgtaattgactctttgagttttaatcagggggcatatagagctcctttgactgataatcaaataaatacaattaaacagatttggaaattatacagcaaagatacaggattgaagaaagaagcctcagataattttatgaggttgtgggacagttatgattctttgcgccaactgcgtatatggtgggataatatacccaacgcgtttcagattacacgtgttggggaaatacttgcacatacaaacgctaaacgctgtagttcgaacataccggatttgatttaaaatatatttgaggtggtgatttaatgagctacgactactccgaaaatatcctcgtccaggaatcggccggacacctgctggagcgggagctgggctgggaggtggcctatgcctacaacacggagaagctgggcaaggacggcaccttcggccggacaagctaccgggaaatcctgctcacccggcattttcggcaggccctccagcgtctgaatccgtggctcacctccgcccagctggacgaggcccagaagaagatggagtcccgcctgtccaccgcctccctcatgcagatcaacgaggagaaatacggcctcatccgggatggaatccccgtcaccgtcaagcgcccagacgggaaaaccgaggagaagcgggcccaggtcatcgacttccaaaacccggaccgcaaccacttcctggccatcaaggagatgaaaattcacggcgacctgtaccgccgccggacggatatcgtggggtttgtgaacggtatccctctgctgtttgtggagctgaagaagaacaccgtggacgtgcaggacgcctacaccaacaactacaccgactatctggacaccatcccccacctgttctggtacaacgccttcctcatcctctccaacggcctggaggccaaggtgggcaccctgggcagcaagtacgagttcttccacgagtggaagcgcctcagcgaacaggaccagggcagcgtggccctggagaccatgctccggggcatctgcaaaaaggagaattttctcgatctgctggaaaatttcatcctctttgaccactccggcggccgcacggccaagatcctggcccgaaaccaccagtacctgggtgtcaacgaggcggtgaaagcctacgaggcccggaagctgaacaacggcaagctgggagtgttctggcacacccagggcagcggcaagagctactccatggtgttcctggcccagaagatccgacggaagtttgccggttcccccaccatcgtggtgctcaccgaccgggaggagctgaacaagcagatcagcgacacctttgagaactgcggtctgctgggaaaggccaaggccgggcagttcatggcggccagcggcgacgatctgatcgacaagctccggggcaaccccagcttcatcttcaccctgatccagaaattcaatcagccgaaggcccagcccatctatcccgaccacgacgtcctcatcctctccgacgaggcccaccgcagccagtacggcgttttcgccgaaaatatggtgcatttgctgcccaccgcctcccgcatcggcttcactggtacgcctttgctgtccagcgacaacatcaccgagcgcaccttcggcggctacatatcggtgtacgacttcaagcgggcggtggaggacggggccacggtgcccctgtactatgagaaccggggggataaaatcgccgacctccacaacccggagatcaccgaccggattctggacgccatcgagcgggccgacctggacgtggaccagcaggagaagctggagcgggaatttgccaaggagatccatctgctgaccgctgagcagcggctggactccatcgccagggactttgtgggccactactccgacctgtggaccagcgggaaggctatgttcgtatgcctcaataaagtaacctgcgtgcggatgtataacctggcgcagaaatactgggcccgggaaatttccgagctggaggcgaaacgcaaacacgccacccagcaggaggcccaggagctggaccggaagattgcctggatgaaggagacggaaatggccgtggtggtcagccaggagcaaaacgaggtgcagacattccagaaatggggcctggacatcaaataccaccgggagaagatggagaagcgggagatggacaaggagttcaaggacccggaaaatcctctgcgtgtggtgttcgtatgtgccatgtggctcaccggctttgatgtgaagtgcctgtcctgcctctacctggacaagccgctcaaggcgcacactctcatgcagaccattgcccgcaccaaccgggtggccgagggtaagaacaacggcctgatcgtggactacgttggaattgtaaaggcgctgagaaaggcactggcggactacaccgccaatgtgggcggccagggtgggaccgaccccaccgtggataaggagcagttgatttctcgtattctggataccatttccgccgccaaagactttctcctgcgccacaatttcgacttacagacattgatcgacgcaaaggattttgagaagatggcccggctggaggatggggccaatgccgtcagcggaacattggaggaacgcaagcagttccagacctatgccaacgaattactccgcatgatgaagtacgccgaccgggacgacattcctgccggcacccggcaggagtacgacgcgatcatcgccatcttccaggcgctccagaaaaaacgcaggcacgccagcaatgtggacctgatggtggagatcaatgggatcatcagcgagtatgtgcagatcgacacgcccgtggaaggactaactccctcccgccagtttgacatcagcaagatcgactttgacctgctccgctgggaatttgccaaggccaagcggaaaaatctcattctgaaagatctggacgatctgatccaacagcggctgaacgagctgctgtttgccaacccccagcggattaactactatgagcgatatcaggaaatcatcgaggcctacaacagcgagcagaaccgggccacgatcgaaaaaaccttcatggatctgatggatctggccaacagcatggatcaggaggaacagcggtatgtccgggagggtttctccagcgatgaagaactttcgctgtatgatctgctcttctcggaaaatctctccaagcaggacatcaagcaaatcaaacaggtggcggtagatttgctggcaaaggtaaaggcgaaaatcgcagagctggaccactggaccgataagcaagagaccaaagcggcggtggataacctgattcgggatacgttatgggcggaactgccggaaagctacgatgaaatcagtatttcaggttaccgccaaaaaatctatgagtatgtgtacacccgttacccggatgttgcataacacagaatgatatatctcaggaggaatcatggcacaatacgaagtaaataacagctcaatacaaaccctactatcttggatccgcagtggggaaattgcaattccagaaattcagcggccttttgtgtgggattccaccaaagtgcgtgatttgattgattccctgtatgctggttttccagttggctatattattgtctggaaaaatcctgacgtgcgtctgaaagacggcaccatttcttccggcaagaaaatcctcattgatgggcagcaacgcatcaccgctttgcaggcagcgatcgttggcgagccggtagtcggcagcaactaccgcaaaaagcgaataaaaatcgctttccatccgttggaacagcgctttgaggtggccaatcctgctatcgaaaaagatgggacctggatccctgacatcgccccgctctatcagcctggtttcgactcatttaactttgtgatcgactactgcatcaaaaaccagctggataacagcaagcgcagcgcagtcaatgatgtacttaccaaattgcagcagattcagaacaacagcattggtgtagtcgagctgtcccatcaacttgatattgcccaggttacggaaatctttatccgcatcaactccaaaggtgtggtactttcccaggctgattttgccatgtccaaaatctcctcggatgaccgctatggcggcaaccacatccgcaaaaccatggactatttctgccacctgatgcagaaaccggaggactttgaagcaatcctgattatttcacgccaagggatccgggtctgagctttgctcagacccactgatttttctcacagacccagcaatacgcttttgggatccaccggtgtgttttttaccttttatgcttggcacagtattccctcatattggtgctgccagtttcaatccagaaggctgtgtatgcgtaacggtctacaatcgcttctgcccgtactccttcgcccagacgtttcacccagtcatccttgcggtattgtgtacagaagatggtagaggttgtatccgagcgcctttccataagttcaaacaggaagtggagttccgcatccgatatgtcagacaccagccactcatccagtatcaggagaggtatccggctgtagcgttcaagcagcttcctttgattcccggcaactacggtggagtccccatactccattagcaggtcaggcagcctgacataccgtaccctgacatggttcaggcaggcttcttttcccagggcacaggccaggtaggtcttccctgaaccggtaaatccctggaggatgatgctctggtgcaaaccgatgtactggccactgaacaggttctcaatgagctccctgtttaatccgcggctggcatagatgactccctgccggtttgcctgcggaaaacggagctttgctgacttgatcagccgctgtatcttcccattgtatttctcctggtaaatgtagtccaccagccgctgcatcctttcatcgaagggcagggctattgtcgcaggatccgcctgctgtacctccagccccttgattgcctcgcccagattaatttcacgcagcttgcgcctggtctcttcattgatcatctctgccacctccgtaatagctgcttcccctcaggtatcccatctgggaatggtcctttgcatctgcttttttgcgctctacgtaaatctcatcttgattggatgcaaggatcgaattaagatggtggtaacggggctttttaatcccgctggtgatggcaaactcacaggcagcttccaggcgcacttcggagtatttgttgctcagtctcaggacggccagcgcagggttatagccctgttcttttatgggaaccccctcaaagatacggtcaatcgcctgtgccgtataatcgccgatggatcgtgcccagtttttgatccggatatcatcccatggggaaaacttgaacttatccggcatatcttccggatgggtggaatactggttcctccggccagccgggaagcggttatgcgtggctatgcgggcagaaccgctgtagatctccacggtgctgtccgtaacctttaggtcaacactcttcctggcgtactggtaaggacaagagtaccggttatactcaaagacgacatggtagtcgatgtttaccttccttccatagacccacgtggcgatctcataagggacagacggcagtggatgcaggaacggcttctcatccaggtaagcgtcatagcggcttccttcacgtttctggaaactctcgtggttgaagccgtagagcttttttgcaacggcagctttcagatcctcaaagctgtaaaaagtctcgttcctcagccgtgcgatgatcgctgttgcaatcttccccactgtgccttccacggaagctttctgtttgggtttacggatgcctgccggcatgatggctgtctggtagtggctgcccagggcttcataatctgcagtcaggacaacctccccttctctgggatgggatacaacgcccgtcttcaggttatcgcagacaagacgcgtggcaaccccgccgaagaacccatacatgtggatgtgggcgcggataaagctgtccatcttcatgtcccggcagggttccacgtaggagtactggctgtagggcagtgtccctacaaacaggtatacggttacgatctcccctgtggaagcgtcgacataggtcatggtaggccctgaccaatctacctccacagcaacgccgggcttatgttccaggtggttcgtaagcttgtttacaatcgtgtattcgctatagccctggcagtatttcgtatatcccatgggaatgttgccagacgccctgcatttgtcctggtattcctgccaaaggagcttcagcgtcacgcccgtacgtttcagttcctgatggacatactcgtaatccggcttgtcatacaggctttccagggcaaacttgtccggataaaacttgcggtaaaccgtatcctcatccatctgggcgatgtcctcataggatatgcccatcctgtcagcgatgtggaacacatcaccgacggagttctttgaaatgtgcctgctggcggcgattgcattccgccccatcccggcactgcgaagctccagtatcagcttcacgttaatctttttggccatgttttcggcctcctttcatagaatcggagactatttctccaataaagattctacaaaagaatagctgaagtaaaaacctggcctctcggcatcggggcggatctattgcatgaactgatcaatggtggatcacttatgtgtactggtggatctcaaaagcgtatcgatggccctcatagcatgaaatattcaatccgtcaaaacgatacagaatttgcggccagcgaggacttttccaaaatcaagtggattatcgacgaacacgaggatatttatgtgccggattacaccgacgtgctgcgtgtggcgtttacttttaaattcttgcgcggccgcattgccgatctggtaagcctgctgtccggtcgtgactttaattcccgtgattaccaggaatccatcgctgaagaatcttttgcaaaactaaaggaaggtgttttggagttcgtcagtaagaccaatttccaacgctatctgatgatcgtgaagtccacggggattatctcgccttcaatgattcgttcccaaaacgtcttaaattttgggtatgcgctgtacttgctgcttcgttccaaaggagaggatgcagcgatcattgaaaaagttgtgcgccgctggcttgtgttgacgattttgacgggccgctattctggatcgccggaatccacctttgactatgacatcaagcgcttccaggccaatgatccgatggaatttttggaaaataccgaagccggtgaactgtccgatgcgttctggaacaacatcttggtgaccaagctcgatacctcggtggccagcagcccgatgttccatgtgttcctgatggcacaggtaaaaatgggagatcgtggttttctgtcagaacagatcgatgtaaaatcgcttatcgaacaacgtggcgatatccatcatattttccccaagaaatacttgcaaaagtgcggaatcaaagagcgtgggctgtacaaccagatcgctaactatgtctacacacagtctgaaatcaatgtaaaaatcaaggatcaggctcccaaagactatatggcccaggtcagaaaacagtgtgcggacgggaatcccatttatggcggtattgactctctggaaaagctggaagtaaatatggaggccaactgcattcctcaagaaatttttgatatggattataccctgtttgaagattttctggagaaacggcgtcgcctgatgacacaaaaaattcgtcgctattatgaaatgctgcgataatagatcgtaacaaacaaaacacggatgatcgcggttgagaaatcatccgtgttttcaatatcagatcatctggaaatgttttaacgcatccataatcgctgcttccttttctgacggacactgtggcactttggcatcttccttcttcgacaaattatagttttgtcccacatccagcccgcacttccgcttaacctgggagatatacaggctggacaccttcaggctgtgcttttccagcacataggctttgatctcatcatatgtggctttactctccgccgctgtcaaatccagctcgtccagattcaactccacctcgatatgctgcttggtgtttagtttggacaaaagtacaaccgtctccacgtgctccgtgcaggggaacatgtccacgggcgtggcgcgcagggcccgaaacccgtgcttggtcaggtaggcgaggtcgcgggcgagggtggtgggattgcaggagatgtacaccacgcgcttgggcgcaagcgtgcagacggcgcgcaggaagttctcgtcgctgccgctgcggggcgggtccatgaagagcacgtcgagtggctgccgcgcttcggccatgcgcagcaggaagcggcccgcgtctgcgcagtagaacttcgcgttgcggacgcggttccggcccgcgttccacgtcgcatcctttacggcggccgggttgagctccacgccgatcaggcgcgcgcaacggtccgcggcgcacagcccgatggtgccgatgccgcaataggcgtccaggaccgtctccgtcccccggaggccggcgtagtccagggcgcgcgcatagagacgctcggtctgctccgaattgacctgataaaaggattgcggcgagatgcggaacgtcttgccgcagagcacgtcctctatggttcccgggccgtagaggacgatgtcgcgcttgcccaggaccatggaggtcgcgcggtcgttgacattgaggacaacggaagtgatctccgggtgcgctgcgagcagcgcccgcacaaagtcgttcttgcgcggcagaatcggctggaccgcgaccagcaccaccaggatttggcccgtcgcccgcgccgtccggatcaggatgtgccgcatcaggcccgcgcgcgcgtcctcccggtacggccggatcttgaattcgcgcagcagccgccggaccgtcgcgatgatcgcgtccgccttctcgttttggatcaggcacttgtccacgggcacgacctgatgcgtccccatgcggtagacgcccgagatcacgttgccgctgcggtccccggcaaggaccgcatgcgtcttgttgcggtagtggaagggattctccatccccacgatgtcctccaccgggcagaacggcgagaggagctcgcgcacccacgcctgctttctccgaagctgctccgcatagggcaaatgcgccatctggcatccgccgcagcgcgaagcaaccgggcaggcaaatcgaatctctccgcccatgcacatccctccctttttccctagtttaccatgctccacctccgcaggcaagggcgccgcggcgctttctgcacccgaagacacacgcggcgggcgggaagatgtcgaattttgtcgccctcttttttcccggaaatcggggctttttgttgtacttacaggcttttattgctatactatgtgtgtataagagattttccatgcaaggagtcgttgttatgtccacccctcccagccgaaaggaaaaatcctccctcttcgtcctcgccatagcgctgcccttccccgtccttttcctgctcgccggcgcagggagcgccgcttctcctcgtgccgcatcgctgcctctgctcgtggcagcgctttttctggccgcgctcagctccctgtccctggcgctcgcgatccgcctgcgccagagccgcgagcagatccagaccgcccagcagcttctctccgcgcaatccgacttcctggcgcgcatgagccacgacatgcgcacgcccctcaacgcgatcgtcgggctcaccgcgctggcgcaggacgagccgggcaaccccgccgcgacgggcgcgtatctttcgcagatcgcctcgtccgcaaagtacctgcagagcctggccggcgatgtgctggacatctcccgcatcgagagcggcgagctggagctgcacccggctccgtatccgctctcggagtttgaagaggcggtgcgcgccctggccgttcccctgtgcgcggagaagaagcagcgcttcaccttcatgcactccaaggaatggccgacgctcttcgtggaccgcgtgcgcttcaaccagatcttcttcaacctgctctccaacgcggtcaagtacacgccggagggcgggtccgtggacttcgaggtgcgcatcgccgcgctggccaacggccgcctctccttggagggctgcgtgcgggacacgggcatcggcatcagtcaggagtatctcgcccacctattcgagccctattcccgggatgcctcggcctacgagcagggcacgcagggttcggggctcggccttgcgatcgtcaaggccatcgtggaccggatgggcggccgcatcgcggtgcgcagcgagctggggcaggggagcgcgttctccgtgcacctggagctccttgccgccatgcaggcgcccgccgcgccggctgcggcctccatcccgcccggcgcgctgaaagactgccgcgtgctgctggccgaggacaacgcgacaaacgccaggatcaccacccatctgctggagcgggagggcgtgcgcgtggagcgcgcggagaacggccgcgtcgcggtcgagcgcttccgcgagtcgcccccgggccactttgacgcggtcctgatggacatccggatgccggagatggacggcctgtccgccgcgagccgcatccgcgcgctcgaccggccggacgcccgcgccgtgcccatcctggccatgacggcggacgcctttggcgcggacgtgcagcgggccctggccgccgggatgaacgaccacctggcaaagcccatcgagcccgcgcagctctatcgcgcgctcgcctgccagctgcgccgcaccgcctgaagaagagggctctacgcttcttcgccccggaccgccagcggcgggccggggttccggccggcttattgggcccatggcccaaacgctcggcctccaggggcgttgccccctccgtttttcgccccggaccgccagcggcgggccggggttccggccggcttattgggcccgtggcccaaacgctcggcctccaggggcgttgccccctccgtttttcgccccggaccgccagcggcgggccggggttccggccggcttattgggcccgtggcccaaacgctcggcctccaggggcgttgccccctccgtttttcgccccggaccgccagcggcgggccggggttccggccggcttattgggcccgtggcccaaacgctcggcctcctggggggttgtcccctccgattttcgccccggaccgccaacggcgggccgggggccgcccggcgtatggggcctgtggcccaaacgctcggcctcctggggcgttgccccctccggaggcgcacgcgccgccgctgggatgggttaaagccccagcgaaacgaggggtttccgacaatctaaagcgggcgcagatccctcaggacctgcgcccgcttctcgtctagatggtcagcgctgcacgcggccggaggcgtttccgcccatgagggagcgaacctccgcgacgctgacacggttgacgtcgccctcgatggtctgcttgagcgcagaggccgccgcggcgtactccacggcctcctggcggctgtagccgctcaggagcgcgtagatcaggccggagccgaaggagtcgccgccgcccaggcggtccaccaggcggatggcgtacttcttggagacgtacatctccccgtccgccccgtcgtagagcatgccggaccagttgttgtccgaggcggagatgctctcgcgcagggtgatggccacgagcttgcagccgaagcgctccacgagctggctcgccacggagcgatagccctcgacgttgagcttgccggccgagatgtccgtttccgcggcatggatgccgaacacgtccgccgcgtcctcctcgttggcgatcaggacgtcgaccatgggcacgatctcgcccatgacgcggccggcctcctcgcggctccagaggttcttgcggtagttgaggtcgcaggacacggtgacgccgtgggccttggcggccttgaccgcggcgagcgtctcccgggccgcgccctcggagagcgccggggtgatgccggtgaagtggaaccaatccgcgccggcgaacaccgcgtcccaatccaggtcccccggggcgatctccgcgatggcggaacccttgcggtcatagacgaccttggacgggcgcatggagacgcccttttcgtagaagtagatgcccacgcggctgcccttgcgcgcgatcccgctcgtgtccacgccaaaggagcgcagctcgttgacggcggcgtcgccgatgggatttgcgggcaggagcgtgacaaaggcggaatccaggccgtagttggccagggagacggccgcgttggactccgcgccgccgtagaccacgtcaaagctgcgggcctgggcaaagcgctggaaccccggcggggagaggcggagcatgatctcgccgaatgtgatgactcgcttcattgtgtacctcatcctcttcgttctcgggtggagagcggtcttaccactgcgcgacggagccgtcctcgtagaagaggcgcggggtgtcccagtcgccgctgtaggaattctcgcgcacaaagtcctcgttcacctcgatgcccaggcccggggcggtgggcacgtcgatgtaggagttcacgatctcaaagggcttcttgaggtagccgacgccgcggtcccagccctcggccatgccggggtgctcctggatgaggaagttgggcgtgcaggcgtccacctggaggcaggccgccagggagatcgggcccagggggttgtgcggcgcgacggaggcgtagtacatctcggccatggaggcgatcttgcgcacctcgaagatgccgccgcagtggcaggtatcgggctggaggacgaccgccgcgtgctcctcgagcacgttgcggaaggcccacttggtgaagaggcgctcgccggtggcgatgggcacgctggtcttggccgcgatgctggccatgacctcgacgttctcgggcaggaccggctcctcgacgaacatggggtaatagggggcgatggcgtcgatcaggcggctggccatgcccgcgtggatgcggccatggaagtcgatggcgatgtccacgcccttgcccacggcctcgcggatggcgcagaacttctccgccagcgcgtcgacgtaggagaggtggtcgatgtgcttgaccggcgcgtcggggctgatcttgacggcgtcaaagccctgctcgacgcgcttcttggcgttggccgcggcctgctcgggggtgtcgccgccggtgtggctgtacatgcggatcttgtcgcgcacgcggccgccgatcaactcgtacacgggcgcgccgagcttcttgcccttgatgtcccagagggcctgctcaatgccgctgatgcaggaggtcaggatcgggccgccccggtagaacgtcgtgcagtacatggtctgccacaggtgctcgatgcgcatggggtccgcgccgatgagcacggggcgaagctcgttgatggccatctcgaccgtgcgggcgcggccctcgacgaccggctcgccccagccgcagatcccctcgtccgtggagatcttcaggaacatccaccggggctttacgtggaaggtttcaagctttgtgattttcatggttgatcttcccctttctgtgaatcgtctttatcgggagaaacaatcacttgagaaacgtgttttccgcgaggaccggcaggagcgaaccgccgtcgatgttgagggtcgtgccggtgatgtagcccgcgctctcggacgccaggaacaccaccgcgtcgccgatttcccagggctcggcaaagcggccgccggggatgcggtccgtcagggccttgaagcgcgcgttcgcctcgggcgtgtccgggcgcttgcgctcgggcagctgcgtatagccgggcgcgatggtgaccacgcggatgccgtgcggcgccagttccatggccatgttcttgccgagcttgtccaggccggccttggccgcggcatagaccgtggcgttgggccagcagcccagggcatggttggaggagatgttgatgatgacgccgcgcacgcccttttccaccatgttgcgggccgcggcctgcgcgcagaaatacgtgccgcaaaggtccgtgccgaccaccgtgtcaaagagctcgggcgtggcctccaggaagggctggaagcgcgtgatgcccgcgttgttgaccatgaggtccacgtggtcatagaccgcgaagaacgcctggaacatctcctggatctcgtcgtagtttcggatgtccgcgtggaagacctcggccctggcgccgagcgcgcgcgccttctcggcggcgtccagcgcgccgtcggcggtggtggagtagtggatgcccaggtcatacccggccttggccagctgcagggcgatgcccttgccgatgccgcggcccgcacccgtcaccagtgcgattttccggctcatgtcgtttacccccgtttcgttttctctgtgtttggcgtatggattcagcgcttcgccgcctggacgaacgcggccgcgcgctcggcgatggctgcgtagtcgtccgcgtcgacgagcgacttgctgacaaggttggaagcgatgccggcgcacgccgcgcccgcgcggaagaagtccgcgatgttctccaggctcacgccgcccacgaccatgatggtggcctgcttgagcgggcccatgacgtccttgacgtagcccgggcccagcgccccggcgggaaagaccttgacgatgtccgcgcccgcctccagcgcggtcaggatctccgtgggcgtcatgaccccggggaccgcggcccggccgtagcggttgcacatcttgatgacctcggtgttgagcgtcggcgcgagcacgaaatccgcgccggcgaggatcgcggtgcggcaggtctcggtgtccagcaccgtccccgcgcccacgagcatcttgtccgcgtactccttcttgagcaggcggatcatgtccgccgcgcccggcgtgtcgaacgtgacctcgatggtcctgacgccgccttcacagagcgcgtcggccgtgcgccggagcttttccggcgcgatgccccgcacgatggcagtgatgcgtgcttccaggagcgtgtttacgatttccgtcctcattgtgtcaccctttccttttttgtgtgtatcggagttttcgccgtcatgcggcgtttgtccgcttgtattcatcccgcttgagcgattcgctccaggccgtggccatcagcagggcgctcgcgccgggcagcagcagcaccagccccacgcccgtcaccgcgcagatcatcagcgccagcagcagcacgcaccagtagaggaagacgtacccgaggtttttcagcgcgatccccgtcgcgcagagggccacctgcgtcagcggcagcgaggggttcagcacgaggatcgggtagcggtagagcgccgtggagaggtagaacagcgccaggtacaggaacaccgtgctcagcagcgtcaacgcaaagtcccgcccggccacgagccaggccaccgcgctcacgcaggcgaccaggcagcacaggtccacaatccccatggcgatggccttgcccatgcaggggcgcacgctctgcaccgccccgcgccaggtgacgccgatgccgcgctccttgtcgtgcatgtactgcacgcccgcgcagagcgcaaggcctgccgtcacaaccggcagggagagcaggagcatcaggagcgaggcgcccatgaccgtgtgcggctcgcgccagatctgccggccgaaccttcgcagcgcgtacatgtagaagatcatgctctcaccccttcaggccggacatgctgatgccctggacgatgtacttctgcgcaaatacgtagcagatcaagaccggaagcgtggcgcagccgagcagcaccatgatctggttccaggtggcggagctggagccctggatggcaaagatgcgcaccatgatggtccagttcttggaatcgggcaaaaggatcagcgggtagatgaattgattatagcacgccatgaacgtattgagaataaccaccgcgtaaaccggcttggaaaggggcaagatgatggaaagcaaaattcttgagttgctcgcgccatctatgcgtgcggattccaacaaatcctgcggcaggccgtcaaaaaagctcttgaggatgaagattgcccaggcccaggcggaaaaagagagaatcagcgaccaaaggttgtcgatcagccggatgccaaaaaaatttgtgaacatgatgtaggtcggccaggccagcgcctgggaattgatcatcatggttcccaggaaaaaggtcatgacccacttgctgcccttgggccgcagcttggagagcgcaaaggccgccagcgtggagatggtcacctgcagcaggatgacccccgcgcagagcaggaaggagttgagcaggttctgctccaggtgatacttgctgaaggtctccgggatgttctcccagtgccactcgctggggaagaaggtcggcgggatggcgcggacctccttgttcgccttgaacatggacaggagaatccagacataggggaagatctgcaccgggatcccgatgcccaggatggcccagatcagcccgtaggtcagctttcccttcttggacttgagttcaactctctgcagagcgggcataagatcactcctcctttgccttgagctgggacgcgcgcaggcgcaggcgccgcaccttctttttgtccttgcgggagaggatgttgtcgccgccgatggacatctgaatcgccgtcaggatgaacacgcacaggaaggtcaggcagctcagcgtgatggcgtatccgtagttcaggaacgtataggcctggtcgtaggcgtagagcaccatggtctccgtcgcgcccgaggggccgccgccggtcatgatctggacgttgtcgaacatgttgaacacgtcgatgaccgagagcacgagcatcgtcagcacgatgggcttgatctgcggaagcgagatgcagaagatgcggcgcaggaatcccgccccgtccagcagcgcggactcgtgctgctcctcgggcacgtcctgcagcgccgccaggtagatgaccatcgtcaatccgccgccgatgatcagccccgggaactgcatgcaccacttgaccaggacggggtcgttgagccacctctgcgtcggcaggcccagcaccttcatcaggtagttggccaggccgtagtcgggctgccagatgtacttccacaggacgctcatggcgatgccgggcgccacggccgggatgaagtacatcgtgcgcacgaaggtcttgccgcggcgcacctcgttgatgagcgtggccagcaggatcggcacccagaagttgatgagcagggaaatcaccaggaactggaaggtgttgacgatggcgttgagaaaatccttgtcctggaaggcgcggatgtagttgtcaaagccgatgaaggttcccggcaggtccacgatgttgacctcgaagagcgagacgaagaaccccaacaggatcggatagtacttaaagagcgcaaagctcacgatcgcgggaatcaagaagaaccacggcaacacatcgcgcttgaagatgtctctgctgaaccgatggcggatcacgtcgatttccccctttccttgccctttgtttctccaaattcgggacagggggcgggcagttgcctgcccgccccccttccatttttttgcaaacggtctctttaacgtccccttcccttatgcgggctttttgtaagcctccgggaagtcggtgtagaggcgctctgcgcactcgtccagcagggcctgcgcctcctcgcgggtgatgtccggatcgccgatgatctgctggaagggctgcacgatgtagtccttgagcgagttccactcgttgcagaagggctccggccgcgcgatggcgttcagcgccgcgaactcctccttccagtgctcgggccagttggtcgcataggagtacttgacctcaaccaggtcctgacgggtggagggcttgggatccagcaggcccagctcgttctccagctgccagagctcgcgcaggaactcctcgtcataggagatcaggttcaggatctcccaggaggcgtccatctgctccttggtggcctggggatgcatggtccaggtctcgccgccggcaaagcccacggcctgaccggcttccttgccggggatcgggatgacgccgaagttctcctgcacctcgtcgtaggccgccagcttctccttgtccagggaggtgggcaggccccagccgtagcaggcgtagccgaccgtcatgttggacatgtagtcgtcatagctctccagaaggtccgtctgcgtcacgccgtacttgtgcaccaggtcgtgcatgtacatgatggcgtccacgccggcttcctggttaaagccgatggcataggttccgtcgccgttggggatgaccatctcgccgcccgcggaccagacccacggcgtcagcggccacgcgcagaagtccgaacccagcagcgtgtagccgaagcgcggcacgtccttatccgtcagggactgcgcaacctgtgcaaactcgtcccaggtctcgggcacggtctcggtgctgccgccgccggcctcgatggcggtcttgttgtagagcatgcccatgatgtagggcgcgtagggaaccgcgtaccagcggccttcctcatcgtggagcgcctcctcgatggaggggttgaccttgccctcgttgcgcaggtcccagttgaccacgtagtccgtgatctcggcgatggtgccgttgcgcatgcgggtctggatgtcgacgaacggcagggagttccacagcgtgggaccgtcgccggacatcaggagcttgtcgtactgctggcggtagtcggtgccgggcgccatgcgcgtccactcgatctcatagttggggaaggtggtctccaccttttcgcggatgaactcaaagcgctgctttacaatgtccgaatcgtcgtcctgcggcagcatgtagagcttgagctgcaccgtcgcgccctcggccgcgggttcttccgcgccgggctccgccgcgggctcttcggccggggcggccgggtccgcagactcgccggagtcggcaggggtggtgctcgtacagcccgcgagcgcggcgatgagcatcgccagggccaggaacaacgcagccaacttggtcttcttcatacgcacatctccttttctctccgcttgttttctgccgcgggcgcgccttgcgttcctccccactcgcctcgcgccggcagctcttctatattccatgataatatggataaaaaaagagagcaatgcgcaaaactatgattttattcaggaaattgatgcgaataaatcacaggtttcctttccgtttttctcgtattttttgaattttccggcaaaaaaatgccgccggtgtgcttcggcggttttgcattttttctcgggcgcgagggcgtttcttcccctgtgccgttatgtacacgttttgcagttgggaatttatgtaaatttttcaatcgcaaatcccttgaaattgtaaattatttgtgataaaattgtatataacggatgaagatcaaaacgtgtacatttcggcacaaaacgcagaggtatgcctccaaaaccatatacaaaattgattttcgcggggactgttttgcacccctgtggcatatacatggttaaggggacacacaacggaggtgaatccatcgtgaagctgctcattcaacaccgcctggccgatgcggccggcgcatggggagactatctgcgccttagcggcatcgcctttcttcagctgcgggaggaggcctatgcgcacaccctcccggcgcagcccgagtaccggctgctctaccttcgggaggggacgctgtacctggtgcgcaaccgcgtggaggccatgtacgccggggagagcctcctgctcctgccgccggaggaggagtatcacctccactttgtgcaggagggccagagcgcggcctactggatctccttcgggggatacgggtgcgcgcgcctgctcgacggcgcggggctttcgggccagctctgcctgcagatgcgggagggcgcggacctttcgcacctgttcgagggcattttgcggcaatccctgcccgcccagccggacgccatgcaccgctcgctcaacagcctggggctgttcatgcagctgctcgcggcggcggtgccgcatcttgcctccgccgcctggaccgacgcctgtgcgccgcccgccgagcggccggagcgcggggcggcggcgctcgcctacgcggtgcacgcgatccagagcgacctgacgcagtcgctggacgtggaggagatggcgcgcagtttgcagatgagcgcctcgcacttcatccgcacgttcaaggcgcaggtggggtattcgcccctggcctaccagacgcggctgcgcatcgagcgggccaaggacctgctgcgcaacaccagcctgcgcgtgagcgagatcgccgcgcagatcggctaccagaaccccatgtacttttcctccacattcaagaagcacacaggcatgacgcccttggaatatcgggacaagtccctcgcctcctgaagaaaaaaaccggccccgcggacgctgtccgcggggcctttgccgccaagggggttagatctttccgatccagtccgggtgcgagccgtcccggaggaagacggggatgcgctccaggggcgcgtcgcaggcgagggtctggccgcccgcgtaggtcttgccggtgtgcaggtcggtccactgcgcgcccttgggcaggtagaccgcgcgctgcacggcgccggcgtccaggaccggcgccacgagcacgtccgggccgaacatgtactggtcgcgcaggtcccaagtggcctcgtcctcggggaaggcaaagaacatggtgcgcatgacgggcgcgccgtcctcgtgcgcctcctgcatgagggcgcgcacgtaggggcgcatggtctcgcggaagtcgatgaggttcttgaggatctcgtaggccttgtccccaaaggaccagatctcgttgtccgcgccgctgggcaggagctcctcgccggtcttgcggaacacgcgctcgtcgggcacgcggttgccgtgcaggcgcatgaccgggcagaacgcgccccactggaaccagcggacgatcagctcgcggaagttctcgtccttcgggtcgccgccggcaaagccgccgatgtccgtggtccaccaggggatgcccgcgatgcccatgttcaggcccgcgcagacctgcttgcgcagggtggcaaagtcggagtggatgtcgccggaccagacgagcgcgccgtagcgggcgctgccggcccaggcgcagcgcaggaggttgacgaccttctcctggccctcgcccttcatgccctcgtagaaggtgcgggcgtaggcctggggatagaggttgccggtctgggccacggtcccggaatagtagcggtagttgtcaaagtcataggtgccgtattccggctcggcctcgtccagccagaagacgcgcacgccgttgtcgtggtagttcttcttgatcttctgccagagccaggcgcgggcgtccgggtttgtggcgtcgaagaacagggtgtcctcgtccacaaagcgcatctggcagttcatgcccttgtcgcagcgggcgaggaagccctcctcgtccatctcccggaagttctcgctcttgagcgagacctgcggccagacggagaccatcagctccatgcccatggacttgagctcctcgaccatggccttgggatcgggccagaactcctcgtcaaagcggaagtcgcccatgtgcggccagtggaagaagtccacgacgatcacgtccacggggatgccgcggcggtggtactcgcgcgcgacgttcaggagctgctcctggttccaatagcgcagcttgcactgccagaagcccaggccgtactcgggcatctcgggcgcgtggccgacggcgtcggcgtactggcgctcgatgtcgcgaggggtgtcgccggcgcagatccagtaatccatctgcttggtgctctcagcggaccactccatgaggttgcggccaaagctcgcccggccgatggcgggattgtgccagaggaagccgtagcccttgttggagagcacaaagggcacgctcgcctgggaattgcgctgggccagctcaaacgtggagtacttgacgtcgagcacgtcctgctggtactggcccatgccgtagagcttttccccgtcgtcggcggcaaagcccacggtgagcttgaagtccccggccacgatgggcttgaagaac

SEQ ID NO: 843 - DNA, 7584 bp, Unknown
  16S sequences of unknown bacteria
agcttgtcaaaaattcttttttgacaagctgtgcgggctgccgcatgggcagcccgcgcgtgggttaaaccattctccgtggattaggcttccaggcccatcgcctgcatggtcttgttgaagatgtcggtgttgtcgtacaggccggagaaattgtccgcgcccacgcccatggcatacacgggaatctgcaagccggtgtgcgcgtaggaggtgaaggacaggcccgccttgttgttgatgatgtggctcacggccatggacaggggctcatagccgccgtagagcagctcttcctgctcgccgatcacgcgctcctcgctgggcagcatgctcagctcgaaggccgccgtcaggctggcgatttcggtttcggtgagggtgagatcctggccttcttcggtggtgaggccgtagtacttttcgatttccgccagcgcatcctcgaaggtggcgccgttctcgcgcatttcgccgatcaccgcgtcgaactgggtgaaggagatcgtctggttctgcaggtagttgaagtgcgtgtcgtaagcggtggtggcgaagccgatggtcatgccgccggtctcatggtccgcggtgacgatgatcagggtctcttccggatgctcggcggcgaagtcgatggccacctgcacggcgtcggacagggcgatggtgtccatgatgctggtcatggcgtcgttggcgtggcagctccagtcgatcttgccgccttcggtcatgaggaagaagccttcttcgtcgttatccagcacgctgatgcctgcctgcaccatctcggccagggagaggctgtccgcgccttcggcttccatgcggacgcggtcgatttcatactgcatggaggaggaatcggcgatgtccggggtgatggccagcacgcggccgctctcgctgttcagcgcgcggatgtcttccagcgtgttcaccacggtgaagccgttttcttcggccacgtcaaagaggttggcctgggtgccgtctccgtcgggggtgaggtagctgccgccgcccaggaagtccaaggtggtgccagacacgccctgcagcgcgatgtcgtagtattcgccgcggctttcagacttggcgtagtaagcggccggggtcgcgtggtccagcgacacgctggagatgacgcccaccttcttgccggcttccttggcgtattcggtgatgatcttgaaggattctgtgagatcgatgttgtaattgatcacgccggagagcgtcttctggccggaagccatggaggtcgccgtggaggcggagtccgggcagaaggaggaagcatcgtaagtggtcatcaggccgacgttctcaaaatcggtgaaggaaagctgtgcgggcaccgggatggtggaatccggattttccagcgcgccgaggtagtactgcgtggcggtcacctgggggttccccatgccgtcgccgatgaacatgaacacgtacttgggggtggcgggggccgcgtcttcggccatcgcggtcgcggcgcaagtgagcatcgcaagcgccagaatcagggcaaacaacttcttcatcttgtgcacctctttctttttggttcggaaaaatcatagcatagcctagtaaaaggcaaatctgaaacatttctgtgcaatgtaaaacatataccggttaattagcactaatttaagcgcctgtttgcgcattcgacggttaccatataaataggtaaaaagagtggcctgcggtagaaatcttatgatttttgggctgcaaattggaagccagtatgcaggataaatgtttatcagcggtttgtaagcggaaagttttgggctattttgggataagattgcgcatacaaagataagtgtggccgcgggcatttaccccgcggccacactgggagaatatggatttgtgacttgttaaattttgcgatgttattgtgccggcgtcacaatgggctggggcgtgtgcccggtggtaatctggggcaactgcgcgggcgcggcccagttcgccgcgttgatcaaaatctgctgcacttctttttgataatagatggggaacgattcgtggccgggccggaaatagaacagcttgcccagcccgcgcttgtagcacaagccgctgcggaacacattcccgccgccaaaccaggaaatcagcaccagttcgtccggatcgggaatgttgaagaattcgccgtacatttcttcatgttcgatcacgatcttctccggcaggccgcgcaggatcggatgcgagggcgaaaccgcccagaggatttctttttcgccgatttcgcgccacttcagctcgccgctgttcgtgcccatcagcttttgcatgatcttcgaggcgtggcccgaatgcagcacgaccatgcccatgccgtccatcacgcggcggtacacgcgctcgacgatttcatccttcacttcgccgtgcgccatgtgcccccaccagaagagtacgtcggtattgtccagcacttcttgggtcaggccatgttccggctcgtccagcgtggcggtcttcacagcaaagcccgcatcgcgcaaaaacgccgcaatgcagttgtgaatgccttcagggtatactttggcaaccgcttcttcggtcttttcgtggcggtattcgttccaaacggtaacgcgaatgggatccatggggaagcctcctttacaggaatttctattataatcatacggaaatcggcgcgtttgtcaatatggaaaaacggtcttttttgccgtacggccgtgaaaagtgatacgcgggaagtacatacagaaagattgaaaaaaattgtgccgaaaactggaacaaaattgcaatgctttcgtccaatgagtagacaacgcacgggatacaacaggagggatgcgccttgaatcgtttgcgaattgctttgattgtgttgcttgccatggggctggccgttcccgcatgcgcggcggaggaagggagcgtccgcctgggcgcgcaggccggctatggcggcacggttttgtacacgcgcgatatgcctatcaccgtttccctggagaaccagggcgcggattttagtggcacggtttcggtggatgtttacgctagcgagatggatttcgatcgctatgagatacccatacaattggcggcgggtgcggccaagcgcatggtgctgccggtgacgcctggttaccggcaggaggaattccgcgtggaattgcgggacgcagcgggcaatgccgtggcgtccactgtggcgcgaactgtccggggcgtagggcaaaatgcgctgctggtgggcacgctttctagccgccagcagcagctggcttattggggcgaggaaagtgaggatgcctggaatgtgcagggggattttttgccctgggtttccgtagcgctggacgcgcagaatttccccgccgaagcgcgattgctggacgcgttccagatcctggtgctggatgggttcgacgcgcgcacgctgacggacgcgcaacagcaaacgctgcgcggctggctgctggatggcggcatctgcgtggtgagcggcggcgcgcaggctgcgctggggtatcctttctttgaggaatacacgggcgtcgcgcccggcgcgctttcggaaaaaacaggcgtcctggaagcgcttctggcctttgcccaggcgggggaaaacgaagaggatgcgtccgagcctgccagcgcctggccttcggtggtttccagcgtttccgaacagcaaaaggccattgccggccagcaacaactgcccgccgggtggggaaaagtgccggaaggagaaaccgcgccggaggatgtcgcgcaggcagacgcgctgatggtgaatgaactgcccggcgcgcaggcggaggggaacctgctcttctgccccgcggaggacgggctggtggtgctcacctcctatgaactgggcgcgcgggccgtggccaacgcagcggaaatgccgggtttgtggcgcaaactgctgcgggcgggcgcggaggaagcgtataccgccgccgaaacgagcgcgcagggcgtgtgggagagcaaccaatatggctggaatgacgcgctttccagcctgccggtggaaaacgcgcacaggggatggccgctggccgcgttgctggccctgtatctgctgttggcgggcattgtgctgtacctcgtgctcaaaaggatggataagcgcgagtggatgtggctgggcgtgccggttttggcggtgctggccgcgctgggcgtgctgaagaccggcgagcacctgggctttgaccggcccatggccgccacggggctggaaattgtctaccaggcggacggggaagcggacgcgaacctgtataccgtgctttccagcccggagacgggggaattcacggtcgccagcgaaccgggcgtgcgcctgctaccctatggcgatgattccgcttactattactatagcgaagggaacgaagaaatcgcgcccacgaggctgcgctaccgctatatcttatcggaaacgcccgccgtggcgtatcccggcggcagctcgtggtcggcccgccatttgcgcatggaggacgagcgcgccggttggggccagctcgaaggcagtgcctggatggaggaagacggcctgcacatggaaatcgccaaccgcacgccgggcgaactgcgcgatgtgatcgtctattcggatctgggctttgcccatgtgccgtccatcgcccagggagaaacggccaacctgctgttgcgccgcgcggacgggcaggaagaggaacagatcgccgattggctgcgcgggctggaggaaagctccgtgtacgacggttcgctggcggaggatctggccgcatatgaaggcgtgctgttacccatgccggtgcaggcgggcggcttccagagcgatgccatcctcagcgccgcgctgggaggtgcgctgcaggctagcccgcagccccgcgatcccggccaggttgaccttagcgctgcgttgggaggtgcgctgcaggggcaggaaccgcaaaacaggcaatgggaactggcctgtacgcgcgcttatgagaccgtgggacgatccttcgatgtgtatggggcgcctttcgccgtgcgcgtgctgtgccgcgtggaaggggtggactggccgcagctttcgctgaacgggcaggagattgcgcgcacatcgcggctgtgcgtggccaccgcggagctggcttacgcgcccattggcccggatggctacgcctattatcccgtgggcgaagtgaatgcccgcctgctcgatatggaggaggcgttcgatccggaaaatccccttttcgcccccgaaagccaggacgcggtgggctattatgaactgccctatgaaccggcgttcctcttcgatttgggcgcgcgggtggagccgcagcggctgtacgtggccgcgcaggggtattatgatgtgctgcccatcgccagtttgtacaattttgccagcggcgaatgggatgtgttcgaactgccggatatcgacctggcgggcgcggcggccgcgccctatgtgagcgagcagggctatatctgcgtgcgctacgcgcaggcggaagagacggaggactggatgtcgtcgggtacgggcagcgtgaacaagcccgcgctcgtgtttgaagggagggtggcggaatgatcgttttggaagaactcacccgcgtatacgggaaattcaccgcgctggataagctgagcatgaccatcgcggagggggaactacacggctttgtcggccccaatggcgcgggtaagaccacgaccatgcgcattctggccacgctcctgcccgccagcggcggccgcgccaccatcgatggcgtggacgtggccaaaaatccgcgccgcgtgcgcacgctggtgggctatatgccggatttcttcggcgtgtacgattcgctcaaggcgtgggaatacctggatttttatggccggctctacggcctttccgccgcgcggcggcgcgaacgcgtcgatcagctcctggagctcgtgcggctttcggataagcgcgacagctatgtggattcgctctcgcgcgggatgaagcagcggctttgcctggcgcacagtctgatccacgatcccaggctgctcattctggatgaaccggcttcgggcatggatccccgcgcccgcgccgaaatgaaggatatcctgcgcgccctgcgcgatatgaaaaagaccgtgctcatctcctcgcacattctgcccgagctatcggaaatgtgcgattcgctcaccatcatcgaccacggcaagctggtgttcaccggctcggtggaagcgctcgaccgcaagatgaatggcgacgcgcccatcgatatccgcttcgcgccgggcgcaggcgaggaaagcgtggatgccgccgtggccctgctcaagcaatatccgggcgtgagcggcatcacccaggaggacgcgcgcacgctgcgcgtggaaacttccgcccaactggcgggcacggacgcgctcctgcgcgcgctcatcgaggccggcgcgccggtggaggatttccaccgcgcgcccatgaacctggaaaaggtgtttatggaggtgacccgggaatgctgatcaatcccatccttgcatccagcgcgcggcggcgcatgcgttcgtggaaaacgccgctgattttgctgctctttggcgcggcgctattgggaattgcctttgtgacggcgctcatgccgctgatgggcgaaagcatgaccatttcctcggcgcgcaatgggctggatagctatatcgttctcgtgtgcgcggaattcgcgctgatcgtgctcgtggccccggccatgaccgcgggcagcatcgcgggcgagcgcgagcggcaaacgctggaaatgctgctggtgaccaacaccggctctttccgcatcgccctgggcaagctgctggagagcctgggctatctggcgtttttgatcgtggccatgctgccgttcaattgcagcatcctggcgtatggcagcgtggggcttccgtatctgttccagtcggcgctgtttttgctgctcacggcctatgccgcctccagcgtggggctgttctgctcggccctgtttcgcaaaacggtttcggccaccattgccgcctatatcatcgtgctggccattgggctgatgacctttctgggcgtgacgctgtcgggcgcttccacctattacgattttgatctggccgcgctcagccgcgaagagctgatcgcgctattgcccaagtctttgttcttctgcccgccgctgggcctgctggcgctgctggccaatcagtccggcgcgctgcaaagcgtgttgcagcaactggtgggctatggaaacagccaggcgctcgcgctggcggggtatgacctcctggcgaacgcggtgatggcctttatggcctgcgccgcgaccgtgcttacgctgctctccaccgccttcgtgcggccgcgcctccacgcgcgccggaggcgcaaatgaaaggggaaatcgcgcgcgccctcgcgccggtcgcgcggcgcgtgcggctccgtcgcctggcggggggattttcccggggcgcgctggcgggcgcggcctgcgccgtgctcgtcgcgct

SEQ ID NO: 844 - DNA, 2387 bp, Unknown
  16S sequences of unknown bacteria
ccgcaaacgcggtcgggcggggtttagatttgagaaaaaatggattcaaggaaagccgaacaaatcgttcggcgtaatgtccaatcgtttacacaggtaaatgattttttcatagtcgagttgaacttttcccgtttcgtattcgctgtaatcggattgaaatttatttaattctttggctaactgcgtttgcgtgagttcttttgtttctctggcaatttttaaattttcgcctactaattgggtgatattcatgttttttaagccttttcagttgcttttatgatagtaattatactataaatcaaccaaaaaaggtatcaactagctaaattagcgagcgcgaaaactattttataggattttttcctataacacctgatttattaaaatctttttgttataatgaaatcacaaaaccaaaaagttctgtgcggtttcataaaaaacgcatggcgcttaaaaaaacggaggatcattatgaagcacaaaggaaagaagaaagaagctcaatactcggaattttataaggaaacgacgtactttttactcctatgcagtaaggaggacgccgattttttcgctgttcccgataaagaaagaaaaacggacgattacgttcgtttgatggtgatagcgatggctctcgatttcaagggaccgatgatgagagtcctcagcgaagccgaggacagaaaacgggacaaagaagtgctggaccgtttagaacaattgaagggcgacactgccaccatagccgcctggatagacgattttatcggcaaaataacagacgacgacctcaaagaaattgttttacagcattggaatgaaagaagggaagattttgaaaagaacggaaatttgcccttataaacagcttgggacgaaaggcttttttcgcttgcttttgaaaggaggcgcaaggcggagggaaaataaaatccatgcggggcgccgcatacgacaaaattccccttaaaacgcgaaaatcttataaaaaaatcgccccgccgtatggtatgattttccttgcagaaaaaataaatcgggaaaaaacggcagggagagaaatacatatggcaaggaaaatcgtcgtaacgtcgggaaaagggggcgtggggaaaaccaccgttgccgccaatctcggcgcgcagctttcaaggcgcggggagcgggtgatcctctgcgacaccgatttcggactcaacaacatggacgtggtgacgggggtggaaaacctcgtcgtctacgacatcgtggacgtcatcgagggcagatgccgcgcgaaacaggcgctgatccgccaccccgatttcggcaatctctatatcctcgccagcaatcattcggcgcccgaacgctatatctcgccgcaggcggtgaagctggttctggacacgctctctccacagttcgattttatcctcatagactgccccgcggggatagacgagggatttcatcgcgccgtcgccacggcggacgaggcaatcgtcgtcaccacgccgcacatttccgccctgcgcgacgcggacaaagtcatcaccgtcttaaaaagctatgagccgaaagccgtttctgtcgtcgtcaacatggtgcgcggggatatgctcatttcgggcgagatcctttccccgcaggaaatagaggaaatactgaaaacgcccattctcggcattctgcctgaggaagacgacgtttttctgcataatctctccgataaaacgcgggcgtttcgcctcctggcaaacaacctgctcgccgataaaaaacgccttttcgacgtcaccagaaaatactcgggcgtatttggcaatttaagacgaattttaaggaaaggattataaaaaacggtcatgaaaaaaatcagagataatttcgtgcgcacgaacagcgtaatacagtcggacaagtcggtgatgagcgacgggtgcaaagccctcgttttacaggacttcgcgggaatttttgaggaatatttcgagcttaacggtctgcccgaaatgaatatcgtctgcgaaaagggcgtctacaaagtgagcgtcactttcgaggcggacagagtaaaaaaattcaacgtgctcaaataagcgccgcccgccgcgagaatcgttgcgcgattccgcaaacccgtccgttccgtccttctttcagaaaaacggaacgccgctttaaacgtccgtccgagtctttgtcttaatcggctaaggctcggatttttttgtacggaaaatcaaagggagaaaggacagggaacgggaacgaacgcctttgataaaaataaaacttgccaaatgttagatactcttggggaatttcaagaatattaaatcaaaacagcgtaaacagcgagttcgtaaaatggcgaccgagaatttctcggt

SEQ ID NO: 845 - DNA, 7024 bp, Unknown
  16S sequences of unknown bacteria
tgttgagcggacgtattatgcagaccgttaaaaacgcgattgtgcctcccgtaacagtcgagaccgagagaagaatcggaagataatataaaaaaccgatttgtcggtagattataattgcggcggaaatttggcctgtttggtgaagagcggcaccaagggtcgaaagtccgtagacgctgaatttttctgataaaaaagccaaagaaaccgcagcggcggaaagtgtccacccgcaaagcgaaaagacaaatcctatgccgaatccgccgaaaagcagggcgcttaaaacgacccttaaaaagccgacggtaaaatagcttttcaaatcataataataaagcacaaaaaggttaataaaattggcaaggccgagctttatgccgggaacgggtatcggaagggatacaaaagactcgagaattccaaccgttaccgaaaggcaaagcagcatggcaagaccgacaatctttttcgttttgttgattttcacgggcttatcctccctataattgcgtcgggagcgtcaatatccacgtcttcggatttgagcacggcaacaacggaattcggggcgcaaaccacgggaacgtcggccttgtcgataaagccctgctttacacagtcgtgattgggacaggaggaattcgttatggctatgcccttttgcctgtcaattgttacggtaacctcaccgtttatattcaatttatcctttgatataatgatttcacgggtgttttcgacggatgacagcgggatttcccccccgtcgatcaagctgccgcccgcataaacatatgcgacaagcccggttttttcggcgtgagaataggggcggtaaattgcgtatatcccgacggaaagggcaacggttaaaacaacggccgccaaatcccacagattaaatttcagtgaaaaattttcttttatttttgccgtctcccctctttgccttttacacacgctattttacctcttaaaaggcaagtctgtcaatatttttattatatttatacttgacaagaaagataatatatggtaatatttcagcaaggttagctttggctaactatatttaatacgatagagttagcggttgctaacaggaaggtcggaaggaaatgtatcttgaaattgaaaatctgttcaaatccttcggtcagggagacacaaaaaccgaggtaatccgaggaatttctttcggagttgaaaaaggcaatatatgtgttttgctcgggccgtcgggttcgggaaaatcaaccctgctcaacataatcggaggaattgaaacggcagacagcggttcggttaaaattgccgatgataaaatcgaaaacatgaaggaaagtcagctgacgatgtatcgcagaaaacatcttggatatgttttccaaagttacaacctcattcccaatctgactgtcagggaaaatattgaagtgggagcgtatctttccgacagcccccttgacgtggatgatattctgaaaactctcggactttatgagcacaaagacaagattcccaaccagctttcgggaggacagcagcagcgcaccgcaattggtcgggcaatcatcaaaaatcccgatattttgctttgcgatgagcctaccggcgccctcgattacaacacctccaaagaaattctgaccctcattgaggacgttaataagaagtacggaaacaccgtcatcatggtcacccacaacgacgccattaaaaatatggccgaccgcgttataaaactgagggacggcaaaatccgtcacaacgatgtgaacgaaaacaaaattaaggcttgcaatcttgagtggtgataatgaaaaatgaaaaatcctcttatgaaaagaattccgagggaacttaaatccgacctcggaaagtatatagcgctgtttcttttccttacccttacaatcggatttgtttccggttttcttgtggccggaggaagtatgagctatgcatacgaccaaagctttgaaaaatataacatcgaagacggacattttacccttgcctccgagattcccgacgagcttttaaaagaagttgaagaacaggacgtttcggtctatcccctgttttacaaggatttcgacctttcaaacgagcatacggtcagagtctataaaataagggacgatgtggacaagatatgtctcatggacggagagtttccttcaaaaagcggcgagatcatgatcgaccgtctttatgcctccaacaactcgattgaaatcggcgacaaaatcgaggtagacggaaaatcctatgaaatttgcggtttcgcggctttttccgattacagcgccctttttaaaaatcataccgacatgatgttcgacgccaataaatttaccgtggcggccgtttgcgacgatgattttgacaggctgtcggacgataagctgaagtataattacgcatgggtaaaccgtgacagaaccctttcggatgacgaaaagtccgacaaggccgatgaagtcaaggctgttttgggaaaatcgggactgaccaccgactttattgccgcaataaacaaccaggcaataatcttcaccggagacgacatcggcggcgaccgagtaatgattataacaatgctttacattatcatggccgttattgcctttgttttcggaataacgacgcgcaactctctcgataaagagtccaaaaccgtcggaactctccgtgcatccggttttaagagaagcgagcttgtgaagcaatatgccgtaatgccccttgtcgtaacgcttgtgtcggctgtcatcggaaatattttggggtacaccgtattcaaaaacattgttgtaaatacatattatcacagctattcccttcccacatatgaaacaaggtggaattcaaacgcctttgttctgaccaccgttattccggctcttattgttttggcggtcgtcatttcggtgcttgtttataccctgcggctctctccccttcagtttttgagacacgagcttacatccaaaaagaagaacaaggtcataaagcttaaaaggaaaaatttcatttcaaaattccgccttcgtgttattttccaaaacctttcttcctatataaccttgtttataggagtgctgtttgcaagcgttctgttgcttttcggcatgatgatgtctcccctgctcacacattttaaggatgaggtcataaattccgaaatcgcggcttatcagtatattttaaaggctccctgcgaagcggatgaaggcgccgaaaaatatgccgtgtgctcccttgaaaacgaaaaaggcgaggaaattaccgtttacggaattgaggaaaattccgaatattttgatgaaaatctcggaaaagacgatttgcttttgtccgacggtttcagcgacaagtataatatcgaacccggtgacgaaataaagctttcggaaaaatacggcgataagagctacaccctaaagtctaccggtcagtataaataccccgccgcccttgcggttttcatgtcgcgcgaacgctttaacgacatatttgataaggacgatgattattacagcggatatttctcaaatgaaaagcttgatatagacgacagctttgttgcttcggttatcacccgcagcgacctaacggtcatggccgatcagcttgacgattccatgggggaaatgttctatctgctttatgtatttgccattgtgatatatattctgcttatttatctcttttcaaagcagataaccgagaaaaacataacatcgatttccatgctgaaaattctcggctatgacgggcgtgaaatttcccgaatatacaatatgaccacgggaattgtcatgatggtttcccttttgatttccctgccgctgagttatctgcttatcaaggttatatattacgcaatgatgcttgattacaacgggtggctcacactatattttgcgccgtggatctggcctgttatgacggccataggcgccgcgtgttaccttttggttcacgttttccaaatgaaaaaaatcaacaaaatacccttaagcagcgcgcttaaaaatgatgaataaaggaggtaaaaaatgagcgttgtcataatcggaggaaatgagtgcatggagcgcagatatatcgatctgtgcaaatcatattcctgcaaggcaaaggtctacacaaaaatgaaggccggaatgagggacatcggttcgcccgatcttcttgtgcttttcaccaacaccatgtcgcataagatgcttcgttcggtgctcagcggtaaaaagaaaaacgacatgcttatcgagcgttgccacacaagctccatgaatgctttaaaagacattctcgaaaaacatgctgttaattgatttgaaaatataaagaaacgacctgtcaaagaatttttgacaggtcgtttttatgtcttatttatcgttgctttcgctttttacatcgtcgttgaaaagcgtttcggcttcaagcaccgagcggtggaccattcttccgttgtgataaacgtattcgggaagtggctttccgctttgctcttcgctgtcgagggattcggaagttttgtctttatttttttcgtaataggggtcgattataaatttcttaagcgcggggaatgttataaaattgaccgaatagaacataaatcccgttatgaagcaggcggtaattattataaaaattcctataaaaaagctgaccgacagtccgagggcaaatattgcaaaacaaataagaagggtgacgagcagcacaagggtaatgagaaaattccttaaaagaacggcaaaggaaagaatgagtccgtttttaataatctgcgacagctttaagtcaaaggaaacggccattgtaaagacataatactgtataaaaagataaacaagcgccgcaagcatacaaagcggaaagcaaacatatctgaatacgcccgacatggcataataggttgggagcgcataggtcagagccgcaaggcaaatatatcctataaccgaaagagcaagaggctttgctatattctttttaacggtggagaaaaagtcggcaaatataaacaccggctcttcccttgcaaaatcgcgagcaattcggcaggcacctccgataaaagggccgataaaagcaaagggggctccgataacgatgagagaaagctgaaggtcggaagcaagccttgtgcccgaaatcagggtgaaaatcaaataggaaagggctataaagggaatcatggtcagcagaaaaacgagacttaaaatacagatgtcccagaattttctgccgagtatttcaaagtattttgcaaaagcgcttttttcataggcctcgttttttgaaacacccttgccgggttttgaatatccgccgaaaatattgaatttagccaatttaaagtcctccgattatgctctgcgagccttggggtgaaaatgagagtaggaatttttatatttctgcttgacaagtcttgcatacatttgagtggaagaaatgtcggaatggccgagcatttcctttatgtcgtttaactgagcaccgttttcaagaaggtgagccgcaaaggaatggcgcagggtttgaggtgttatgtctttgtttatgccggtctgctttgcataggtcttgattattttccaaaatccctggcgggtcatgggagagccgttcatgttggtaaaaagcacgggctcgttaaaatcgagaattatcatgcttcttaccctgtctatgtaatctttgacggcacggaccgcctcgtcataaatcggtatgattcgctcgtttttgccgcctcggcaatgaagaattccgacctgaagattaacgtcgtcgacccgaagctccacaagctcggaaacgcgaattccggtggcataaagtatttcgagcatggcgcggtctctgcagcccttaagctcggtttggtcgggagccgaaagaagcatttctatttcgttttcggtcagaatttcgggagccttctgatcgggctttgaagattttatgcccgacgcgggattgacaaccaggcattcgccctcgagattcataaagcggtaaaaacatcgtatgcttgaaagcatacggttgacgctggatttcgaacgtcctctcgattcgagaccgaatatgtatttaccgatttcgtcgcccgatacgtcctttgcggaaatttttcggccgtcaagatattcgagaaactgctcaatatcccttaaatatgagttaagtgtgttttctgacacttttttcttttttttgagatattcaccgaatctttctttaaagtcggtcatcattaaaactcccctcgacgatcacagggaaaacgcgcccgaaaacagggaaacggttaaacagtcgattaaagaaccgaacacagtgatcgaaatgtattttataaatcctatacagtattttttgaatttcggtttaaagtcctccgacccgtcggaaaagcagcggttgtacagctcggaggaaaattgtcccgcactcagacagcaataaagaagcacgcaggaaaagacaaatgctccgggtaaaatgatcagggtgcagaatgccattccctcgatgcccatgacggaatatgccgacgagcaaatacatccgaggccgacgcctttgaaaaaaggaacggcaaaggacaacggctttccgaaaagaaacaggccgcagcaaaaggaaaccaaaagaaaaatcagatttcccgcaaaggaattaagaaaaattccgaaagccgaaagctttgttctcgagcttacaaaggaagaaaaaagatttgagtataaactcccgtcggaaaagaaaccgcttttaaaggccagcgtgccggcaagaacgccgagcacaagcgacagcgacatgaaaatgaaacgggtatttttgtaaaagaaaccgagaacttcctttttgagccttatactgttataaaatcctttcatattaaacctccaatatcttgtccttacaagatatgaagacaaaaggataaatatgtattaaagctttgacagttcct

SEQ ID NO: 846 - DNA, 11312 bp, Unknown
  16S sequences of unknown bacteria
aaaatggtataataattctaactgtgtgttatggcgacagcagttatgtgataatcagaaaaactgtctctcacagcaccgcctcctttcttttcatttattatcgactattttagcaaaatcctgttactacatatctttacctatgtccctgccaagatcacaggaataaatccattctatcttgtcaccgcttttcacctcatagctgctgcatcccacatttggaaactgtccgtttacactgtacatccagcccgaaacatcaccaccgtcaaattcgtaaatattagcaattccctttatgtatgctgttccgtatgcaggtgtgtttacaaattccatatgtattttattttctcttgtaacgctgctgagcacatcaaacacactgtcgccttcatcgaattcggcctctgtttcagaaaggataatgccgtcctcaggaattatttcccttactccgttgctgatttcttccatatgttccagcagggtatcacattttatggatatggtgcaggtatatgcgctgcttgcgctttcccctgcaccggacgaattttcgtccgctatatcccgtttttcgtctgccgtatctattttttcgccttgtgcgtccgatttttcgtctgtttcatccgctttttcgtcctcgctgtataaatccccgctctcatcgtttggtgtctgcatttctgtaccgctgtcaacacctgccgaatttaaatccgcattgtaattttcggggccgctgcatccgtaaagccctattgtcacagcaactgtcaaaatcaatacaatttttttaaagcgtactctgtttttcccttttccgctttcagatgccgtgcttttttttgtttttaccgtcgtatctttatctgtcacttttattctccgatattctctgatattctccggtgagttatacttttacacgcagctatatcgtttatttgcgataagcgtttactgccttgttattactgctgttctgctgctgttgtcccagtctatactttcacccacagcttctacaacagcacgcagcggtatgtatgttctgtcttctttaatctgtgccgccgtgtctattaaaacagtctccgtgctgccggctctttctatttttatttcgcttgatcctgctgtaatgtacacttttgtgccgtcctttgtaattaccgcaagttttgctgaattatcccagcttacatcgcagccgagattttccgttatctgtcttataggcgccagcgttcggcttgcgtgatctataaaaggcctgccggtatatgatgtgaattctacttgcttattgtcgatggtaacctttaccgcgcctttttctaaacgctctgcaacctccgcaacatcagtcatatcgtataatggcgataaactgtttgtaaatctgtaatatgcatcaagcgcacaaagagcctgttccgtcgccataagattgctgcctccgccttttgtatgctcaaagctgccgtcttttagctgatatgaaagcagattgtctatgagactctttccgtccttgataaaacgcttgtccaaatcaggatcaataccgagggtacaaagcgcgattatcgtctgcgccgtgctttctgaattttcgcttccataacttgtgtatccaccgtttttgttctgcttttcactgagcaaagcaatacctctttcaatcgcttcgttcactttttcttcattcttgtaaggtgcgagcgctgtaagcgccatagctgtgatatcgggatcggcttcttccccggacagtgcaaatccgcctccgcttttctcttctttaagtattgtatcaataagaagcgctcttgtagtgcgcttaccataagcagtgccgcttatgtctatattgcccgtatcgcccgcgtttgataaagaagcggcagctaaagccttttgcagctcatcgctttgcggaatatcataatcaccgctgtcgagtgcaatcagcgtccacactgctccgtttaacccctggtttatcactctttgcatatcggcgagcgaaagcagcagattctgcccgcctatagcagatgcatctttaccgatagccgtaagcgcaattacaactcttgcattttccgtaacgcgtctctggtcaaggacgccgccgcttgccgctatcgctgcctgcgcctcttcataatatccctctttataagctgctggtactctttcgccgttttccccgcgcactcttccaattaaaaaccattcctcaccaaaaagagcgtgatgatacgacgttccttttccctctgtaccttgtataaattcatctgcttttaatgccgcctcacttatttccttattcttttccgttaaagccgcagcagctgcgcccttaataccgctcgatcccggcaccttggtccagtccttcgtgtaaaaccactctatttcctcgccgcccttaagcttatactgtgccgcgctcgtttctataagagtaccgtccacgcgcaccatccagccggaattaccgcccatatcaaattcactgagcccgtctatgctcacaacatagtttccgtcttttatagtcgccgttatgccggcacttgccagcacctgtttgagtacactgataactgttgtgctgttcttttttataactgtcgttccttctgcgagcactttgccgtttgcatttttgacaacggtgcttacctttggctcagatacctgagaaccgccgcccgtgcttcctgagtcgtccgcaacaataacagcaaagcttgcgctttttgtttctgtaattccgtatgatgtttcgctgtatgtgacatttatttctttttcacccgctgtgctgctggcaaaggttcctactttatactcaccctctgtaagtatttttgttgttccgtcactgtatttagccgttaccgtcattcccgctgtatcgagctcttctcccttttcataaacgagctttgtcggaggcgctataaataagtcggtaagaactttgccctttggccaattctcttcttctacgagtactttatctgtaaaatcataaatatttcccttaactgcgctctcatcatttaagtaattcttaaatgccgtcagtgcgcgcatcgcatctgccgtcgccataagatttactgtattgccggtatatctaaagcctttgcccgttcccagcgaatcggcaagcagcgcatctataacatcgggatatccatagccctttgttatctcctgcggattttttgcgagcatcgagcctgcaagcactatatacgcgttgtaattagaacttccaaaatccgcaagtcctcctgttttgcgcactatatagtcaaacgcagcttcaatcgcatctgttatttcgctgcttctcacgctttcgctctcatagtcctgatagcccgcaaacccgagaactaccgacgccgtatctcctacatcgtatgtgcccttaaagctgccggccttatcgccgcttatctcctgattatcaagtatataccttatgacaaagtcctgtgtcagcacagcatcgcttttatctcctgctgttgctgagctctctggactgcacttgtcatttgcagcatacgcaagcagcacataaggcgcattgtaaattgaaaggtttgaagctggtgctttggcaatgatatctatgaggctcaccgtctttgcgcttgcttcatctcccgcatcaccggcggtatcgctgtatatctttacactgcaagggtccttgcccattgcgcagagcacaagtgcgtctttggcaagagtgccaagcacgctgcttgtcatatctgagctcgcatccacctgcacctttctcagcacagcctcttcctgctgcgcggtaagcgttccgccgcacgcaagataacctatcagaaaatctccctgtaaaaataagtccggcaaaagtccggcaaccgtctcgtttaccgccaaagccgccgttatttcctcagcctgagttttttgttcatcatcgccgtactcggttatatccttcgctccaccagcatatatttgcagatggaaatctttttgtaccgaagcgctgcctacagtcacagaagcgctgagcgttacctctgtatcctcgctgatattatcaagcgacacttctcccgtatttccgatcagctctgtgtcgctgcttttccacgtaacctctgctgtatcgccgtttgcaagggttacgcttgtcggcagtgtcaaattagtgcttacattatatatgctgccgttttcatctcttatatcgccccagctaagcatctgcgcggcattttccgctttcatgctgtctgtaagctcatcttctacaattattttgagattcggcatcagataatacattccgtaatcgtcctcagacggcacagacaatatgtactcgcccgctttactaaatgacacggcaatcgttccctcatcgtccgtaacatctataaattcatctccggcgtatacctcaacttctgttatcgcttcaataaaagattcaagactgtccggtgcataagccccgtaccaggcaaaataataacctttcagcataagctctgcttcattgcccgtttccatatacaaggtatctacttgctttccgtctgtctcaaaccaagtgtaataatccatatagtacggatcggcatatgcgaaaaattctaccgtatcgcccgaatgcactacagtctgatttactgccgtgccgctgtatccatactgaccctcaatgccattatttggctgcgctttgttgatcgcaaatgagaaattacccttgccggcatcgaaaaaattgtctacaaaaccgtctgataagctgagatactctttcgcggtttcttcgttaaactcttctccaagcacaagctcatatgccgccacaagcacatcgagtgcggaaacagcttttgcgctgtcaattgcatccgcataatcatatttttcggcaagacccgaattcacagacaccgtttctctgtcatgcaaaaatccgccgcttaactgtgaaactattgtcacatcagcatttaacgtttgaccttctgcttctgctgcatatacggactccgtatctttaatccgcatgacaaacggcgccgctgaagttaccgtgactgtaactgcgagcagacttgctattatacgcgcgattctgcccttcctttgttttccctgcacatttccttttttcttcttctctttcatttcctctgtcctttgttcctcgactaaagtatcattatccctcggtgcgccgcaaatctccggaaaaataaaaagcagcggcaaaaaccgcagcccgtatttatctgctctctttccgtaatttccggtgcaccgccggattacagcatatgaaatgcaggtcttccggcttgcgtatcatcgcctaaccacgccttcccaaagcacaaaataccttttcgcacttatactggtatcatcggcattttgcgtgccgtcttgtctgcgctcctgcaaaataccgctgtcttttcacccttgcaaaatacattcttaaatgtatttctgcaaaagcatacctgcatatctctcttgacttcagtggctgcctcgccaaaaattcaaattatttttgcatttcacgctgtggctcgcttttctgatttccgcatcctatcatgcacgtttcgttttccgtactttatcttgcgcatcctgcgctttacaatctgctttcctcagtctgcactatattttttgaatttttcagtccggctatgggcctcggctcctcgctcacggcggcgggaccgcacgggattttaacccgtttccctcttagcttcccgttgcttgcagcttacacacttaaaaacctgcaaatctataattctgtcacactacaaactcaaagctccatagacccgcaatatttaaaaaccatcaaaaccgcctgaaagctcgggaagaacacttcatatttataaaattttatatactaagtttaccaactccactcgaccctgtcaaattcaaaagtatctttttcttttaatttttctaaaaaagatatcttttggccaatgccgcccgaaaattgaaatccgccgcatcagccgcatcttgaatatcccgcttcccttgcgaaagcggcctcgttatgataacatagaagcagcaaggagcttcaaaaacaaaggagggcagatttatgcgaaaatgcttgagatgcggcgcggacatgcttgaaggttttggtatcaatgttatgcacggatcctacggtattgccattacgcggaatgaaaaataccgtcctttcagtaagctcgatacccctaaggtagcaatatgtcctgaatgcggcgagatttccttgtattttgaggatttggaaaagctgaaaactgctgcatattacagagatttcaaaaacgacttaaaaagtgtcagttcaggcggcaaacgcaataagcacagctttgcaggcacagactgcctcaatgaaagcagcgctgacggcgccgctaatgacgaccgcggaaatacaaactgcgcggaaaatgaaatcataaatttacgcgaacagcccgaatatcttaaggctgctgcgaaatggtttgcaagtaaatggagcgttccgcttgccgcttacgaagaaagtatgcaggagtgcctcgataaccaaaccagcgataccccaggcgtcccgcagtggtatatagttatgaacgaaaaaaatgaaataatagccggcgctggcgtcattgccaatgactttcacgaccgtccagatctgacgcctaatctctgtgcgctttttgttgaagaaaattatagaaaacagggccttgcaggcagtctccttttgcacgcccgcagcgatctgtctaaaatgggttttgaccgtctctatctcattaccgatcacacgaatttttacgaacgctacggctgggaattcctgacgatggtaaacgacagcgacggccctgccagaatgtatatctccccttcctataacggtatttagagcatttaacagcagtcatctaaattaaataaatatttataaattacttgacaataagcagcctcgcattgttaaatttgtataaaggcacttttaaccgcataaaatcagaaatgctctatttttgtttttaactgttaaaattatttataaagaaaggataaaatttatgaaaaaattaggatttggccttatgcgtctgccgctcgacaatcccgacaacgaaaccagcataaatttaaacgctgtcgaaaaactcgtcgataaatatatggcggctggcttcacgcactttgataccgcttatgtctacaacgacaagcacagtgaaatcgctttcagagaaacggttgccaagcgttatccgcgcgaaagctacacgattacggacaagatgccgatgttcatgataaaggaagaggaacgtcttgagccgattttcacagagcagcttgaactctgcggcgtcaattattttgactattactggctgcattcgctcaatatgggcagctacaaacgctctatccgcgctaacgcctttgattttctcaagagaaaaaaagacgagggcaaaatcaagcatataggcatatcattccacgactccgcagaagtcctcgaccttattttgacagagcatccggaaatagaatatgtgcagctccaaattaactatatagattgggaggacgaaaacatccagtcccgcaagtgctacgaaaccgcagttaagcacggcaagcgcgtaatggtaatggagcctctcaagggcggctcacttgctgatattcctgaggaagctgaaaagcttatgcgagaaatgcaccctgatatgtcccctgcttcatgggcaatccgctttgccgcctcacttgatgctgtggatttcgtactcagcggtatgtcctgcgacgaacacctcgacgacaacctttcatatatgactgactttgtgccgctcacggatgcagagcgcgaagtccttgcaaaggttaccgatatcattaaatcgtcgatcgctattccttgtacagcctgccattactgcacgagcggctgtccgcagaaaattgctattcctgaagtttttgccatctacaataattacaaaagattccctgaaaatcaggaaacagcaacaatcaactattcggtaacacttatgaaaaatcacggtatgccatcttcctgtatcgagtgcggccaatgtgaagaacactgcccgcagcatctttcgataatcgaaaatctcaaagaggtggcgaaattgatagaaggctaaaatttacggtggaacattatgaattatataggctcaaaattttccctgctcgattttctgcgcgcatctatcagcgatgcgaccggctataaagaaaacgatagctatgtcttcgcagatttatttgcgggcacgggtgttgtcggcgccgcttataaagccggcggctgcaaagttattgcaaacgatatacaatattacagttacatattaaataaacactatattgagaatgttccgccgattgatactgcccttttggaatatttaaacaatcttccggggattgaaggcttcatttttaataattactgcgaaggctccggctccggaagaaactattttacggatatcaacggcaaaaaatgcgatgctgtaaggacagaacttgaaaaactgcatcaaaacggcgaaattgacaatgcggtatattattattttctggccagccttataaattccatagataaatatgcaaataccgcttccgtatacggagcgtttttgaagcatataaaaaaatcggcgcaaaaagagttcaagctcgatctcctgccgattatcgacggctcgacaggagaagtatataacgaagatgtcaataagcttataaggaatatttccggcgatgttttgtacctcgatccgccttacaatgccagacaatactgcaccaattatcatgtgcttgaaacaatcgcaagatacgataaccccgtactgatcggaaaaaccggtcttagagattatcaggatcaaaaaagtgcgttttgttcaaagcgaacagtcgccaaagtctttgaagacctgattataaacgcaaaatttaaatatatatttttaagctacaacaatgaaggacttatgagccttgacactatcaaagaaattatgtcaaaatacggctcatactcttgctatacacaggattacaaaagatttaaggctgataaagatatgaatagaaatatctccgccgctcagacgacggagtatttgcattgtctaataaaataatttttatttcttttcctgcaaatgctttctgaattcgataggatcgtaccaaaagcatcctatgcaagcattctcttcattattatgatatgctgcgccttcataatacgatattggatatcccaactgctttgcgtcgtatcttactcctgtgcgtctgcattctttacagaactgccgttttgcatcattggcagctttgctcagcggctgaaaatccgatagtttttgctcttgattctgcattactctatcttcgtttttcataccgtttttatggtcgcattcaggatttgaagttccgaggattacacacctcatccctttaatgcgttttttaatttgaggatctatgtaagacgaatacgaattatcgacggcaaacccatttgttctaatggcatctatcctgtttccaggtgtacgcgttttatctttttctattatgtatttacggccaaaagccttatcgccgcgcgcccaatctgctccatttccaaagcgaagaaactcatatcttcccgtaaactcatctacgccgacccatctgctgactccgttttcatcgggctttgcaagttcttcaaacaattctatctttgttaatttcttttctcccataactgctccttttaagcttccaaatcttagacaattttttaagcgccccttactactcaagcctattatatcatccttacctgataatggcaaaaaaaagtacgggcgggagaaatttccccgcccagacttttgattgacttatttaaggatttatttaatgagcaaattcagcaagttgcattttgcgaatttcaatattgggtaagcacctttcaaatattcagtgcttatgacaaaaatcggagttcgggcaactgctgcatccacatccacagctgcttttccctgcttttttatctcttatcatttttctgactatcagtattacggctgccgccaatattacaccaactaccgccgttcctacaaattcaggtcccattttgatctttggcttgcctattgcaagctctacctttcattatttattttcttaatttatttatgcccattttcggcttttttaatcgcgcagtgcgcaaaagtaagatgcatagcttgtgcgcaccgcgcagaattaaaacaatatttattgcgctgtatttacgcgtttaccgacagaacacttctcttgtcattaagagtgttattttcatacttgttcggacgaactatcatatatatgaatgctattgcaactatgatggctacggcagtacctatgccaaaaccaccgccggttacgagcgttccgaactgatatatcataagcgctacgagataagcaaatattgtctgataacctatcgcaaaccaagtccacttaggattattcatttctcttcttattgctccgattgcggcaaagcacggtgcgcagagaaggttaaatgcaagcagtgcatatgcgcccgcaggagtcaggctcgctgaaagctcaccccagatttctgcgccatcttcagcaacctcagcatatccaaagagtatacccagcgttgatacaagattttccttggctacaagtcccataagcgaagccgatacatactgccacttaccgaatccaagcggtacgaagataaaggcgatagcgccgccgatagctgcaagaagtccgtcgttcatatcctctaccataccgaatccactgtctgtaaatccaaaattcgagaggaaccaaataattattgatgaaaggagaatgattgttccggcctttttaataaacgaccagcctctttcccacatacttcttaagacattgccaactgtcggaatatgatatgccggaagttccattacaaacggagccggatctccagcaaacatccgtgtctttttaaggataagacctgacactataatggatgctactccaagaaaatatgcgcttggtccaacccacca

SEQ ID NO: 847 - DNA, 32759 bp, Unknown
  16S sequences of unknown bacteria
cttgaaaagtgctattccaaatcccgcactttctcggtcaaatatattgtatcaggaggaaactatgaaaaaactgcaagcggttacattgctgctgacggcatgtcttgcgtgcacacctctggcggcgtgcggagatagcgcggaaaccgtaaacaaaatcgcctacgaattgccctattacgacggcacttacagacaggagctggacgatatggataaaccgcagtataataaagagctttggcgcaggggagagctttccatcgacggcgccgatccgctcgttttggacgatacggcgaatacgggttattattacgcctacgttacaggtttttcctattactattcggaaaatcttgaagactggattcccggcggcgggtttatgtcgctgcccgctgatttgaacggttcttccgcgcattgggcgccggaagttatctacgacgaggcggaggaaaaatattacgccttctttacgattacaccgcccgcggacaaaaatatggaaggcgggccggggcctgtttatctgtcgatggtggcgacgagcgatagcccgggcggtccgtttgtccctatggatttaagcgcaaaacgcacgatcgacacggcaaaatatccgcagttttacgcaaaatacgcgcttttggacagcgcggagtatcagaaggcatttgctgcggaaggacttccctatgcggggaattatacgatttttacaatcgacggaaaagcaattgacaacggctgggtgcgtgcgatcgacttccatccttatatagacccggatactcgcgaaaagtatctgtattggagccagacgcccggttctatcgcgggggtaaagatgacgaactggtacacgcccgactggtccaccttcaaaacgcttaccgcctgccgttattatacggttgccgactacgtaaaggcgcaaaacggcgaatcggttgaaacggtgccttatgaggaggcggcggcatattgtaacgaaggaccgttcctgtataagcataacggaaaatattatctcaccttttcgatcggtgcttacgatgaatcgtcttacggcgtgatgcaggcggttgccgacagccccttgggcgatttcagaaaactgaccgacagcgaaaacggcatgctcttaaataacgatatcggagataaccgtgcgattgcggggccggggcaccattcttttatcacgataaacaaggacggcgtaaacaagctgatcattgcctatcacgcgcacaacaaccctctggtttataccgggcggcacgtgcggtttgacgaagtaaaatgggttacggtaaaagatatccacgggaatgatctggacgtcatgcacgtaaacggacctacttacgccgtaaatcccacattcggaatcggcaaggaatacggagacatcacttcttcggtgcaaagggccgagcttcaacgcggttcgctcgaaaaagggaacgcggcggagtatctcacggacggtttgatttcctattataaccgagttggccgggcgtttaacgatacgtacgtaaaggaaacgacggcgacggttacttccacgttcgaacttacgctcgacaaagcccgcgatatccgcggaatcatgttctacaattccaaggtaatggaaaagatgttccaaaaaatcacgaacatcgcgctgatcggagaggaaaacgggcaggagaaaatctatcttatcaaagagctttcgatcgataaaaataccgcttatatctacagcaaggcaaacgacgagtattatgcgctttacggcggaaacgtatatgcggaattcaatgcgatttctgtcaataagattcgttttacgatggagcttcccgaagggcagaagagcgttgcgctttccgaagtggctatcgtcggaaggataaaggaggattgatatgaaggggaaaaagcttcttgctctgaccatttccgccgttgcggccgtcgcaatgtgcggagctctttcggggtgcgatagcctgcaggcaaacggacctatatacaattacaaaacggcgccgaccgcccggccgccctacgagtttacgggcaacgtaacttctaccgtcgtgcccgacgcggaaatcaggcttgacggaaagttcgacgaggaattttataaggaacgaaaatggtttgaaggcaataaaattcagggctcggaaacgggtaagctgaaaatgacgacgtattttgccgaaacgggaatcgttattgcggcgcggatcgaggacagtcgcgcagcatgccacagcaattcgctggcaacgggaaacatcacttgctttaacggttatttcgcgttcggcgacgcaacggtgcaggcggacggcgtatatgaaatagaatgtacggcgggtaacagatttaagatttcgcagtttacgcccacgggcttaaaagtgatgaaaaccgacctggataaaacgcccgtttcggcggtattccgcgagggggacattctcaagggggagtgttataattatcagctcgaatactttatgccctattcgctgttcgggcgcgtttctcggccgcggtcggtgtttttcaatcccacgatgatttcgtgtacgattgacgagtacggcgcggtggacgaccgaaattggtataatttcggctatcagcaatcgccgcagatttcggggtggggaaatcccgaccagggttacgtattcaatagcgacggtttcgtaagccataagattacgattgcgtcgtcgggcggcggaaaagtgaccgaggaatggggatatgattggtgcttgacgggcgatcaggtgaatttcaacgtaacgcccgacagcggcaaacagcttgtaagtattaccgtaaacggagccgacaaaacggtttcggtaaaaaacggaaaactttccgtcagctgcaacggtgacattaatatcgttgcgacgtttggttgacggggcaaaattaagggaggaaagcatgctttatctgaactatgcgcccgttacgccgagcatggccactgcggaaaataagctccgcaatctatctgtattgcggttatgtcggcaaaaaataagcaataaaccgatgaacgattgaaaatttaaggaggaaaccatgaaaagaaacaagcttataaaatttcttgcgtccggcgccgtttttaccgcgctgattgcggcgctgacggcgtgcggaggaaataaaaacaaacattcccttacgcttatcgagggaaaggaagcgacctgcacgacggacggatacgaagcgtactatatgtgttcgcattgcgatttgatttttgaggacgcggaaggaaggcaagaaacttctttggctgcggtgaaattgcctgcgctcgggcatgatatgcacaagcacgaggctgatacggctacttgcacaaagcccggaaatgtggaatattacacctgctcgcgcgaagaagggatatattatgcggatgccgagggcagccgcacgctcgatgaaatcggcgtaacggtggagcacaaaatgacgcgcgtgccgcaaaaaaatccgacgacggaagccgaaggctgcgtggaatattgggaatgctcgtcctgcgggcaaaggtttgccgattcctggggagaccgcgttctctctgacgacgagatgcgtattgacaaagtgaaagaaaatattgacggcgcgcttacgaagtctttttataatacgcagaatgcttatgtggccggaggtgaggatataacgcggggcggaccgggatttattgtaaacggcaaaaaggaaacggacggtatttatttacatatcgcggcaaattacaatactgcggcggacgatcaacagggcgatcacggaaaaatcggcttgctgttcaatttccgtaatcagaatgatcttaatctccccggttcgctgggggtatgcctcgaacagacgatttatacggagctatacttaagcggccgggtcgcatatcacgacgcaaatacattaaagtattttgcgacggtgacaaacgcaggcgacgccgcggcgaaatatacgacgacatgggagcttttcttatcctacgaggacctttcaaaagctaacggcggtaagcttgcggaagcatttgaaaagaaagaggggaaaaccgtgcttaaaacaggctatgcgtctatgcttaccgtagtgggcaatatgacgtatgcggaagcggattcttttaacggaacgaacggcgcaaaatgcgatagtaaggataataattcgtggctgatgtggtatagagaggggtatggcgatgggggagccgatcagaagtatatggcgctcggccaagatggtttttttgttgatatcccgcgtgcaacggatacttatgcggtgaagaaggccgattgtcaaaacgcaacggtaaccgttccggaagccgtagattgggacgaacaaatcacgggaacggttacggtcaacgacggttatcgctttacgggcataaaagcaaacggcaagattgtcgtagctaaagacggacttataaacaacgattactcgattgacgtgtcctctctcgggctgaagtggtacgagacggagatcgaactcgattttgtcatcacgaagcttgattatcaaaacgtttcgtttacattaaaaggcttttcgggcggcaaggcggaaaatatggcagaggaaaccgccgtcgttctcgataacggcttcggcgacgtttataatgtaaaagcgggcgcaaacggcgttgtctcgattgaaaatgtcctttgtcagaattatggtattaaggttgacggctatcttgacggcgaaatcgacgtggttaagggcggaacgctcggtacggttacgcttgaatattactttgcccataatgcgggcgacagagccgaccttgtcgatttaacggatatgaatgcggaaaacgcttccatcacgctcggcggacagggcgaaaacggagtggatcaatactcgattgcggcacaattgaagctttctcaagagatgaaaagcgcaaggtcttacgttctctatacaacggttacggtcaacggagatattgcgtcaagtaagccgaatacctggctgcagcgttttgcaatccgttttgccgaaggggattcgggtaatacttacaaaaataaatttgtcgtatggtgggacgatctcgggcttaattccaatccctcggcatgctgggtggacgatacgacgaattgcggcggaggatgggacagagctgagacatacggttggctggcgagcaatattttagacgggttgcagctcaaggttgtgcgtaacggcggatatattacgatttccgcttataatctcgacgacgaaacgtggtacacgttgctcgagggcgcgacctcggaaagcgcgaaaaacgatattacgttctttgtcagcggcgaaagcttcaccttctcggaaattgcgtttgaagagcttcaggaggtagggcgcacgcttcccgaaggcgacacggcgggcaggttggagcacttgaaggcaagcaacggagacttgttccatatttcgggtaagatagcgacggaggagagcttagagttaacggaaacaagcgtaaacgtaaccgtaagcgcattcgaaaaagacggcgttacgcccgtatcgctggaaaacggaacggagatagagcttacaggcaattacctgacctatacatatacggtaggcggcgctgcaattacgaaaatgttagaggacgaatacgaagctttcctttacgggtacggaaaagttaaatttaccgttagcgaaggggcggaggtcagccttaagcttgtaaaaaccatggcatatacgacgagtgacaaggtgaccgtaaatgaagaaaacggaacggtttctatcgttgcgcaggataaaaacggcgctaaaaactggacgggaggcgcggaatttgttattggtcgggatatcggaaccaacctcgcgtttgaaaccaccataaaaatggacgatgtcgaagaaggctggacggggcattccaccgaacagagatatgcgcttcagatgaccgaaagcggaaaaggcttctacttctggtcgtggaaggacggaaaaagcaaatcgctggtgcgacggctggttagccttaccgactgcatggcggaaggtgaaatcgtaaacggagacgaagaaggcaacggctggatttacgacgcgatcgtaagcgaagccggtttgcaggtccgcgtaatccgactgggcggtacgcttatcctcaccgccgtcaaagaaggcgaatttgtaaaaataggttcgtttgaatgtgatgcggccgacgcgactaagattgtcgcatacggcgtaaccgcaagctttgagttttccgaaaattccgttaaaaagcttacgtttgtagaagggcaggaggcgacgcttgaagcggcgggaaatatcgcttattacaccgacggaacaaattactatttgactgacggtacggttacgacggcggaggcgatcgttattccgcggattacggagcatgcggtcgaaatcgccgtagagggttacggcacggacggcaacaagctttcagacgcggagttaagcgggataaaggtatcgcttacgggcgaatacgattacaacaaaaacgcatataccgatctttcgattgccgacggcaagctgtcgcttacggacggaaaaatttatcagggcaagtattcggttacggtaaacggctacgccgcagaagtgcttgagattggcggggataccccggcctatatcatgaagctctacagggtttccggctatcaaatcgtagaaataaccaaaacttataaacccgaaagcgtaacgacgggctttaatcaaaacggcgttaccgttaagctgacgggctgtaaaaccgacgactgggcggaatacaacaaccccgttcccgaagcgaccgtaacgcttccctccggacttgcaaacggcaaaaacgtatccgttgaattcaagctcaagctttccaatgagggcttttggggcgcgaacgcgttcgggatttccatggtgaagggttacggtgggtttattttccgaacccttggttcagattcctccgaaacggagatcaatgaactttacgcgcaaaaattagccgaggataatatgaaattgctcgggaaaaacgcttgggtaaaaggtctttcgaaaagagaagccggggtcaacgtccgcgtcgtccgcacgggtgccacgctcgctttgtttgtgcagaatgcggaaggagcttggataaaactttataccgtaagctgtgacgcaaacgcagaaacagaaatcaggcttatgggcgcggcgtcggattttgagatttccgacatcgtcgtttgcacggcttttacagccctcgaggctgctaacggatatgaaaaagcgagcgaagatatcgtttatcacggatatgttgcccctacgatggaaaaagacggctgcagagcatattattcggtaggcgaagatatatataacgagagcggcgaaaaaaccactcttgaagcgttgaaaatttcaaggcttgagacaacagaaattactgttacgattaaagggtataaggacggtgcggaaacgctgttgaacggcaccgttaccgcgcggggcgaatacgaaacctcgtttacgggaacgcttgtaaacggtacggcaacggtaaacgcctgcttcgttacctataccgtatcggtagaaggctacatagcaagggagttcacggcggaagaaggcaaaacgtcttacgaaatcgtgcttgagtacgatttcgcaaaggcgacggtggagcccgaaaaagtcgatttgtcaaatatgaacgcagccaaccacgaaatcaggattacggggaataaaggcgaatgggataactgggctgcccccgtgcccgaagcgcagctggttctttcggaaacgcttgcaaacagcaagtccgtcgctattgagtttatgctgaaagccgagaatatggggcattggcgcgcgcctgcgttcggtattgccatgaacggtcagtttaacggctttatgttccgttttgaggcgcccgataacatgaatgccatgatttatcagctgcatgggcaaaagttgcttgaaaattatgatcagcttgggcaatttttcggagaatttggttttatagagcagcttatgttgggagaaggggtaaccttgcgcgtcgtcagatataatacggatattacgctgttttcgaaagacgcacagggagagtggcagaggattgcttccgtagcttgcggcgcggacgacgcgaacgatatcagatttctgggcaacggctacgattacaccgtaacgaatatttccgtggcgccatacgccgctccgtctgttgccgcggtcagaagcgaaagggctgcagttattgctgtcgatacggattttttgcaattatcattttcggatcaaaaattgaaaagatataacgattatataaattaaaaattcggtgacggggggagcgtttgcgctccctcggttactgaaacgaaagaatgttcaaaaaggaaaatcaatgaagaaaatttacttaggcgcggcgtattatcccgaaatgtggcgagagaatgaattggaaacagatattgcacgatgtaaaaaattgagcataaactgtttgcgtgtgggcgaatttgcctggggaaaaatggagcccaaagaggacgagtttgagtttgaatggctcatacgcgtggtggatcaattatacgaaaacggcatttctacagtcatgtgtactcccacggcaacgcctccgcgctggctgctcaatcaatatcccgaaactcgtatgatgatgcacgacttaatccgtgcggatgtttcttcccgctgtcatacctgtaaaacctcgtccgttatgcgagagaaaaaccgcattatcgtcaccgaaatggcgaaagtatttgcggggcataaggggattgtcggctggcagatcgataacgaaatttatccttattccgaagggtgctactgcgaacagtgcaagtctgctttccgcaggtatctgaaagagaaattcggaagtatagaaaagcttaacagggcatgggggatgacgaggtggtctttaagttacgatacgtttgaagctatcgagccgccctatcccgggcagtggaaacacccttcgcttaggaaggcttggcgggattttcattacggacaaatcaaaacctacgtggaggagcaagccgagattttacacggctacggttgcgaaaacgtgggtacggacatgatggcgcataactcgatgagctattatgatattaatgaaaaattggatgtggtgcagtataaccattatgacgccgcagagcggcttccctgcaacgcgttttcctatgactttttgcgcagcgtaaaggataggccgttttgggtaatggaaacacaagtgggatggaacggaagcgagtatgcggagggcggataccgccccgtggggaattgctatgcgaatacatggctgccgatggcaaagggtgcggaaatgaatttatattggctgtttcgtacccacccgaacggacacgagctgggacacggcgcgctcttttcgcccgcgggaagagcgtacagggtttcggaagaagtacaaaaagctgcaaaagagtttgaaaaatgcggggaatttttaacgaatacccgcattcgcagcaaaattgccctgcattattcgagcacggcgcataactcttacgactgcgcgcctttactcaaaggcttcgactaccgcgaaacgcttattcaaaagtattacgcggcattccgccactataacgtggacgtgatagatacggcgcatagtttggagggctacgaagtcgttatatctccgttcctctccacggcggacgagaacggcttaaaggagcgtatgctcgagtggataaaaaaaggcggaacctggattgcggggccgatgacggacattatggacgcgaacgtgatgcgatacacggaggcgccgtattcgtttctcgaagaacttgcgggggtgtacgtaaaatatcagaagcctgtcgcaaacgagatattcacggcgcagtggacaaacgacggcgagtgcgccgtgggcatgtgttacgacgcctacgagtgtaacgagggcacccggagtctggcccactacgtcggcggcgaattttcgcctctttctgtgatcacggagaaaaaggtgggtaaggggaaagtaatattgacgggcagtgtgatttcgcacggcgatttgttgcgacttatcaataagcccccgatagccgaagcgagcaaaaacgttattctgaccgagcgcacgggcgaagagtgcggtataatagccgttgaaacacaaaacaagcgggggtatcttgttctggacaacgaatataccgatcttatcacaggcaggattttttcgggcaaaaccgatatatatccctacgaggttttggtacttaggaaataagcgctttacgtacgatatacgacaagtatatcgatgagggagtattcggagcgacgttcaatccccccccgaaggacaaagatttttggacgatgcgaactatctcggtaggatgacgcaacaaaggtaccgctctgtttcttataaaaaccataagagatgaaagcaaagggcttattttggctatccgccgttgtatcaaaagggtgagcggctataacgtcgtcgctcacagccggaattatgcggtcgtgatttctcccgactgctacggccgggatttatacctccccgtcgcgtgttccctgctaaatataaaaaaattgcataaaacagtctgctgaactgttctacaaaattataaaacaaaataaaagaagctctatttttgccgcccgtccgcgtcgggttgcgttttgaaaaagtttgtgctataatgaagacatcatgagcaaatataaattaaacggcttgacggccgtagtcacgggcgcgtcttcggggatcggccgtgcggttgcggaaaagctgatcgcgcgatatggctgtacggttgtcggcgtcggccgcgacgaaaataaatttcgggatttttcagaaaagctgggcgaaaacgtttcacgtttttcctatcgcctgttcgacgtcggaaacagagaggaatggaaggagttttgtacctttttaacaaaaagcgggattagacccgaccttctcgtaaactgcgcggggatacttccctctttttctttctacggggaaaattcggacgcagagcttgcggttaagacaaattttctgtccgtcgtatattccttcgaaaccttggggccgctcttaaaagagagcgtaaggcccaagattgtcaacgtaggaagctcgtcttcgctgtgtccgtttgcgggcgttgccgcctattgcgcctcgaaagcggcgatcgaacgctttaccgagtgcgtcgcgctggaaaaggggattcccgcagcgatcgttatgcccggatttaccgatacggacgtatttcgctttcaaaatttcgatgcgaaaagcaaaacgttttttcaaaaattcagcatgactgtcgatcgcatgtccgataaaatcatcaagacgattgggaagggaacgagaagaaaaatcataggcctcgacgcgcaccttatgaatttcggatacaagtttttcccgcaccttacgcccgtccttatcaccaaaatattgaagtcggtaaagtccgacgcatttcaaaatataacccgctgatttcccgtatgtcgtcgatatacatttgacttcgtccgcgataacgcgaataaattttattgaaaaaaatttgttatataacgcttgactgattaaactatatcagagatggttacagtctcttacggagaatgaaagtaaagtccggttttatcatcgcagtgcacgcgtcggtatttttacggcatacaaccaatgttggtcaagagaaaagattgaggaaaacctccgtgccgatctcgcttatttaagcaaagtaacggaaagtcttgtaaaggcagagcgggagacgcgtcgttgttttgcggagaaacgtttaagcaagcaggagacggatatggttgttttctataagatacggtgaccggatatttattcctcccacgatgaggaaacgcgttgaagaattgtttgccgcagtaaaagaaagcaaatagaaaagcggacttaaaataagtccgctttttattacaatactttggataaaaaatctttcagacgcgggtcgcggggattggagaaaaactccgtcggcgcgctttcttccttaatgacaccttcattcataaagagcacccgtgtcgccacctctttggcaaaacccatttcgtgcgttacgacgaccatcgtcatgccttccttcgccagatcgatcattaccttcaacacttccccgaccatctcggggtcgagcgcgctggtcggttcgtcaaatagcatgatatcgggttccatagccagcgctctaacaattgcaatcctttgcttctgcccgcccgaaagggtagatggatagacgttggccttgtcctccaggcctatctttttaagaagcttcagggctttttcttccgcttccgcattaggcagttttttcagctttacggggccgagcgtgatattctgaagcacggtaagatgagggaaaagattaaattgctgaaagaccatgccgattttctggcgatgttgattgatatttttatcgatctttttttcaatttcccgctcctgcgctttcagagtcctgtattccgcttccgcgttttccaatatgctttcgtcaaaggcctcgcctgacttttgcgcggctttttttacctctttcagctccttcacccgttgatgaagataggaacgttcgtttttgaatacgtattcgccctcgaggacgatctcgcccgcggtcggcgtttccagcagattgagacatctcaaaaaggtacttttcccgcagcccgaggggccgatcaccgcaattacgtctcccgcgtagatcttggtgtttatacctttcagtacgtccaatttattgaaggattttttcagattcctcgtttcaagcaatatttctttatcgttcatttttcgacagtctcctttcgagcaaccgtatcagccaagtaataatcattaccagcacgagatagacgactgccagcagaatataggggacgaaatattcgagggtagagcttgcgatggcctgaaaagattttgtgagatccataacagcaataaagctgacgatggaggtctctttgataagcgcgataaactcgttcccgagcgtaggcagaatattttttatcgcctgcggcagaataatcctcgtcatggtggcggtaaagccaaatcccagcgagcgcccagcttccatttggcctttatctactgcgttaataccgcttcgaagcatttccgacatatacgcggcgctgttcataccgaagataagcatcgcttccgccaccgagtcgatgttgagtccaatcaggggaaagagggcaaaatgcatcaataacaattggaccaccaacggggttccgcggaataccataatatagatattgcataatgttttgaaaaaatcgaccatcgggttctttttcgggataagctttaccgtcgctatgacgcatccgagtaaaaagccgattaatagtccgaaaagtgcaatcaacgccgtatttttcagtccctcgagaaagtttttataaccacccagagtaaattgattccaaaaaatttcaaatttgctcattgcttatttattcaaggtcgccgcaatcatgagggagggctgtttatccaaaataacggcgtcaattttgccgttggacaagtctttcattgccagtgcgcccgtcgtatagccttttgtcgtaagatttttgaagccgtcataaccaaaccccgaatcgcctgcggaatacatataccctgtcgtaccgttttgcgtgccgattttatatttggaattttgcgccttgagaatgttttccacgtcttcggcgtttttacactcgtcgaaaagggtagtactttcccttacggtaataacttgataggatgagtagtatcccagggaaaaatcgacggttttaagccgttcgtcgtttacggtcagccccgccatgccgatatcgctttcaccgctcgccacgcttggaatgattgcctcgaaatccatatctttgacaaataaagttttgccgagcttcgtcgctattttcgaggcgatctcaatgtccacccctttgaatttgttaccttcaaaatattcgaagggaggaaaataggcattggtcgctacgaccaggtcgcccgtttggggagagctgcttttattttcataggtgaatgtcgccgtaccgtcgaaataggaattgatcagcgtttcaaggcttccgtcgtctcccatctcgtccaaaatagcgtttatcgatgttttgaattcggtattgccttttttgacggcaaacgcatagtcttccgccgtcagttcgagctctttgaaaactttcacgttttccgatctgtccgcgcaggaagcgaacgcgaagcagccgaaaatcgccgccgaggccaacattacgctaagtgtctttttcatgattatatctccttatggtcgggctaaattattttcatcgtatatcactccatagtttataacatctttatgtatttgtcaaatatttttgcataaaaaagtgaaaatattctgataaaacttaaaaataatgtataaatgcatgaatagtgtgcataaagcttataacgtgtataaagaaaaggggtgacgcgggagaagtcccgcggttcaaagttaagttaaggagaaggatgaaaaaagttgaaaggtctgtgggaggttttagtcgcggggctgctatccgtatcgtttatagcgtgcgtcttttggaaagagacgtcggaagagttttccggcgaggcagaaattcctcgcggcgtaaacgcgacgctgaaattggacgggaggcggccgcagaaattgccgaggggaaaaaacaagatttatttttagaaaatctgtaaaaaggagcgagcttggacggtcgctctttttttgtacgaaaaaagtcgggttttatcgattattgagaaataattttacagggatttctataaaaaattgacaaacccgattattcgtgatgcaatgtattatggaaatgtgcggggccgaaaagaggcgtgggcacgggaggtctggaaagagtatgaacattgcagaattttaccaaagtctcggggtcaacgtaaacgacgtattaaatcggttgagaaatgaaggtttgatcaaaaaatatttgttgaaatttgcggaggacagttctttttccgagcttgaaaaggcgatctccgagaaaaattatcaaaatgcttttcgtgccgcccatacgatcaaaggaatatgcttaaatttggaattgaggtcgttgtcgggcccttccgtcgagcttacggagcttttgcgtagcggagcgcctcaagaagatatcctggtaaatgcttttcgggaatttgcggctgtttatcgtgacgtcgtagaaaaattggcggaactgaaataattacgaaacgggaagcggatatggaaaacagtaagaaaaaagtactcatcaccgacgattcggaaataaacagatcaattctttccgatatgctcggcgaggaatttgaaattatagaggcggaaaacggcatcgaagccatctccgtattgcagacctataacgccgaaatcgctctggtgctgctcgatatcgtcatgcccgaaatggacggcttcgaggtgctggcggtcatgaacaaaaatcattggatcgaggacattcccgtcatcatgatcaccgccgaaaatgcgcctttttacgtggagcgagcgtacgatctcggcgtctcagatctgtcgctggcatcacgaacgttacgacggaaaagggtatcccgacggcctcgtcggagacgaaatccccatttccgcgcaggtggtggctttgacggacgtctatgacgcgcttaccagccgtcgggtctataaagaggccgtaggcgtctttacggaggatccgaccttcgacgtggtgctgatggatattcagatgccggttatgaacggcctagaggcaaccaaagtaattcgtggactcaatgtgccgtcggcacagacggttcccataatcgccatgacggcaaattcctttaaggaggataccgaagcggcgatggccgcgggaatgaattattttattcccaagccgatcgatatcaacgttctgtattcggcgctggcgcaggcaatcccaaaaaggaaaaattaaagcggaaaatcgggctgaaaaagcagcccggtttttcttttttccatgatagaaaatcgataaaaatattttgctttttctccctttaagacgttgcaaagcgaaggacattatgatataataggggcaattaaaaaatgattatataatacgcgatcggggagagaaaattgaagggaaatttgccgcagaaaaacgaaaaaaaatacagcgtcggggatatcgtcagcttctccgttatcgttcttttatgtgcggccatggcggtgttggattttgtcaaaatccgctatacttccgacgcggtcaacaacgagcttatttcggataccgttccgctcgcggtgggcagcatagcggtgatctggctgatgatgcgcggcaaaacccgacttttcggccgtcccgcccatcttttgtatctccttcccgccttgcttgtcgccgtgaacaattttccctttcattcgcattttacgggcaaaacggagctgcttcataccggcgcggataattggatattatttgctttatactgtgcctttgtgggaattttcgaggaatgcgtttttcgcggtattctttttccgctgatggcgggcagtttttccgacgacaaaaaaggactttggaaaacctttcttttttcctctctcgcgttcggcggcatgcacctgttcaatatttttgcggggggcggcgtgggcccgtccattcttcaggccgggtattccaccctcatcggcgggttgtgcgcttatgtgctcatgaagacgaaaaatattctgctttgcgcacttatacacgggggatacgattttgcggggttgctgcttcccaaattgggcggcggggcggtgttcgattggcagaccatggccatcatggcggtggtgggcgtcgccgtcggattgtttgttttgtatgcggtttggaaatattccgacgaggaacgcatagaattatatgaaaaactcggcttcggcgccgcttcgtcgaaaaagaacgacctgccttccgaagaacgagagaagtagaaaaagtttgcgaaaatattttttcgtaaaaatttaatagaaaactgtaagagagagtttatcatgcagaaaaaagaaaaggagcctcccgcggaaaagccgcgtggagcagaaaaacctgacaaagacaccgaacgcctggaacgggaacgcttaaagaaaatcaacaagcttcccgattacgaggctctgttccgggaggacgggcgcggaaaacgcgggggcggaggatttctgaaaaagattttccgcaaggatcgttggcgtcttgtttattcgtcgttgatctacatactcaaggcttctccgatatggattatgccgctcgtcacgggcgacgtcattgatatgattaccttgagacccgaaggttttatttctcgtatcttgatcgacgctgtcatattcgccgtcatgctgattcagaatgttcccacgcatatgtggaatgcgtcgatcaacgataaaatgatccgaaatacctcggcgggcataaaaagcagcgtgatccgtaagctgcagcgtctgtccattacctatcataaggaaatggagggcggcaaaattcagtcgaaatttttgagggatatcgacagcgtggatatgtactaccgcaacgtcgttcaggtagtgattcccaacgtcatcggcgcggtgatctccgtgggaatagctctctgtaaaagtcctttggtgacgatttttttcgttgcgattgttccgctgaacgttattaacactatgcttttccgcaaaaaaatgcgcgtcaccaattcggcgttccggcaggaaaacgaaaaaatgtcttccaagcttatgacaatgcttcagatgcttacccttaccaaatcgcacggactcgaaacggtggagacggtggagatgcagaaacgcatcgattcggtgacgcaggcggggctgaagctcgacaaaacaaacgcctattttggttcgcttacgtgggtcatcagcaaccttttaagcggcttgtgccttttcttctgcgtatttctggcaattaaaaacattatttcggtcggcgaagtgatgctgtttcaatccctgttcggttcgataaacggctccgttcttactttgatcaacgcctatcccgctctcatgtcgggacgggagtcggtcggctccctttcggaaatcatgcgcgcggaggatatggaagcctcgggcggaaacagagtgcttcccgcgatcgacggacaggtggatttcgataacgtttcctaccgttatcccgacggcgacaaggacgtcattaaggatttcaatctccatgtctcttcgggcgaatgtatcgccgtggtgggctcgtcgggttcggggaagagtacaatcatcaatcttctgatcgggcttttggagcctacgcagggacatattctcgtggacggcgtgccgctcgacgagatctcccgtcagacttatcggcatttcatttcggttgtaccccaaaacagtattctattttcgggcaccatacgggaaaatattacctacggactgaataattacagcgaggaagagcttcagaaagcggtggcggacgcggatatttccgaatttttgccgtcgcttccgggcggcctcgacgcgcaggtgggcgagcacggcgacaagctttcgggcgggcagaaacagcgtatctgcattgcccgcgcgctcatccgcaacccgcgtatccttattatggacgaggcgacctccgcgctcgataacgtggcggaatatcatgttcaaaaggccgtaaaccgtcttgtaaaagcgcgtacgacgtttatcgtggcgcatagactttccacgatacgcaacgccgacaggatcgtggtgatggaaaacggcatagcggtggagatcggttcgtatgaggagctgatgcagaggggcggaaggttctgcgagctggagcggctgagccgtatccgcgaggagagcgtctccgaaggttgaagaaaaatcgagaaaaaggcctcgtcggatttatgcgaggcctttttaaaaagcgaaatttgctcaatgaaagaaaccaactaacattgtgaaaaattttccgttttgttaaaatcaccgttgacaaaaatataaaggattgttataatagtgacatgaataaagatacgataatgtcattgataaaaaatcctccttcggaatatcgcgcgaagcccttttggtcctggaacggaaaactggaccgggaggagcttttaagacaggtggaagtcctgcacgggatggggttcggaggctttttcatgcattcgcgcacgggactccggacggaatatctcggcgaggaatggtttgaatgcgtccgcgcgtgcgcgcttaaagcgaaagaatttggaatggaggcctggctttacgacgaggatcgctggccgagcggtacctgcggaggcgaagtcacgcgggagaggaaaaaccgcctgcggttcgtttccctttacgatacggacgcggatgcgcttgcctgtcccgaagcggcgggtattctcgcgcgttacgccgttttgttcgaaaaggataataagggagaaaagcgactgatcgactgttattccgtaacggcggactccgaggtaaaagaggggtacgaatacgccgtatttgccgaagaggaacaggcgtgcgaggaattttataacggttttacctacatagacgcgatgaaccgcgaggtcaccgaactgtttttgaaaagcacgcacgagaaatacgcacagtgctgcggggatctcttcggaagcgtcatcaaaggcatatttacggatgagcctcaccgcggcgcgctgtttaacggattcgggatcaataatgccaaccgcgcccgcatggctccctatacggcggccctgcccgaagcatatcggaagaaatacggggaagaactctgtttcccgcttctttattggcggaaaaagggagaggacttcaatatcgccgcaagcgcgtacgtggacgtcatggacgacctgtttacgcagaatttcgccaagccctgccgcgattggtgcgccgcgcacggccttattttgacgggacatatcctgcatgaggataacctcagtattcagacgagtatgacgggctcctgtatgcgttattacgaatatatggattatcccgggatcgacgtgctgggagagaataccgatatttattgggccgcgaagcagtgctcctccgtggcgagacagctcgggaaaaagtttgttttaagcgaactttacggcgcgacgggctgggatatgacgctcgaccgatataaaaaatcgggcgattggcaggcgctgttcgggatcagcctgcgttgtcctcatttaagctggtacactatgaagggagaggcgaagcgggactatcccgcaagtattttgcatcagctctctttttataaggaatggaaatcgcttgaggactatttcgcgcggcttgccgtccttaattcggagggaacccgtatctgcgatacgttggttttaacgccgatgcgggaaatgtggggcaaggtgcgcatggggtggatgaatattttcacgcccaacgattccgatatttccgatctcgacgccgcctatatcgaggatttcaaaacgctgacggaacgggggatcgatttcgattacggcgacgaggaaattttgcgcaaatacgggaaagtcgtgaaagagaacggaaaggcctatttgcaggtggggcggatcagatattccgaaatcctgtgggaacgccgcggacggatcggcggagagacgcgcaggcttttggataaatttgttgcggccggcggaaagctggtgggagagatcgaaaagctgtcgcccgaatttcgcataaaggcccccgtcggtacgggatacgccgcgtatgagctgggcggggatatctggctgtttttgctcaatctcgataaagaaaagggaactgcgggcgcgttagagctgcccgaaaagctgaaaggctattgcgcggagaagtggaatttccgcgacggaaagagcgagggaaaaaccgaaatttcggagacgacggccggccgcacaatcagtatatcgcttgtcggcggcgaggaatgtattttccgctttacgaaagatgccgtcaaacataccgaatgcaaggaatatccgctcgctgtgctacctgaggaattcgactatcgtctgaccgagccgaacgttctgccgctcgattgcgcgatatgggaaacggacggcgtttgtatggacggcggtaaggaaaaggacgtactgctgatcgatcgtatcatccgctgggaaaggggcgcgggactgcgcggcggcgcaatgctccagccctggtttgtcgaaaaatacggcggacaggcggagaaaaaattgtgccgccttaagctgacgttttctttcgaagcggaaatcgtgcctcaaaagatatatcttgccaaagagagcggaaagctcgattgttttgtcaacggcagagcgttgggcgaaaagtgcgatctctattgggtggaccgctgtttcgacgtgtatccgatagagatcgggacaggtaaaaacgaaattgtgctcgaaggagatttttgcgcggacgacgggctcgaggctgtctatctgataggagaattcggggtaaaaatgccgcgtacgctgacggctttgccgaagaaactcaaggcgggagatatcgctccgcagggcttcccgcattatacgggcgcgatagagtattatacggggattcgttcgggagattatacgctcgctttcgaaaagctcggttgcgctgtgatgaatgtttgcggcggaaaagaaaaaaagacgctggctttcgcaccctatgcgacgcaggtgagcttaagggacgaattggtgctgaagcttgcgtttcctcgcagaaatacgtttgggcccctctatcagccctatccgcaggcttgttacggccccgaaagctttctttgcgacggcgaatggcgggtagagtataagccgattccccagggcctgtatcggtaaacgaaaaaagcggcgattcggcgcaagacgccttcgcccgataaaaaaggagaaatatgaaacattcttatacggtatgcctcccgtgtgctgtcatagacgaagcaaaagcggaaggcacggaaaagcttctggacgaaaaacctttacagatcatgcttgtcgaaaattcgattacgacgatcggcgacggcggccacgtcattctcgattttgggagagaaatagcgggcggcatacgtattttggttcatcaagccgcgcttacggctcaaatgcggcttcggctgggcgaatctgtgggcgaatgctgcgccgagcttggagaaaagaatagtcaaaacgcgcacgcttaccgcgatttgaccgtacctgtgataagcctttccgattcagccttctttgacagcgggtttcgctttctgcgtatagatgtcgtcgggggagaaataagcttaaaaagcgtggtggcagaggttttggattccgaagtgaatattcaaggctctttcgagtgttccgatcctcttttgaacgatatttatgcgacggcggcaagaacggtagagctgtgcgtgcgtcgcggtgtgttatgggacggtatcaagcgcgacaggcttgtatggatcggggacatttatcccgaattgttgtctttggaaaatctcacggacgatttgtcgcccgttgtccgttcgctcgatctcgtaaaagaccagacgcccgccgatcaatggatgaacgggattcccatgtattcgatgtggtggatgattattctccgagagtattatcgtcggactggagacgtcagatatctcgccgcacaaaaggaatatatcgacggattgctgcgttcgatcgacgcctatgtctccgaggacggaaatactcatttcaaatctaatcttgtcgattggccgacgcacgacactcccgacgagccggcaggcgtccacatgatcgccgtagcggccatagacgccgcgaaggaaattatggagtatctcggggccgatgcgacgctttgcgaaaagatatcgaaaaagctgtcggcccgcgaatttgaggtggaagaaaagaaacagatcatcgctttgaaagattttgcgctcggaaacataacggataccgaaaaagagaagctgttaacgggcggcgcaaagggtatgagcacgtttatgagttattttcttttatccgcaatcgatcgtgcttcggatacctcccgcgcgctggagatcgccaaagaatattacggcggtatgctgaagatgggcgcaactactttttgggaagatttcgacatcgattggatgcaggaggccgctcctttgacgaggctgcccgaagaaggtgaaaaggatatccatggagatttcggggcgtactgctatctgggatatcgtcacagcttttgccacggctggtcctcgggagtattgccgtatcttgtagaacgggtgctcggcgtcaaagtggaaaacggaggagataccgtccgtgtttccccctcgcttggcggactgacgtgggtgaaaggcgatgttccgcttaaaaaaggcgttttgcatatagaaatagaggacggcaaaatgaaagtaaaggtgccttacggagtcaaattgatctgcgggcgtatcataaggtaatcattgaaaaaatgacgtaaaatcggacctttttcttagaaaaaggtccgattttttgcttgtaggggagaagctttgataaaacggcggaaaggcacgtattatgtcatacataataattatgtctggcgtaatacattgaaaaacggccgtttatgtcacgcataataattgtgcgtgtcgtagtacgttgacagatatagtaattatgtctgacatagatcaagggcggatttataaaaatctgtctagatcgacataatttattgacaaagaaaggaaattgtaataaaatataaccgttgcgctaaaagaatgcggagccgtattcaaaggaaaacaaagcgggaaaatccgggctgaatttcgagacgcttgtaagaggtaaaaatggattttttattgacgttgacatcggtgggcatactgttgctttatgccgttcccggatttattttatcaaagctcaaggctgtgaatacggattcgttgcctgcgttttctaaagtattgatgtatgtctgtcaaccgtgtttaacgttatatacttttgacagcgtcgattttacctggccgctctttagggatatgctgtggttcctgttggcgattactgtggtgcagctgatgacgatagggactttttatttattgttccgtaagaaacagcaggacgtcagatatcgcatatataccgttgcgagtaccttcggcaactgtgcctttttcggggtgccaatcctggaagctctgctgccgggaacaaacgccgtcgtcttttctaacatgtattttgtctccatgagcctattggggtggaccgtggcttcggcgattattactcacgacaggaaatatatttccgtcaaaaagattgtctttaatcccgccgttatcattatgaccgtggctctgcctttatttatgctgaatataaaacttcccggacagctttacggtgcggtttccattgtcggaaaaatgactacgccgctgtgtatgatcattatgggaatccgtttgggaagcatgagctttaagaaaatatttgcgggaaaactgcaatatttaattattcttgtaaagcagatgatttttccgcttttggcgctcggcgtcgcctgtcttcttccctgggagggatacatcagacaggccatgtttattatggcctgttgtcccgtcgcgagcgtcgtgcttaattttgcggaattgctgggggaagggcaggaggacgctgcaaatatgcttctgctcggcacgatgctgtgtatcgtcacgatgcccgttatgcttctgatcctatagaaattcctcaaaaagatttgagcttatcaaacgaattgtaaagaaaccgcctcctccgaaaagaatatcggagaaagcggttttgttatatttcaggaaaacgattaacctgcgagtacgttgttccacattttgttcgcgcggctgttggcgtcgctgtcgaagtaattcataataacgcaacgctttaaggtttcttcgtcggggtactgcgcgaaaagctggcgggtcagctgttccttatctgccgtaattttatgtccgtccccaaagaaataactgagatcgtattcaacggtatcctcgctttgtgcggcatacgtttcttcgatatattcaaatatcgtttcatttgcgatacagctggtataattgatataatacatgtttcggataacgttttccggcttcgagaggaaattgacgaacatggtggcggcttccacattggctcctttctgcattacccatccgtcaaaccaaagattggacgccgcttcgggcacgcaataatcataacgtaaatcgttgtcctccgcctcgttcatgatatatacggcgtcgccgctccattgataggaaatatcgatttgtccggaaaacacgggagccttttcgtctgtttcaaagccccagaagcttttgttggttttatcgttcattttgcttttgagaagcgcttcgacggccttcatggtttctgcgtcggtgtcgttcatcttttgggataaagcggtttggtactgttcgagagtaatcgttcccgcctcaagctgtcctttcagagccagtaattcctgctcataatacatgccgagaccttcgaaataagagtcgcggacattttctttcgcggaaatgatatggcccttatcgtaagcataccaggttttaacttcttcgggctcgacttttgcccggttaaaggtaaaacctgtcgtaccccacatatagcccgccgcgtaatcgctccaagaggagccgtctgtcgtctttccgttatcgaaaatatttttgatatacggagaaacgtttttcgcatagtaattggtctcgatcgaagtgtcgaaaaatgattcgggatatttttcaagtaaattttccgccgccattttcataatcatatattcggaagggcagaggagatcgtacgtgtttttggtgatatcaagtttggtgtacatgttttcgttgtcctgcatgggaatataatccacccggatttttttacccgtttgctcgtaataccaatcttcaaactctttatcgaggcttttacttcccttgacgtagctgtcgtctccgcccatatcgatataatccacccaactggcaactttcagtacggggcgggtatcgcacgcggccatagataatgcggaaaccgagagaagagaaagagaaagaactgtggaaataatttttttcattgttttttgctccttgattttttataagaaattatatttgtgctgacaagcacaattacgataattaagaaaataatagcggtaaaagcccaataggaagctttggtctttgtgcctgcggtgtttgctctcaaattgtagatatgagtgctgatggtttgaaacgtgtcgggcttggtgtagtcggctatgacgaaatcatccaaagaaagggtgacggcaaggagaaagccagaaataatgcccggcagtatctgagggataacgacggaaaaaagcgcttttctcggcgacgcccctaaatccaaggccgcttcgtataaattggggtccatctgttccaattttggtataacggataaaattacgaacggggtacatagtaccatttgtcccaaaacgagaggaataaaagtgtttctatctattcccaaaattgctataagcagcgcgagggaaatagccgttaccacatcggcgtttatgacgggaatttgatttatccctgtcagtatcgaggaggtccgttttttacaatagaaaatccctatagcgcctatggttccgaatacggtggaaagggtggctaccactgccgacaggatcagcgtatttatgacgatctgcagcggggcgttgtcaaaattgaaaaaaaacttatagtgatcaaggctgaagcctttccatatctgaatattgtcgctcgcgttaaagctattgaacgaaagaaaaacgatagggagatagataaatagaatgacaagtccgataaaaaaccatttcaaaatacattttgctgttttcataaaacggcacctctcgtgttcgtcttcgattcggccttaaatccgcccgtcagccatgtgatcagaaacataagaagcaacaggatcaacgcggttaccgatccgtacccccagtctcccgagaaaaaatacttttcgataaaagagccaataatagttatttttccgtttgtcatccatttggaaacgacataattggacatggacggaaggaaaaccatcgtgcagccgctgacgattcccgattttgaaaggggcagagtgactttcataaacgtttttgcgcccgtggctccgaggtctcgcgctgcctccagataactgttgtctatctttataagcgtcgtataaataggcaaaaccataaaggggagaaagtcgtacaccatgcccaaaatggtattgaacatattccattccgatttgttataaataccgatccagtccagcagttcccgcaacgcatttatacgcaatacaaaatttatccacatgggaacgacaaacaaaagcagcagcaccgatttggttttcaatctgcaattggctatgatataagcgactggataagcgataaagagacagacgatagtactgactgtcgaaataaagaggcttcgcccgattgtcttgcaggtgctggaggtaaaaaatccgataagaccttccccgttgctgctgaaaaattcgcggaagtttttcaaggtaaagcttccgtttccgtcggtaaaggcataataaacgataatgagaaggggaatcaatacaaatagaaacagaaataatccgtaggggatcgccagaagcttgcgcgaaaaatgcggtttggtttttgtcattttttgctttcctccggatttttcagcgtcagtttgattttatccttggggatgatcaggctgacgtaatcgttttcgttccagagatcctcgcaggcgaggacataatcttcttcgttttctgttcggacaatgtagcggtaatattcgcttttatagataagggagatgatatttccgcgcgcgccgccggcttcgggatcgtcgctcatcgtaatgtcgtggagccctacttcgacgttgacctccgtatccgtgaggtcgagcttttctcccttcgccgtaatcagataaccttcctcgtcgagatgactgcccggataaagctgggtgacgtcgcattcgaattcgccgtcgccgaattccacggtattctttttggtgacgacgcccgtaaactgattgacgcggaataattttttcatgacgtgaattccgtcgggggcaattgcaagcccgatcgtgtcgcccaagcggggcgcggcggtgctttggatttcgatctcgtatcttccgcattgcacgagaatctgatagtgaatgcccttaaaaataacggaggttacttttcccgccagcgtgccttgtcccgcaggcacgatctttacgtcctcggggcggacgacgacatctacaggctcgtctttttcaaagccgccgtcctcgcatacgaaagatttgccgcagaagcgcacgagataatctttgggcatggttcccgagaagatattgctttcgccgataaagtcggcgacaaaagtatttttcggctcgttatagatcatttcgggcgtaccgatctgctgaatatagccgtccgccataacgacgatcgtatccgacatcgtcagcgcttcttcctggtcgtgcgtaacgtaaataaaggtgatgcccagccgtttgtgcatggctttgagctctaactgcatttcctttctcattttgagatcgagcgctccgagcggctcgtcgagaaggagaatttcaggctcgttgacgatggcgcgggcgatggcgatacgttgctgctgtccgcccgaaagggtggaaatgctccgtttttcaaagccctcgagatcgacgacttcaagcgctttttttactctttccgcgatctccgctttagaaagctttatatatttttcaaccgtgtttccctttttatcgacatacgtagtgctcactcttttaagcttaagcccaaaggccacgttttcaaaaacattgaggtgcgggaaaagcgcgtatttctggaaaacggtattcacgggcctctggttgggcgggagactgctgatatcctggccgttgagaagaatttttccgctcgtgggcatttcgaagcccgcgatcatgcgcagggtagtggtttttccgcagccggaggggccgagaaaggtgacaaattcgcctttgcggacatacaggttcatattgtcgatgacgcttacgccgtcaaattccttgcagacatctaccagctcgataatattggtcgcatttttttccataagtgttctccaaaaacagcgcggtttttattaaaaaaatcaaaagttgggaggtgtggaaatccaaagaaattttgcttttcccttgcccttgttcaaaatggaatggggctttcccgccgaataataaaaagcttcgccctttttacatatatattgtttattgcccaatacgacggcgattcttccctccagcacgtagccgaattcctcgccctcgtgcgggatatcgcccgaggtggaaacgccttccgccagctccacgagaacgggttccatcatatttttctgcgcgttgggaatcagccatttccaaagtacgccgtccgcatctttttcaaagtattcttcttttccaaatatgactttttcttttgcttcttccctgaaaaattccgaaagattactgccgagcgccgacagaatatcggtgagggtagcgatagaagggctgtttaagtcgttttccagctgggaaatatatcccttggtgagctcgcaccgatcggcgagttcttcctgcgtcaatcccttttgattgcgcatttgtttgatttttccgcctaactccaaggttcctctccttatccgtttttttgtccgtcggttttgtaaaagtaaacttttttctttgtaaaaacaatccgcggcggcggtttgttaataataaacgaaaagtttagttaaaataaactcacgcactgccgataattatattgtaaagagaaaaatttgtcaaacgtttgaaggcggtttttacaatattttcataaaaattttttcgcggggcggcagggggccgttttttaggaaaaaacaaaaataaaacacgaaaaaaaggtctaccgaatggcagaccttcatattcataattaaagttaagtacaattttccttcgattacgcttccatcgcgttcagcttctttgcaagcttcgctttcttgttggcggcgttattcttatgaaggattcccttggaagcggccgagtcgattgcggaaacggtttcgggataaagcttcgtcgcctcttccttatttccggctgtgacggcggcaaggaatttcttgatctgcgtcttgagtgcggactttacggctttgttgactgcggttttcttctcgataaccaaaactctcttttttgcggatttaatattaggcatgatgatctccttattttttcctgtttttcttaaatagatttcgtttgcatggattattttagcataaataatcgggcttgtaaactgtttttgaggtgtttcttccgaaaatcggcaaattttcggaaaattttttgtttcgggaggataatatggatattcccggcgggggcgtcggttttttcgacagcggcataggagggctgaccgtacttaagtcctgtcttaatgtctgcggcggcctgcccgtctattattatggggacgacaaacgcgcgccttacggaaacctgccgcccgaaacgatccgcgaatacgcccgggatgccttcgggcttttcggcaagctccgcgtaaaagccgccgtcattgcctgcaatacggtgacggcggtgtgcgccgacgaattccgcaggtcttttcccttcccggtcatcggggcggaacccgccgtatttcccgctgcgaaaaaggggggacggatctttatacttgccacgcgggccacggttgagagcgaaagatttcaaaggctctgtctccgcgccatggaaaaatatccgcaggcagagctttgcgcctatgcatgcgatggattggcgggggcggtggagaagcatctcttttccggcgagggttacgatttcgcttccttttttccgaaagggaagcccgatgccgtggtgctggggtgtacgcattatatattcttaaaggaaaaggcggaaatattttacggctgtcccgtctatgacggcaacgaggggatttcccgccgcctcgccgacattttggcattggaaacggaaaaagcttaccccttggcattgaaaacggaaaaaattgactccctttggccacccgtgaccacagattctgattttttatgtttgccgaccacctttgcccccgttttgcccctcgaaacgggcagtctcgaggaaaagaaaaaaaacataaaagcgaacacttgttcgcgtggctttttgaaaaatcgggaaaattgccccgaaaaaaggggtttttctcgcgtttttttcctcggaagcggaaaaatcaccgataaaagggtatgcgaacaaatgttcgatataaaaaataggggtaatatttagaaatgtggtcatcaatcccaaaattttactcttttttttgaaaaatttgcaaaaaaaacttgacaaggggcaagaatggttatataatagagacaagttactaaatataaaagggggaggtgaagatatggccaatatgttttgtggaatttacgaacatcagctggacgacaaaggtcggctgcggattcccgcaaagttcaaaaaaggcctgacgggcgagcacaacgaaaagacgtacagctttacccgcggcatgaacggctgtatctacgtctttcccgacgaagtgcttgaggagaccgtcgaggagctttcggaagaacggctgggcgaatcctccaaggcgtccctgttgttcttcagctcgatattttcggcggaagaggacggacaggggagggtagtgcttccttccaggctccgcgaaatcgcggggatcaaaaaggacgtcgtca

SEQ ID NO: 848 - DNA, 7821 bp, Unknown
  16S sequences of unknown bacteria
ggcgggaactcccgccgcagtatctccggacggctggccgccgttatccggccgggcagatatgcccaatgagtgaaaccacggagtggaaccgtgctgtccggcacctccgatatggcggccgcgccatgtcgggggttttgttgttttagatggacgggatggtatatgaccactcaaatccgcagggccgcagctccttactgcatgggggagggggtgtcctcgccggtttatgaaaaaggaagccggtgggagcgtggttccccgaaccggtgatcgcatacaaaggacggcggctctggctcagccttatgagattgtctatcccaaatgcgggattccgggcggcggggccgcccaaagagagggggtatttagcatgtttgaccgcatgaaagaggatatcgcctgcatacgggaccgggatccggccgcccgttcggcgctggaagtgatgctgttatacaatggctataaggcggtgcggtcccatcggcgggcgaactggtgctatcggcacaacctgaaattcctggcccgctggatttcccagcgctgtgtgcgccgcaccaacatcgagatccatcccggcgccaccatcggccggcggctgttcatcgatcacggtaccggtgtggtcatcggggaaaccaccgtcattggagacgactgcaccatttatcagggagtaaccttgggcggcacgggaaaggataagggcaagcggcatccgacgctcggcaatcacgtgatggtgggctccggcgccaaagtgctcgggcctatcgagatcggtaacgacgtgcgcatcgcggcaggagctgtggtgctctcggatattccggaccattccaccgcggtgggtgtccccgcccgggtggtgcgccgcaatggtgccaaaatcgtggatctcgaccagatccacatacccgatccggtggcacaggagctctgccggctggaacaccagctcgatgtcctgcgccggcaggtcggccggctggagggccggacccaggatagccaaaacgaggaaatcacggaggaagcgccatgaaaatctacaacaccatgacccgtcagaaggaagaactcgtccccctggaacccggcgtagtcaaaatctacgcctgcggccccacggtctacaacttcatccatatcggcaacgcccgccccctgtgtgtgttcgatgttctgcgccgctatctggaatggcgggggtatgaggtgcgcttcgtccagaatttcaccgatatcgacgacaaaatcatccggcgcgccaatgaagagggcgtttcctacgatgtgatcgcacagcggtatattgaggagttctggaaggacgctaagggcctgggggtccgggaggccacaatccaccccaaggccaccgaaaacatggaggagatcctgtcgctgatcgggggcctggtcgaaaagggctacgcctaccgggccgcgaatggggacgtctatttccgcacacggaaagacgagcattacggcaagctctcccatcagcctatcgacgatctggaatcgggcgcccgcatcgggattggggaggaaaaggaggacgccctggatttcgccctgtggaaggcggcgaagccgggcgagccgtcctggccctctccctggggggagggccggccgggctggcatatcgagtgctcggccatggccagacggtatctcggtgaaaccatcgatatccactgcggcggccaggatctgattttcccccatcatgaaaacgaggttgcccagagcgaatgctgcaacggcgtcccttttgcccggtattggatgcacaatgggtatatcaacgtcgacaataagaagatgtccaaatccctcggcaacttcttcactgtccgggatgtggcggagcagatgggatatgagccgatccggttcttcctgatttcttcctcctaccgcagtcccatcaactacaacgccgagatcatcggccagggcaaggcggcgctcgaccggctctatacctgccgcagcgccctcgatgacgcggaagcgtccgcgccggagggggctgccgacgcggcctttgccgccaaatgcggggaacggcgggagcagtttatcgccgcgatggacgacgacctcaacaccgccgacgccatcgccgccctgttcgagctgaccaaggacatcaacgtcctcattgcctccggcgggccctccaaaggcacctgccgggctgcacgaaccttgttcggcgagctgtgcggggtgctggggctcctttacgatcgcaaggaggaggaactcgacgccgaaatcgaggctttgatcgcggcccgtactgcggcgcgccaaaacaagaattgggccgaggcggaccggatccgggacgaactgaaggcgcggaaaatcgtgctggaggataccccgcagggggtcaagtggcataaagcgtaagaaggggcgcgcggccggttcgggatctccccggactgccgccgccttgttttacgtttataagggaggatagaggatgtcggatattttattcaaaacggagggatatgtgttttcttaccgtgtggccggtatctgtataaagcacggccgggttctccttcaaaagccggcgaatgacgacggctttgcctttcccgggggccatgtcgcctttggcgaaacaaatgaggaaaccctgatacgcgaattccgtgaggaaatcggcgcggagatatcggtcggcgagctgaaatgggtgggggaactcttttttaggtggggtgacgtgccctgccatcagatctgcctgtattacctagtagcgattgaagacgaagagacatcgcaggatgacgtatttatgggccaagaacatctcgaggaaagaccgtttgagatggaatttcattgggttccacttgacatcgtgcatgatatcgccctctatccgtccaatatcgcacagtttctcggccgtcttggggaacccgtaaagcattttatctatcgggaatgacggctcagggattgcaaaccgctcggtttttctctatacttaaaaaaggactgttttttgatgagccaaaacaggacaggttgcatccggattttccgggcgcgcctcgaaaggatggacgatctgtatgaacatatcgcgtttcgccaaatccatcgcttatctggccgccgcggcgctgctgctgctcctgtcggtcatttttcaggtggggatgcatagtgagggcggccctgaggcaagctatttccgatccaatacgtttttgttcgttgtggcgatcggctgcatcggcaccggtgtatattcgtatatcggctatgtccgccgccatcgggagcacgcgctcgattcgctgttcctgctgctggtcgggctggccgtcctgatcgcctccatcctggtttttctcaatttcggcgggctggccggcacctttgacaaggcggggtatacggccgtcaatatcaacatcgtcgcgctcacgctcctgcccatcccctttctcatacgcggcctggtcctggccttttccacccgggaggacagccgcgcccgccgcctctccgtgcagctcgccgccctgctggtcaccgccggtttcctcctttcccttgccatgggcggaatgatgcgcacgatgcggtatgatccctcatctgtatccgacggatatggggagagcagcgaggaggaattttgggtttaaaagggtcgacagacattggcgcaaaaaaagcacttgaaatctatacgaaattggtatattatggacgtgaaccaagagccctgtatagacgggcaggaaaggacgggaaccgccatgtttgataaagtggaacaaatggccctgaaaattgaagggatgacctgcgggcactgccagaagcgggtggaggaggccctgaaggccgtaaaaggcgttaagggggtccaggtcagcctggtggggaaaacggcggagatccgttacgcggccggaaaaactgaccggcaggccttggtgaaggccgtgaccgatgccggctatacggtgacggactgaataggtggggaaggatcgcgatatggaagataagcgggataccggtgagatcgagctgcagatcggcgggatgacctgcgtgcggtgcgcgtccgcggtggaacatgccctcaaaggggtgccgggcgtggccggggccgaggtcagctacgccaatcagcgggccagggtgacgcttgccggcgaaggcgctgaacgacgcgccatcgagaaggcggtgagggccgccggctactccgtggtggaggacaaggcggctttccgtcagcgggaaatgcggcggctgacgggaatggtcatcgtttcggcggtgctgtccctgcccttcctgctcatgatggtgctgatgttcgccgcgccgcacgcgcatctgacccatctgctgcacaccggctggtggcagctcgtcgtctccacgccggtgcagttcatcatcggctggcggttttataaaggcgcgttcctgtccctgatgaaccgcagccccaacatggacgtgctcgtcgccctgggaaccacggcggcgtggggatacagcacctataacgttttgacgggcggtacccatctgtattttgaaagcgcggtgatcatcatcaccctgatcctgctcggcaagctgctggagacccgggcgaggggcaaaacttcggccgccattgagatgctgatgaacctgcagcccaaaaccgccaccgtgctgcgggacggccgggaagaggtcattgccgcggccgatatccggaaggacgaccgggtgctggtccacccgggtgagagtatctctgtcgacggagtggtcgaggacggccgttccgcggtggacgaatccatgctcacgggggaaagcatgcctgtggagaaggaagccggcgcgcaggtgttcggcgggacggtcaacgggacaggctctatgaccgtacgggcgaccggcgtggggcgggataccgtcctgtccggcattatcaagctggtcgaagaagcgcagtcctcgaaagcgccgatccaaaaactcgccgacagggtatcggccgtctttgtgcctgccgtcatcgtcatcgcgctgctaacctttggcctgaccttttggctgatgggctcggtggagacggcgatcacccgcgcggtggcggtgctggtcatcgcctgcccgtgttcgctggggctggccacccccaccgctctgatggtcgggaccggccgggccgcgaccatgggagtgctcatcaaaagcgccgacgcgctcgaaaccgcctgcaaaatcggggtggtcatctttgataagaccggcaccatcaccgaggggaaacccgcggtgaccgatatcgaaaccttcggttccttggaccgggataccctgctccgcctggctgcggccgccgaatcgcggtcggagcatccggttgcccgggctgtgacggagagcgttaagggtggtgtcctggaagagctgcctcagcccgagtcctttgagtccctgaccggacggggcatcgccgcccgggtggaggggcgcgatctgctcatcggttcccggcggctgatggaggaaaaagggatccccttcgccttttcccccgaagcatgggaacagcagggcaagaccgtcctgttcatcgcggtggatcatgaggcggcgggagccgccgccgtggccgatccggtccggaaaagctcggccccggcactgaaggacctgcaccggctcggcatccgcgccaaaatggtcaccggagacaaccgccggacggcggaggccatcgcggcccaggtcggcgtagacgaggtggtggccgaggtgctgccggaaggaaaggtcgaagcagtcgaacaggaaaagcaaaagggcctgaccgtggccatggcgggggatggtatcaatgacgcgccggccctggctgccgccgatgtggggtttgccatgggcagcggcaccgacatcgctatggagtcgggggacgtcgtgctggtaggctccggtgtcgtccccctggtgtctgcgatcaaattgtcccgggctacgatgcgcaaaatccggcaaaatctgttctgggcctttttctacaactgcatcgggatcccggtcgcggcgctcggtttcctgaatccgatcgtcgccggagcggccatggcgttcagctcggtatcggtggtgaccaactccatgctgctcaaaaaatccaggctgtgagcgttgctccggcccctacataggaagtgaacgcgcatgatgtacgatatcctgatcgtcggcggcggaccggcagggctgtccgccgccgtcaacgccgccgccagagggaaacgctgcgccgtgctctccaacgactaccggatgaacccgctgttccgttctgaaaaaatcgacaattacctcggtatgcggggcttgtcgggagagcagatgctccgcgcgatgcgccgcgaggcggaagaggcgggagcggcgttcgtcatgggacgggtgacctcgattttgccgatgggggattcgtttgccgccgccatggggaacgaggtggccgaggggaaacgcctgatcctcgctaccggagccaaaaccgggacggccctgcccggggaagagcggttcatgggccgcggtgtgagcacctgcgcgacctgtgacgggatgctgtaccgcgggaagcgggcggtcgtgaccggcgacgccctcgatctggcggaggaggcccgttttctcaaaggcatcggtgtggatgtgaccgtcgtggccgcgccgccccaccggtcccggctcggtggcctgccgccggagatcccttcctttgtcggtaaacagccggttatcgagggggaagagcgcctggaagggttttccttcctgcccgtggatggagaggaccgccgccgtctcgactgcgacgtggtctttctcctgcggaaagtcgcggcaccggatgcgctggttcccggtctcgccctggagggaaaatacgtggccgtggaccgcgcgatgcgcaccaatattcccggcctgtacgcggcgggagactgcacggggctgcccttacagatcgccaaggctgtgggcgaggggctgattgcggcacaggatgccgcccgttccctgcgttaaaacggcaaaccggcggatattttgggccgcctttgcatataccatccataaacggagtcataggaaagaaggagtgttcaagatggcaaatgcaatccatttcgataaggaacagttcgagaccgcgctggcacagccgggcgtactgctcgtggacttctgggctggctggtgcatgccctgcaagatgctggccccggtcatcgaccggctggcagaggagtatgagggccgggttgtggtcggcaaggtcgacgtggacgcggaaccggaacttgcgggtcgctaccgtgtacagagtatcccgaacgtcgccattttccgggacggcgagctggtcagcaccctggtcggcgcccgcccttacgaggcgttcacggaggagctggagaagatcctggttccggcctgacggcattggaatgaactcgaaaaagccggacgctcaaagcgtccggctttttgcttcaatggggtttggttttcagcggtgacaggaatggccgcccactcccgaaccgcagccgtggtggtttccgcagtcgccgtcgtgatggtccccatgatggctgcagtgtacgtccggattgaaccggagctttccggccaggaaatcctccaccgcctggtccgcgctgccgacgacgcctccgaacaggcggatac

SEQ ID NO: 849 - DNA, 21780 bp, Unknown
  16S sequences of unknown bacteria
ttgaagattatatcctggttcttcctgataattgaatctgcatcccgcaccgcttattcttttgtggtgcttgtggcgctggtagcagaagcatggtcgatggcggccagagggtcgcccacttcggtttccgcagccacttccatgggagcgggggattcttcctccgggccttcctcttcccaaagggaatcgtgctctttccgtttggttctgtcggcgatgagggccatgttttttgcggtgagatacagcttgtcgctgtattccatcagccgtttttcgtcctggggcggcactttatcccccttggagatgcgccggaaggtttccaggatcttcagcagatcttcggcggcctcggtcagcgcttcgctttgctgccgggccacttcggcattggcgatggcaccatacatctgatccatttcgtccattacgccctgggtttgctggtattcctcattgatcgacttcagttcccgggagatctccacccggtcaaaattgccgctggtgtcctgtttcagcatattttccagctggtttttctgctgggacagggattgcaggtggaccgacgcgatttttcgcacttcacccaatttcatcagggaccctcctttctgcttcttgcctatatatgtaatatcggcaaagaaaggaaagggataaggggggaggaccggttgacagatggggtaagaaaaattatagtaataagtaaatcggttcaatggcaggtgaaaggatggaagggatagagcagaatatcataggtcggtggacgcttttgaatacactttcttttagcaatgccgtctttttttgcagcctgttttcggtggtgctctggctgctttgccggaaaacattctggatggtgcgcctggggctgaagcctttgtgcctgtttgtctttctggccgtgctgcgcctggtgtttcccattgagcttccgttcgtccagatcgtaggctcgcgaaagatattggtctgggtgcagcggggatttcgcatccgcattgcccagctgggaggacattccattgaaacaggggatgtgtttttgtttgtgtggctatggggggcggcgctgctgctggggcgcttcctttggcaatgggcccgccatggccgttttatggcccagtgcccctccattccccaggagatgatggagcaggtgcaaagctggattcccgggttccggggccaggtgcgcctggcagcagggcaagggacgccctatgtggtcggctttttccgcccggtgatcttcctgccggatgcagattataaagaagaggatctgcatctgatcctgctccatgaatggcagcatttccgcaaccgggaccagtggagcaaactgctttgctacctgctgtgctgcgtattctggtggaacccttttctgtggctgctcaagcgcaagatggatcagctgctggaactgcggtgcgatttttctgtgttggaaaaaatcgacacggtccagcaggacgactattacgaaatgctgctgggcacctatcgggcggcccgggaaaagcactccatgccggagggcatcgccgccctggctagctctcaccgccgcattattctccagcgttttcagatgggagaacatttctcttttatggaaaagcagagcaaggtggcgcggcgcattctgatgggcctgatggtggtgctttacatctgttcctatttgattattttccagccccagggatttccaccggccatggaagacggacataggatttacagtggcccgccggaagggagctatctcatccaccatgcggacggaacatattccgtctgttgggaagaggggcagattgttccgatcgaggatgcgaccgatgaatttttcgccgatctcccggtgcgggaagaaggggaaaagtaaacaaacaaaaatggcgcaggtccatggggggcctgcgccattttgattgcaagacagaggatcattcgtggcgatagatgtgcttgtccaaagcgaaaatacggccgctgaattggcccggcgagagctgctggaaggcctcccggtaaatttccatccggctgtcgatcagatcgatgtaggagagcagttcgctttcggcacacactggccggacagcagcgccgaattccggttcaccatggtgagaaaggatcatgtgctgcaaaagcagagatttctcctggggaatccccagttcttcggctgtccgggccacttcctgggcgcccatgaccagatggcccagcagttctccctgcaccgaatagccggtgaccaatcccagttgggaaaaggtgaactctgtttccttggaaaaatcatgaaggagggttccggccagcaacaggctgcggttcagcgtgtcggcataaagaccggccaggaaatccgcaatccggagcatctgccctgtgtgcatcagaaggccggagagaaaaccgtggtgcacgcttttggccgcagggatcttctggaaagcggcagtatgcttgcgcagcatggcctggcagatggcacggtagtccgggtcctggatggaagccacaaggttttccacctgttccagctcctgggctacatcgatgggggccactgggaccagagctttcaggtcatacacatcgttttccgatgcaaggcggatctgggagacggtgatctgaagagtgccccggtattccgagacctcgccccggatttttaccacttttccttcctctttgccgtcaatggggccggaatagtcccagaccttggcatcaatggagccggttttgtccgatagggaggcgctgagaaagggctttccggcggccgttgttttggggaatgcactttttaagatataaaacccctggacttcatcgcccacacccatttctccgatatatttgttgtattccattttgaagttcctttcccgcatcgctgcattgtttgccgctgtcttttgtgcagcctccagccggagaccctgggaaagaggggccggagggaagacagggcttctttcctataagagtagcagacagcctgccagatatcaagggccctgcggtttgaaaacggccgctggctttcggcgggctgtctttttgtgtcgtcgataatataaagataatatctatgtattggttataaaaataattacttttttatttttgacaatattcaaaatggtatgatacaatggctgtgtattcagaatatatcataaaaaagaaaggcgggaaaagagatgctgaaaaacaaacgactgcgtttggcgggactgattgcccttttggtggttcttctggccggaggagggggattgtttttctttttcagccgggaggaagagggaaaaacccagccgcccaagacccaggaggtggagacggcccccttggaaatgagctacaccctctcttcccatgagcggcccgtggaatactggctggacggcaccttgcttttctgggaggaccagctgatggtggtttccaaagatcaggtgctggactataccacccaccaacaggtagccactctgccccgggccatcgccgcttatgaggggctggaagagggggaaaaccggccgtcggccctctgtctgggagagaacggggagtggatcgtgctctatgccagagaggaacccggtgaggcctgggtgcagcgcttttcctgggaaggagaagcgggagaaagaatcaccctttccggtttggaggacctgtcttccattccggcggggcagccaggggaaggggtctatctgccggtgaacaaaatgcaatcctgggggaaaaagcttctgatccagggggaaaaagggaaaacagtgcaggtgtttgacgctggtggacagcggattgatacctgggaagcgttggatttttccgtaggcccccagggagatctgttccggctcttttccgctgagggagggcttcagctgtgccggttcagcggccagaccggggaaaaaatcttttccgcccctgtccagggcatccccacccagatctttaccggggaagaacaggcatggctgctggatgcttcgggcattcgggcctattcggcggagaacggagaagagggagaagaagtattcaacctggcgaagcacgcccaggccggtggtgcggtggccaattttgcgctgctttctgatgggtcagtgtgcctcaccactgccgcccaggaggggtatggcatggtggatacggtctaccggcctcagtggcaggcgcctcaggagatcacttcctccatcaccctcacagcaccctattatgattcctggatggccgaagccatccatcgatatatgcgggaaaatccaggccggcaggtggtgtatgattacacctatacctcctacaaggactatggctcccacgccgacagggaccagtatttcaccaagcagaacacccagattctggcgggagatgtgggggaccttttgtggatgggaggggagcagaccgatgtgtacagcatcagccgcaccgatctgttcgccgatctggctccgctgctggaagagagcggactggatgagaagctggccccggcggccctggaaggcagccgggtgggggaagagcagtttttcatccccctcaccggggcctattactgcgcccagctcaataccgcattggcaaaccggctggggctggagatcgggacggaaaccacctggggccagctgctggatatggtgccggttttggaggaaaaggccccggataccgtgctgtttcaggatgtatcccgccagcggctgctgatccgcatcctcatcagcaatatgcccgatctgatctccccggagaccggggaggtaaaccttcagcaggattggtttatccacttgctggaaaagctgaaagaggtatgggacagcccttgctttttccaggacggattcggcacccaggaaaagaatgtgatactgcacaccaatctgcgcactttgaatcaggcccccaaggacagcgctgcaaaatatcagaatgatggagaagccatcggcggggagatttcctacctgcctctgttctgcggggaaaagggcagcaaccgcacggccaccagcgcccagtttttgctcattccccgcagcagtggaaagcaggaggaagcctgggatttcctgtcctggctgctgtcagaagagtgccaggcttcccgggtcaactttaactatcccatggaaaaagaggcccgggagcaagtgctggagcaggcggccggaacggaagaaacaggccagcgctggaaaaacgacatggagcaggtgatggaggaagtggactgggtctttgatatgtacaagctgaaagaggacctgttcccgcccattgaaagctggctcaacggccaggaaaccttggaggaggcattggaggaggcccgctgggcgctctttatccggctgaacgaataaaaaaggattgcccttattctgagagtgtgataatattattttaaaaataatattatcacacaacagataggagggcgccggatgaaatggaacaggaaaagcaggattgtagggctgtgtgccctgctggtcgtgattctggcagggggtgggctgctgatctggaatttcgtcaggccggcagcgccgggaaaccctttgttggaggatcaaagaggggaatatgcaggggtgatccaggaggggcaaagctaccaggaagccctggttttagagcaaagctccactttgccggcccggtatatcctggaggacgccggacgcttatggatgctccaaacagggccccaggggatggagctacaggagattacaggagatggggtctggcccctgcaatcttctctggaaagctggctggaagaaggcgacattgtgacccgcctggcctttgatccaaagggatttctctgctgcatggcataccggcagcgggatggtcagggagaggtgcaggtggccaggatgcaggaagggcaggcagaacccttggaagtggtttcgctccatgggctggaaagcgccggaaaatccaaattcctggcagacgatacccgtttttatataggcggcaaaggggaggataccgggctgggaatgctgcagatcttccgccgggacggcacgatggaacagatcctgcccaatgtgaatgacttcgccctggatggggaaggagggctttatgttctccattgcgacgcccagggattgggagaaaatgtgaaaaaataccgggcagaaaccatggaagagacagagttttcagcggccattccccaggaaagaggcaaggcctcctgcatggctctggaaaaagaaaggggcgttttgtacctgggttcttctctgggggtggatatgctggatgccgccagcggggcctggatcggcaccgcgatggatgtggcccgcagcgctcccggtttgcaggatgctgcgctgatcagtatggcggtggatggggagcagaatatgtactgctatggagaaagcagcggcgaaggggtggggaggctctaccggtattccatccaaagcggccagagggaggacgaaccctataccctgacggtgacggccccttatcgggatgattactttatcaatgtgattacccagtttgagcaggagcatcccgggcaacgggtgcaatacgattacgcctacaacagccgccgagactttttgaattacagcgacaaggacggttactttgagcggatgaatatgcgtctgctggccggagatgtgggggacctggtggtgtttgaaagcgcttcctgggacatttaccacactttccagaaagatttgttcctggatctgggacagcacctggaagaaagcccggtttataaggagctgtaccgggaagtgatgcaggggctgacggtggaggggaaactccggggtgttcccctgtcgacagactattgttatatgcaggtcaacgagagcctgtgccaggaattggggatcgcattggactggagccaggccagctggagcgatgtgctccagctggaagagcagctccggggaaccgatgtctatctgttcagcatggtacaggactcccagagagcctttttccgtctgctgatcagcaatatgcccgatctgattgatctggaaaaacaaaaggtggatttgcagcaggattggtttttgcagctgattgcaaaatgggaagcggcatcccgcggggaaaatttcgcccggtttacccagcgggccggactgacagaggacgcccttctgtccatcgactggcgcacttcggatatgccgaacccggagtatgccgccagccaggcccagctttttgaagaggagaccgggatgcgcatggggtatgctcctctgccccgaggggagaaaggctctcattacaccgcatacagcacccggatttatgccatctctgctgcatcggagcagaaggacatggcctggagcctgatcgaaaccggcctgaaggcagaaatgcagatgaaaaattccttggattgctgtccggtcaatggaaaagcccaggaaaagcaaaaggagcggcagcgggaggacctggtgcgaagcggccaggaggacttttcgccccggctggaagaattgctgggggaactggatggggtctatcgcagggtggactgtctttatgatatgcaccatctgaaagaggatctggcttatccgcttttggactatttccagggtgggtcttctttgaaggaggccctggacaaggccgggaggaatttgtggatacggatcaacgaataaaaaaggagggatgggatcgtgaagcggggaggaaatcggggactgctttacattctgccgggctttgccgggttgtgcgtcttttatatcatcccctttgtcatcagtctgggctatgtctttgtcaggggaaacggggagacagggcgaggggggacggaaaacttcaaagatctgctggggaatccggcctttcagctggcggcaaaaaacactttggtttttaccctgatggccgtgccccttctcaccctgggagccctttttctggctatgtttctgggacagaagcaaagccccttggtgcaaagcgccctgttcacccctatgatcctgccggtggcctcggctctactgggctggcaggggatcttcggggcgggaggactgctgggaaagggtgtggaggccctgggcggcacaggggaaaattacctggaagatccctgggcccggtatgtgctgctgttccttttctttatcaagaacctggggtatatgacgctgattttcaccggcgccatcggcaatatgaaaaaggaataccgggaggcctttctgctggattccgattctttggtgaaatacaccttccgggtggccattcccattctggcgccggtactcttctttgtgatggtgctttccaccgtcaactgctttcagattttccgggaggtcagcgggctttatggcgattatcccccggaaagcctgtatatgctgcaaaatttcatgaacaacaattttgaaaagctgaattattcccagttgtgcaccgcctccttcctcctcaccatgggggtggccctgctggtgtctctctatctctgggcccagcaccggagtgaaaagggggagagcgggttatgaaacgaaaaattctgttggcgatattgctgtttttgtgtctgattccctttggcgtgacggtggtgggatcgctgcgggtggaaggccggtggagcctggcgcaatacggccagctgctgttgcagacgccccggttttttgaggggttctggaattcctttttctacacggccctgatccttctgttcaatgtgccgctgagcctggcggcggcttatggcttttcccggttccgcttcaagagccggtttcccttgttctggctctatatcctgatgatcctgctgcctttccaggccacagtggtgccccagtacctgaccctcaaggccttggggctgttgggcgggggtgggtcggtgatctggcccaatctgtttgccaccttcggcaccttcctcatggtgcagtatatgaagaactttgacagaaccctctacgaggcggcggagatcgacggcatggggagtttttccctgtttgtccgtttggtgctgccggtgtgccggcctacggcggtggccatggcggcgctgtcctttttcaacttctggtccctggtggagcagccgctgatgtttctggacagcccttcccagcagcctttgtcggtgatgctgagcaccggggcgttggaaggcgtggcctacgcagggggcgtggtgttcagtctgctgcccttgctgtgctatctgtccctcagccgggagatccaggccggggtggccggaggcgaggagaagccccatatcgggaaaaagcgaggccggggaaaagggtggtgcatcggttttgtggcggccatggcctttttgaccctcatgacacagaaggtcagcggcgtgatgggaaaccaggtggcggtgtataccctggggcggccggcgccggtgctgccgggacgggagatcgtggtgccccaaagctgcgtataccaggccggagggaaagatgtggtctatgtgctcatgccctcccactacgatccgcaaaagctccagacggtggaaatcccggtggaagtcatagaagaggaaaaaggctactgcgccctgtcggctgctctggaaaggggccagcagctggtgtgttatgcctcccggccggtgacggccggggaggaagcagtgatccggggggaggctttcgatgattagaaaatggggatgggggatgctttgcatccttgtgcttttctatttggtccacggcttgctgctgtggagatttttccggcaggaacctcgggtggaggtctatctggagggggagctgtcccaggcggctgttttgctggatgcttacgagccccggcaggaagaaggctgcctggtgatccaagggaaagaactgagcccttttacaaaaaacgaagtggaagatcgactggccgccggggggctcgacggctttgccatcaatgaccgcagtcaggcatggcgtctggctctccagagcctgaccctgtcctttttcctcctggccctgggcttgtttttcctgggttgcgtgtatctggtcaaggacatccaaaggctggtttccgctttccgtcgctggctggaggaagaatacttcctggaagtggtgaagcgggagggggaaaagctgctgatcggcctgatccgctgggtggttctgggctttttcctggtttttttagggatctggatggggaaggtctcctttttcctgccctttgaatggctgccgccccggtggatctgggatgtttcccactatctcagcctggaaagtctccatgtgggggagtccggctacgagctattgtgccggacatggcttccggtgttctactgtttcaccctgggtgaggggttttgcattctgggactggggatcgggctgggcctgagaaggaaaaaaggaaagaaggtggcctgatggcaggcgtgcggatggaaaagctgaataaagtctatcccaacggggtgcatgcggtgcgggactttaccctggaagtgggagagcgggagtttgtggtgctggtggggccctccgggtgcgggaaatccaccttgctgcgcatggtggccgggctggagagcatcacccaaggggagctttggatgggagagcggcagatcaaccaggtgcggcccaaggaccgggatctggccatggtctttcagaattatgccctgtatccccatatgacggtgtttgacaacatggccctgggtttgaagctgcgtcatgtgccaaaaaaacagatcagagaacgggtgggacaggcggcccggtggctggatgtagccgatctgctggagcggaaaccggggcagctttccggaggacagcagcagcgggtggctttgggacgggctatggtgcgccagcccagcctgtttcttctggatgagcctttgtccaatctggatgccaaaatgcgggggcagatgcgctaccagatcattcgcctccacaaggcgatgcagaaggccttcctctatgtgacccatgaccagaccgaggccatgaccatggccgaccggatcgtggtgatgcgggaaggggagatcatgcaggcagatactcccggaaacctctaccacaaaccggccaatttgtttgtggccggtttcatcggcacgccccagatgaatttctttgactgcaccctggaaaaccggggcgggatgctggccttggtgggggcgggcttttgctggtcgctggaagggagctccttttcttcccaggagctggagggctttgcaggaacagacctggtgttaggggtgcgctgctccgatgtgaagattagaaaagaaggctcccatggggccagggtggattttatggaggatatgggcggtgaaatactgctgcatctttcttttgtaggaggggaatttgtggcaaagattccgccggaggaaaagcccgacgctttggaggtggcctttgatttggatatgagtaaaattcatttgtttcataaacagacaggaaaggctttgaaacaggctatggtttcaaagttctgagtacacaaggaaaagattccctggtgagctttttgcttgccgggaaaatttttttaatttgtttcaggaaatttgaggaaaagtgaccaaaaccgccctttgccattgggatagagagtgaaaagaaaaaaccggcctctcggcctgagatgtgatctgttttgaagtgggccggcatcgtgtgtctgtccaggatgaacgcttggccgatgcgctttctcagctgtctgaagagaaaagagacatcattcttctggcttactttatgtgacccatgaccagaccgaggccatgataagccggcggttttgaccatatattaagtattaaattatggttatgaaggtttgatgaatgttctaaagttgttacggcccaggcggcccgcttccaaagggggggcaaaaagcatcattttggctgtgcaggggagcagggcattggaccaatatttcaaaatccagttgacttatacacccgatgctctggaaggcaatcgtctcacgctggcagaaacaaaaattctcttagaggatgggatctccccggtcggcagacaaatgggggattgaaatgaaaaaggagaggcaatccacaggatggcctctccttttcattagagtgtttgttttctgtggggcggcagtgcgctcatactccgcaggctgacacccagagtggaaaaattgtggagagcagccgatgtggcgggggacaggatcccagccagtccaagggcgatcagagcaccgttaaaaccgatgacaaagcggtaattggaatggatgcggtccatgagcgccatggcgatccggcgcagttccaccagctcccaaagactgtcggcagcgattgtgatgtctgcaatttcccgggcgatagcggcgccatcgctgatggcgatgccggcatccgcttcagacaaggccggggagtcgttgatgccatcgcccaccatcaggacggtatgcccctcttgacggagccgggccacatagtcggccttgtctgcgggaagcacctctgaacggaaatcgtccacctccacctgggcggcaatggccgcagcagtgcggtgactgtctccagtgagcatgactgtgttggaaattcccagcccacggagtgtggcgagcacttcttttgcctcctcacgcagcgggtcggaaatacagatcacggccgccagctgtccaccgactgccagatacaggtgggaatactccggcgaaagtgcatcaaagcgttcctgatcgccttccggaatctggcagtgctcatcctcaaatacaaagtggaagcttccgatgagcacccgctccccattgacagtgctggcaatgccgtgggcgaccaggtattctactttggagtgatattcctcatgggtcaggccgcggcgtctggcctcttccaccacggcattggccatagagtggggaaaatgctcttccagacaggccgccagccgcagcatctccttttcctccttatggccgaaggggatcacctgcgccactcggggacaagcatgcgttaaggtgccggtcttgtcaaatacgatggtgtcggcggcagctaccgcctccaggaacttaccgcccttaaccgtgatatgggaacggcctgcctcgcgcatagcggacaggacggccaagggcatggccagtttcagtgcgcaggagaagtccaccatcagcaccgaaagggctctggtgacattgcgggtgagagcaaagcccagcaggcttcctgcaaaggtatagggaaccagtttgtcggccagatgagcagccttgctttcggccgctgatttcatctgctccgattgttcgatcatgtggacgatctggtcatagcggctctggccggaggcttgtttgacctccagcaggcattcaccttcctccaccacggttccggcatacactgcgccgccggggcgcttggggatgggaatggattctccggtgagggaggcctgattgacggtaacttcgccctccagcaccaggccatccacaggaatgataccgccagcgcgcacaaccacagcatctccgggctgaatctgagatatgggcaccagcacctcaccctgagccgtgtgcagccagacccgatccacattcaacgacatacactgagccagatcggccacagattttttccgggtccattcctccagcagctcacccacttccagcaggaacataaccattccggccgtgccaaaatcctttcggcaagcggagatggagatggacaaggcgtccagcagttccaccttgatgcggcggtgcagcaggcagtgcagtccacgccgcaagaaaggaatcatgtgccaaaggatgcgggcaatccgaaggggcgatgggagaaacagcgtacaggccgccttgcagagaactttgcccaccagtttttcctcaaattcccgattgagccttcgactgctgtgggcgggcagatgagtcgtctgctccgcttccctccaggaaaagcgccggatctcatccaacacggtttggcgcataccatcataatggagaatgatacagcaagtgcgttcgtgaacagtgacctgctgaacccaggattttttctggaaccacgcctccaaaagatcggcctgagcaaggctcatctgtttttgacgaagcctgagccggatgcggccgcggctttcatgtacaatcgttgcgttcataagatcctccttcaagaaaaagggagcctcaggcggctccctctgcggatatcagatttcttcgctttcgctttccagattggaagcggcaacttcctctgcttctttggctgcgcgagcctcgttcagatctttggcggaggccaggatatcggcggcattttcctgaaccgtggtcgtagcttccatgatcgagtccttcatacgcagaccagcggccgcaacatggacatatgccttctttgcatccttactggacaacaacttgacgcccagggagccaaacaaggcaccgcctgcaaagcaggccagttttgtgtagacattcattgcaatacttcctttcccttattttcttttgtagcctgtgaccatgaccatgaccatgcagatgactgcaccccaggcccagaaacgatgctgtttcattgcaatcactccttttgcgtgggaacaccgttgagcattttgtaattatagaggccttgctccagattgtcattatgcaaaaagacatcatatgccggttttcgacatttttttaaactggccaggggttgttccgtaatattttttgaatgctgcactgaactggctcattccttcatagccaacctcctgggcaattttataaatgggctggtttgtgcagcaaatcagctcagcggcccgccgcatacgcaaatcaatcagacagcgatgaaccgatattccatgtatgcggcggaattccgttttcagataggtaggcgatacggaaatcatgcggcttaagtcggaaattgtgattttttcggataagtgtgtttccagatacgatggtatatgcaggatggtttgaaggttttgcccatcctcagcttctgctggaaaatgcttcataggaaaatttttcaccgaaagaatatagagcagttctatggccttggagacgcaatacctgcaaaatgtgtcatcgggtaagtatccccataaatcaaataccgattgactccagcaacgattgcaaagagcgatgaaaccatgctgcaaagccagatttgattgtaagcggcacagatcgatggtcagtccgaaggttggaaggagggagggcagatggtcgtgaaatgcggcgaggtcaatcgccaccaaaatcccatgcagattcttgctgattttcaaggaaaacaattcagatacagcagaaaggaccaggatgtgatgttttccaaccttctgcggcttggcgccttccggcatggccgtgatctgcccatccagacaaaagaaaacctcataagtatgggaagacttatgtttttgaagcgtccataatcctttttccgatgattcggttgattggaactggaaaacacgcacacctggcatgatagtgatccattgcgtgcatgcggtagcgttacttcgcaaatattcaatcaacatatccaacacctgttttcttcatacggacacatatcgctgtgccttatttatgatgcaagtgattttagagccggaaagttttccccgccgagcacatgcgctgcttcgcaggcctgcccggagaggagcgcaccatcaattctgggtttcactggaagacccaatgagccgtggtgacatgcctttgtgagagaaaatcttgttgctgaatacaaaaatgtgaatggccagaaagaacaccaccacaagggaaatcactttgtgtatccccaggatcattggaatttcctcaaatatcatccccaacagcccggtcaggaatgagacggaaaccaggccgaggacgacacctctccgcatgttcatccgtttccagtgcaaaccggtgtgcaccaggcagagcaaaagaaagaaaagcgatgccaatttgtgaatgtgaataccggtaacaggtaccaaaagcgtcaaaacaaagctgatgagcaacaggatatggaggttctttttcattttgcagcttccttttttaccacatagttttttaccccaaagcagaagtaaaggatatggaacagccatacggccccgagaatcccgcagggaatgtaaagtgatttttggaacatcatcacaaagcccaacaacatgagcagcgtgacggtgatcatcacgcggagctttgttttccaggtcatgccctgacccttgacataggtttccaggttgttttgatacagttttgtgcccttaaaccagcggtccagcttttcagaactccggccaaagcaaaaggcggccagcatcagaaaagggaaggccgggagcaagggcaataccgctcccaaagcgcccagtccaaggcccaaaatgcccagggagatataaatgatttttttgccattcatcttctgttcatcctctcttttattgtgaaaagcatatgagacaccgctagaacgggatgatagaaaagcatcctgggaccggaaaaaaccatgatttcccggattttttcccgcatctccggacgatagcagtgtaccttacagttggagcagaaggttttgttctccataaatgggcagtggtcagagcggtctatggcatagagcaaaacttcccggcagtggggacacagatcggaccgatgatgccgctttttgcaataaagccggatcatctgggtaacgacccgtttttcctgttcccgcttgtcatcgatggatttcatggtggtggcctcctggtgtttgttttgggttagctgacactaacagtgtttcaaaataaacagcccttatagaaagggctgtttgctcagctcatacggccctgttccacacaatactgctgatccacaattcccatggtagatggccggtgggataccagcacaacggtttgctctccctttacttgttgcagcgaccgcaaaatgacagcttcattcagactgtccagattgctggtaggttcatccagcaacagcagcggcgcctggtgcaaaaatgctctggccagccccaatctctgacgctcgccgccagacagggaatctcccagttcggccaccggtgtatcataaccttgggggagggaagcgatgaaatcgtgcaccgacgccttgcggcaggcctcctccagttctgcctgggtggcgtccagcttggcgattctcagattgttggcaatggtgtcgtggaacagatgggtgtcctgggtgacatagctttccatatggcggaggttttcggtgttgatctgctggataggacgatctgaaatgcagatctccccttgttcggcctgccagaagcgcatgagcagtttgagcagggtggattttccgctgccgcttcggcccagaatcccaacgattttccctttgggaatttccaggtggatgtgagacagaatctcctcttcatcataggaaaaacggagatcttttacggcggctccggcaaaggtcaccggtgtatagccatggatatcttccaccaccggctgctcatccagaagatccagtacccggttgcctgcggcaaaggtgttttgcagggtagcgcccagagcggccagggccacactggggccgaaagagctcatcagggtgagggtggcaatgagagcggccggaaacccgcagagggtggacgctgtatacagcatggcaaaatccagcagcaggattacagtgttggtaattgcgctgttgcggccggaaatgcgcttggccttttcttcctgctgggacaactgtacgccccgctgttccagctcctgacggcgggtctggccctggccgtattgcaaggtttcggagagaccccgcaggctgtccagcacaaagccggaaagcctgccgctttgatcgcggacctgctgccccacatctccactccagcgggaggtcagccagggaatcagaattcccaccacgccatgggcgaaaagcgcaatgccgcccaagagcgggtggtagctccacaagaatgcagtggtcagcgcggtgtacagcaccgcaatacagatcggggagatggtgtgggcgtagaacacctccagcagctcaatgtccgaggtgatgacgctgatgaggtttcccttattcttgccttccagcttggccgggcacaggcggcgcaggacagcaaagacccgatcccgcagcaaggccagcagtttgaaggcgataaaatggttacaggtctgttcgccatagcgcagcacgccccgcagcagggcacagaggcctatcagaaggaagagcacggctagggaaaagggctgctccatccccagtgtatgcaatagagcgaatccacccaatacggtgatggctgtggcacagagatgtcccagaagccccagaacaaccgccagactcatatacccggtcaggggctttaccaggccgaccaacttcgccattacctggattccagatcgtttcatcccatcgccacctttccataactctctagttgctgttgtgcgctccacagacgggcatactcgccctgccgggaaagcagctcctcatgggtgccttgttcggccaggatgccttgccgcagcgcataaatccaatcggcctcggccacattggccagccggtgagaaatcagaatgacagttttgttccgggcgagttctttgatttgttccataatggcattttcgctttcaatgtcgatattggaagtggcctcgtcaaagatatagataggtgtgtcatggagcaaagcccgggcaacggccagccgctgccgctgtccgccggaaaaattgacgccgttctcctccagctgggtgtccagaccctgttgttcccgcaagaaatccgccagctttacctgttccagcacacgccagaaatcggtgtccgtcgcttcggcattgcccattttcagtgtatcccggatggtgccgcggaacagatagctctgatggcccacataggtgatgtttgcggccagggcttcttccccaatgtcaaggatgggaattccgccaatggtcagttctccctgaaatcctcgtatgcgccccatgagaatggcggccagcgtggatttgccgcatccgctttcacccaccagtgcagcaaaatcaccggaatggacggaaaagtcaattccctccaggatctcacgatctgcttcatagccgaaatgcagatctttgcagaccatggtgcaatcgttggggaaggcgcggcttccggtttgtgcatcgggaagatccagcagggcgaagagcttatcggctgccgccatgccgttcatggcgatgtggaaataggaacccagcagccgcatgggcaagaaaaattccgccgacagcaggatcaccagcagcgccccgaacagggacagtttcccggcctggaactgccacaccgccagaataatacccaacgcagcaccgccgtaggcgatcagatccatgacaatgatggagttgagctgcatggaaagcactttcatggtgattttgcggaagcgttcggattgctcattcatcatctggtgccggcaggcatccgcctgataaattttgagggttgtcagtccctgcaggttttccagaaaagaatcgcccagggaggtgtactccccccagtatttccccagaagcttcttggcaaaacgctgtacggccacgatggtaatggggatcagcgggacacagaggaataaaatgaccgcacagggcaggctgacaaaactcaaaactgcaaacagcgtcaagggcgcaaggagcgagtagcacagctgaggcagataagagccaaagtacacctccagctgatccacgccctctactgccagctgaaccacctcagaggtccgggccttttgctgataggccagccccagacgcagcagtttttcataaatcatggtgcgcagccgttctttcacctgtttcgcggcgtagtggctcacacggctcgccaggaccgtacacacatatcgtatggccaaggcaggcagcaggatccaaatggcgtttttccacaggtccggagtgctcccggcggaaagctgactcaggaaaagtgaaattccggacatcaatacaatattacaaagcaaagaaatccactgaaaaaacacctgcgaccacacatattttttgctcttgcccatgatgtgcatcagtcgtttattgatcatctcttcaaacctctctgagttagcataagctaacttctggctgtaataatggccaaccgcattgcggttagcctaatctaacttttggaattgtagcagaaattcagggccgtgtcaatatgtctgcggttcagccggatgattcgattgttatccagatcatcaagcagtacaatcaaacgagtgtgggagaatatccggactgagaccggcattcacaaagggcggaagaactggcagacggagaattttaacgattttgtcccaacacccggatattctgcaaaaggaattgcaggatatattgaaaattcaacccggttcattaagtgaagttatcattaagctggaagcggatggactggttgaaaaagtccggagtgaaacggacgggcggcaatgggctgtgcgactgacaaaaagcggacaggcagaggcagcacggctaaaagcagagtatgataagcaggtttccaaaatgatggactgcttttcgcaggagcagctaaatatcctgcacgaattacttggcaccatgtttacacattggaacactgtggacctgggcctggaacaaaagaatacaggaaaagaaaacgagtagtggttatcacataagtccagttgataagcactactctttctttttggaaaggaacgattgcaaatatgataaaacaactggcgaaaagtgttatttaaatcggatgtccatattttgagaattggcgacaaattaagtgaccaactgacgatccccaaagaatacaaaggcaaaattaaggatgtgaagaagtactgcacaaaaccggagctggagatgctgcttattatctcggaaggtttggatgctgacttcgaaaaggagaagtccaaaaagagtcccaaaatctttagcaaagaacatatagtgtatcataggactcgttacgacaacagcacggatttttaccgcaactattacggagaccggattgatctgctggtggatgcgataaaacgatataagccggcggttttggttatataccaagaactaaattatggttatggagattggatgaatgttctaatagctgttacgggcaaagcgcctcactttaaaagggagcaaatacccatttttgactgttgaggggagtctggtgatttgcggaacaccggaccatctatgaaggcctgagaaagggggggtacatgatgaaaaatattctcgctatccagtctcacgttgtttatggtcatgcggg

SEQ ID NO: 850 - DNA, 32759 bp, Unknown
  16S sequences of unknown bacteria
cgtccccgccgtacacgccgccggggacgattgtaccgcgaaagggcttcgttcctcaattcacaatggtcgccttgcagcgcctaacggcttgcaacgctcccttgttcattggacttccgcttcgcctgttccgcgcactgcgcgcggcgaagctccgtcccacagggcgcgcgcttcgtgctgttcctcagtcagcttcgctgccagcattccacaattcgcaatggtcgtttcgatgcgctcacaagttcgcttgcggctctcccttgctcattgggcttactacggcctgtttccgccactggcggcggccttcgtgcgccccctttgcgaaaagggagccttttggttagtggcgcaaccgtatgaagtagccctgcccaaaagcctcctttttcccgaagggaaaagggaggtgtcacggcgcagccgtgacggagggatcgtacaaactacggcgcaagaacgtttgctgtttttcacagactcacagattagcgctgcggcaagggctcattgggcgaccagccagagcgcgcccgcgcgcggtcgtactgctcggtatgccggcggcggcaatcgtgcgcgcagcggatgtaatggagctgcatgcgcacggtttcatccaattcgctgcccgggcggtaatcggcctgcgtggcgtagtccgcccgattgaccaggatcatttggtcggtgaggcgcgtatcggttcccgagtgcagcgcgatggaggaaccgcctttttggcgcaccatcttcatgcaaggcacgtcggtcaggccgtcgccaatgtaaatcatgttgggaaaggggacgcgccgtttttcttccggcgtgtagtcgttgagatcctcgtcgttggtaatgtccaggatgcccttgttgatgcggaacagatattgcgtctttgccgtgtaatttaccgcggtagcgggccaaatgggccgctcatttgcgtcgtacacaaaggatgccgcaaaaatacccgcaaacgctttcgcgatgctgctcccctcgatgatctcttttaggccggaagagatgatatagtgctccaccgccacgccgatggacgcgccataggcgttgatgcgttcaaaccaaccttccacaccggggaaaaactccacctgcgcgccgagctgatgaaatgtgccacgcgtgagttccatcacgcctttggccttttccaccaccatatacatataggccagcacgccatccacctggtttgcctcctgaaaatcgcggcatgcgccccaaaattctggaggatccatgcgaatgcccggcagataggcgtattcctgcatatagcgcggggaaagcgtcaaatcaaaatcgtagatcagcgccgcaatgggcatggtttgcatagtgcacctccaaaattgacgggcaaatcataagcaagggcgcggagcgtatggttccgcgccctgggaaattttggtttgggaaaccgccatccaacgcgcgcacgcaggcgctacggcgccggcgtttgcgtgggtgcgacggtcgcgctcggatccggcgagggagagggcgtcgcgcggcgcggcgcgtcctcggagaagagcagcgcctgcatttccggcgaggcaatgccgtccacatcgaagccggcgtcctgctggaagaacttcacggcgatcaacgtgttgttgccaaacacgccgtcggcggaatcgtccaaatagcccagttcaatcagtcgttcctgcatggcctgcacttcttcagagcgcatgtccttggaaagcgaggtgtattgcgaaggatccggcgtgggctcggtttcctgcgggatttcttccacttgctgcacattcaccgtaacggtctggctgttgatgatgtttgtgaggcccgtggccgtggtcgcctcgctcagcgcggcaatcccattttgcacaatctgccagttgttctgcgaggcggtgttgattgtagcttgttcttccgcgctcgcgttcgccagcaggggcgcgttcatgctatccacggagagcgcgttgcccacgttggtgatgatatggcgcatggcctcgatgaagagcgcgtcgttctcccggggcgattctggcagcatggcgtccgcttccgcgagcatgctatccacccgctccaagaaagcgagggaatccgtttggtagagctgaatcatctccgcgcggaaagcgtcttccgccaaagtggaaacatattgcgtgccggaatcgtacagcgcctgggagaccccgtcgatgggcgaggaatcccgccctgagatcatataatcgatccacagatagccgcccacaaacaccgcgatgatgaccagggcaatggccgcgtacttggcaatggtgatataatcgaagttcagcttgcgcgctcgctcacccctgccaaaatcaaattcctcgctggaggtgtcgtcgctttccacctcagccgcgtcctctggcactgggacgccatcctcttcttcctcctcgccaaacagcgggcgatcggcttccttgcgcccgaaaggcagcttatcggtgaggagagaacgcttcacgcgttcgttgtgtacgggggcttctccgctcaagatgcgcttggattcttcgctgatctccggctcagcgtccaccttcacaggctctacgtggatgcttgcgggatcgatatccaccgcgtcttccacggcttccgcttcgccgtcctcctgcgcgtcgctctcgctggagggcgcagcgccgtcttcggcatcgtccttgcccttgggctcgtcaaacagcgcttccacaccgtttccgcggttttccgccgcttccgcctcaggcgcagattcgccctctgaagcaggggcttcctgcgtgggcgcttcgccgtcctcaggggcggacgcgctctcctcgtccagcacaggacggtaagtggtgcggctgagcacatcgccttccggctcgcctgaacccatgtacgtggtgcgggtatagggccggaattgctccgcgagcttttccgtttcgccgggcgcaatcttcggctgcgccgctgtgtacggaaggccctggaaatggttctcgccaacgggcgcgccgcaatgcgggcatgtgctagcgccgtttttcagggttttcccacaatttgcgcaaaacatctttcatcctcctttgcgagcgggcggcataccgcctgctcaaggggttagttggacagcgtgggcggctggcaaacggggcagggcgaaagcgaacgcgccgccgtttcctccagcgtgatcatcaaggtgagttctgtgtctccacactggctggacgcatgatagtatggatcgccatcggcagtgtaaacctgcggcggcgtggtagcgctgacgccaggcgcgtcggacaactgggtgatgcggctcaaatccgcctctgcctgcgtgttttccacgctggaaaaggatttgggcatggccggcgagggcgtcacggtttgcatatcgctcgtgggcatcatgatcgcgaccatcacggccaaaatcaaggtggacagcgctgtgagcaatgcgcggccgcgcggcataaacatgcgcatgcgccacacaaaggcgatccctaccggcggaagcgcgatcaaaagcaccagagccacaatgccgcgcgaggaaagcagccgggcttcgggctgtggctcgcgcatcatgcgcgaatagatcgaaccgcgcgccgagcttttgccgcccgcgagcatatcgcccatcgccttggcatccttgcgcgaaacgccgccccggctaaacggattcgccatgtgaccgtcctttccgcataacggcaaactccattatagcaaattctttccgataatacaagcgctaaattccttctatatcccaccggcggatttgccggcgaaagctttcgctatttcccctgggcctgcattttcagcagcgctttggccagctgatccgggcaactggtgccgccgcggcattgaatgcccttgagccggcgaatcgcttcttccaccggcatgccttctactaggcgagaaacgccctgaaggttgccgacgcaaccgccatcgaacacaacgcggcggatgatgccgccctccgcgtcgatatgaatcatccgggaacaggtgccagaggttttgtaatcaaacattcgagtataatcccccacaatattcgcatatacaccataaattatacagcgatataagcggtctgtcaaccgttcaatgcttcctccgcagggcaaaagcgtaaaaaaacgcgccattgccagaaagtttttggcaatggcgcggtggcgaggctcctgcggtggcaaggcgcgcgtcaataaacgattttcacgggcaggcccgtttccatggaacggttgcacgcaagggtgaaagccgtggaacggtacgcgtcggcatacggcgagcggatgtgggaagcgtcgccggtgagcacagcgtcgatgaaagtgcggtcgcacagggtgccaaagtccacgctggatttgtacgtgacgcccacttcattttcgctcttgcgctgggtgccgtcccccgcgatggtgcctgcaacggtagccgcgctgtcgcgcggatccacgccatacaacgcgatgttggagcaaagtacataatccatgcgcgaatccagcgagccaaaggtcatctttgaatcccaggacgcgccattcttggaatagcagccggtcatcatcgtgcaggtaaggccgccttcaaaggtgatcagcgtggtggacaggtcgtcggtaaaataacccggattgtcctgctgggtgatcaacccgcgcgtggccacggaatacacggtttccggctcgcgcccgagcaagtagcgcagcatgtccatctggtgaatggtttgctccaccagttgtccgccagaggcggatttgatgttccaccaatccgtgccagggatgccgcccacacgcgaagcgcacacgtgcgcaatcgggtggctgcgaatgtattcgcgggcgggatcattgatatcgtcatagcggcactggaagcccgccgccgtgatcagttgtttttcctcgatttgccgcgcgatttccttgaccatggcaatgtccagcgacaggggcttttccacaaaaaagggaatgccccggcggatggtttcgaattcaatccggccatggcaggtgggcggcacgcagatgaataccatatcgggctgcacttcatcgtacatcttgcggaaatcgacaaacgccttgccgctgcccgccttttgcacaaacgcctccgcgcgctccagcaccaaatcgcaaaagcccgccagggcaatgtctttaaattgcaaaaagtggcccaggtggtattcgccaatgccgccgcagccgatcaacgccaactttttcatgtcctttttccctcctattcatagaccaggagcgcgtccatcgcctgagaaacgctctgatagtactggagataatccggttcgctttcgggcttgaaaacttcgcccgtgagatagcccttgaaacccgcatggcgcagggcgtggatcacatctttccagttgacgtcgccttcgcccaggtcgacaaaagcgccgccgctgttcaaatgcccgttgcgcttgaagtccttgacgtgtacatggtggatgcgcgcgcccagcgcgtcgatccaggcttccggccaggagaacgccacgacgttgcccacatcgaaatacgcgccaatatagggactgccgatttcatcaatgaagtctaccatggcgtgcggcgcggtgaaaaagccgttccaaacgttttccacatccacatacaggccaatctgctcgatttcctgccgcatggagagcaaggtttccaagctttgcacccaatcctgcgcatagggaatgcgcgggcactggccgcccggcacgcacagaatgccgtccgcgcccagcaaagacgcgcattccagttgcctgcgaatcaacgccttcgcaaacgcgcgatccttcgcgtcgggcgaacccattttgcccgcatacagcgaggaagaaacgctcacaatttttaggccaatttcggcacagatatcgcgaatttcgtgcagcaaacaggtgggcgtctgcatggtcagcgagtgcgacgagcgctccggctcatccacgttcagctcaattccatcgaaacccgcggcgcgcacctggcgaaacatatcgccaaagcaaacagaactgtccaccgtccatgcgtttagagatttcagcatagagtatcctcccttccggtaatggtcttgcaattgagtcgtcctcagtatatactataaacgggaactttaacatacagaattcgcttgattgcatggacaaaccgactatcggaggggatagcatggaatcgcaatcctattatcgcctgctcggcgtgagtgataacatttgccggatggatacgccgctgtgtgtgaactgtgcggggctatgcgtgatgcggcaaccgttcatcagccactttcccacgggcagggaggatttctatttgcaatatatggtggatggggaaatggacattttgctggatgggaaactgggcattttgcggcccggcgaagcggttttgcactttccccacacggaatattggtatgcgatgcgcggcgaacagcccgtggcgtattattgggcgcatttcacgggttctctcgccgaaacccttgtggaaaaatgccgcttcgccaaccagaagcccctgaatgtgggcgtgcatggctccattgccgttcgcttcgaaagcgtatttcgcgatttcatcgaaagagacgcttgctttgaagtggccgcctgcgcgggcgttgtggcgctgctcacggaaattgcgcgccgcgcggaaaccggcgggcgcgcgcctgtggacgacgagcgcatttcccgcgccatcgcacatctgcaccgctcttatagccagccggtttcggtggacgaaatggcggcgcacgcgcatctgagcagcagccgctttcggcgcctgttccaccagcgcacggggttttctcctctggaatacctcacccggctgcgcctgaaccacgccagccaactgatggcggaaacggctctgtccatcgcggaaatcgcccgcgcggtggggtatgaagacccgctatatttcagccgcttgttccgctgcaagatgggcgtttcgcccaccgaattccgccagagcaaggcctaaacgcagcgcaaagcgctctggggagagagcgaaatctggccgcgccgttccaatcatttgttagtaaacaaaatcgcccgaaaactgacgttttcaggcgatttttgctggtacaccatcaggggctcgaaccctggacaccctgattaagagtcaggtgctctaccaactgagctaatggtgcatatggcctctcttaaaaggcaagagtaattatattcctccccgagacatttgtcaaggaatttttgcgttaaattccgcgggtgagatttttgcttgacagcggcagcgggctttactataatcaacatagattcatggggaaggggtgccagccgtgaaggaagaccatcgggagcttttgcgccgcattagcattgcctccattcgcctggatggcgcatatgaccggctatccaaaaaagtgggcgtgaaggccaatttgctctggctgctctatgcgctggacgatggcaagccgcattcccaaagcaaaatttgcgatgaatggcttttcccccgcaccaccatcaacacgatcatccgcgaatgccgggacaatgggctcgtgatcctcgaagccacgcctgggcaaaagcgggaaaagcgcatctatctcacggaaaagggtaaggaatacgcgcgccagactttgcggcaggtgtacgaggcggaagaggaggccctgcgcgagaccttgaagacttgctccgcttcttttgtggcggattttgaaatctttgccgccaacatcaaagcggcgtttgataaacatatgccggattgacgaatttccatttttcccaatgcacctatgttgtgctggaatgcgcgatcctattgaggtgatagaatgatacggatcaaagccgctctttccaggctgataggcagcccgtaagggggcaattttccccgacgctccttgcgggctgccgaacggtcggggagggattgtgttgaaaagaaatcgtgccttttaccgctatcagcgcaataggacgatcaaccgaaagctgggcattctccagcgcatcggtggaatggatttgatccaggcttggacgaagggcaaaccgggcaagctggccaagggcaaaattcactgctcctgctctctttgccgcttaaagacctatgaatacccgtcgcattgcgataaaaaggaggatgtagccgcccgccagcaatggcgagaaatccatttcggcctgtagtttggcggcgcgggggcaaggcacaggcgcaaagcgcaaaggaaccccgcttcgccgtccatttccggtggcgaagtgtgggttccttttgttggctcaagggagaagcggccgtgcctctaagagaaatgccagttcccttcgcctgtcgtggagaggacggacattttttccgccttatattgctgggcatgggtttcatcttccaccactagcataccatccttttcgcccaccacgtagacgatcgcgccctggggcgggatttgctgcgaggcgctggtttcatcgtcgatcgcgtacagggcggcgttctgcgccaattgagcgggaaggacgggataatcgatttgcgccagcgcgtctttggcgatccagcccgtcgccgtgccgctgagattttcgatgcggaaatcgttttccgtttttcctgccacaaacacgatcgttcccgcgggcagttgcacggacttgcctgtcgctgcatcgcgcacataggcggcctcttgcacctctcccaccatgcgctcgagcagagccaaatcctccacctgcacgaagccttcgttgccttcgaaggaaattttcacccattcgccatggctgctcaaaatatccaggcgggttcccttctccagcgtggccagttcttttcccgaggcggaggccttggcgtatacggtcgtgctggatgaatacacttccgctggcgtcgaagccgcaggggcggacgggcgcttttccggttcgcttggctcctttgaaatttgcggcacttctggcgcggcgcttcccgataggatgccgatggcgttcccgttctgatcgtatacaatgtcatcgcgaatcgttagcggccggtaggctgtgctatctgccacccttggcaacccgttcgggtcttcctggctgagaaattcctcgatatatgcgtcatacgcctccgtttttcctgcgattccaccgttttcgaagcatacgaggccattgtctttcagtataagccgctcaagttctgctaaggctcctggtgcaagcagcctcagagccagtgcgacggtcgtcactatagccaatttcccaagcatgccagcctttgcgaacatcctgctacacctcccattgcaatcgctatggatttcgttcccgcataaggcaggaaaaatggctctcgtttttctataagacgatttatggcgagagttggttccgtaaaataccaattttatggaacacaatggaaacttcaaccgtccaataggcaaaaggttgatgaatagaagcgccgctcaagaacccaagtggaggagggctgggcatgaaaaagaaagttgcgctgcttatgtggatgctttgctgggtaaccgccagtgcgtttgcttacgagggagaaccattttattatgcacgccagtggtggcgccacgacatggttctatacgcacagccctctctggattcccagatattgggcacgtatccattatatacggtctcgtttgatattgacgcagagcgatgggaaccagagtggattctgcaggaattctgggatgaggcgcaaaaaaagcttttaactggctggatatattcgccgaaagacgttgggcaggggagtaatccgcccatgtatgaatggtcattggcgcaggaagccgacaattatgtgctcgtgacggcggaaaaggcgcagctgcgcgcggggccatcggaagatgcgccatcgcggggcgaagtggtgcagggcaatgcgctttatgtgggatattatatcgatggttggattctggcctccacacacccatgcgtgagggatcgagccgaacgggcggaaggctggattgacagccggcacgtggcgttcaacgcgccctatgcccgccttacgcgcagcagtggcgcgtacacctggcctgcggaggatgcggaacgaatcgagcggctgcgcgaaggcgaggaagtgccggtgatcgcggaaacggatgaaagctatatcgtgctgcgggaaggcggcgtagggtttgtgcaaaaaaacgcggcggaactggtacacgcgccgcagcggacatacatcaatggtgaatatgcgctgaaggatgtggcggcgcggtgcgatgttcaagtggaagaaagcggcgcatacctcgcgctggagccggaagagaagaaaacgagccgcgcgtgcgaagcgctggcttatccggatgcggatgcgctggtgctggcggatttgccggaaggagccgcctatcccgtcggcggtgaatgcggggcatactacatcattcggctgggcgaaggcgtggcattcgtggagaaaagcgcgtttgccgcggtatagcgggaagcatgtggaagttgtcgcgcagggacaaaagcgttgccataatccagtttgcgcaaaaatcccaagcatagaccggcccgcttagaagccgctacgacttctaagcgggctggttttgcgacagccttttttaggcgttctgcagggtgcgcaccaatagctccgcgtcggcggtttccgtgggcgagcggcccacgcgggtatcgtcgcaatcgcggctttccagcgcggccacggggtgcggcgcggtctggtagcggtagtcctcgccaaaggccttgaggtactcctcaatcacgagatggctgggcacgatggcggcgtccgggttcacgctgttctgatagcggaagaaatccgcgctgggcggcagatcggccacggcggtgtaatgctcgtgcttggcggtgacgttcacggtgcccagcacgccgcgcacgtattcgatgttcgagccgaggtgcaggggttccgggaaccgcgcatcgggaatcacctggctgtagtgcttgttttcgtacttttccaggagctgcgccgccttgtgcaggtgcccgatttccatcatcaggaactgctcccacatctggcggatggcgaggtcggtttcgtcgagatagcaggaataatagagatagcactcggtgtattcgtgcagcaacagcatttccagccaggtggcgttgggatcctgcaggctttcatactgggaaacgtgctgttcctcgatcatggcgatttcctgatagagcttgcggcccagggcggtcttatagaacgcctgctggttcatatagtagttcatggtctgttgctcagccgcggtgatgatgttcacgttcagcttggtgagcagggaagcggacgcgtcgatgggatagcgaatgtcgtcgtgcgggaaacggtgctcggaaatcgtcggccggccgggcatgatttccgtgtagccgcccagcaggtgctcggcctttgtgccgcattccatatccagcaggtcgctatagcggtacaggtggtcgaaatcttccagcagcgcgaagtgcagcgcttttttcacgccgatgtcggtttcgcgcgaggcgagcgcggcggtgagatccacggcgagttgttcatagccaatggtgtgctccagcacggtttcgccgatgggcttgagacaggagattttcttttgctgctgctgttccacgcggcgggtgagcgccaactcgcggcgcaggtcgttgtcacaaacgtggcgggagaaattgcgggaaaaccactgcgcctcaaattccgtgccgttcatgaggatgatccggcactttgtgtagggatccaccgtgaagggatcgtaactcttggggtatagcctgctccaatcctggaacatgtcttcaatgggcgcgcacttttcctcaaatggattcataaaaaatactcctttgccttgaaagactgtgctgtgggcggcgcataaaaagcgcggcccacgggaaacacgcgtagtctttccgcaaaggaggggagttattcctgatcgttgacaaaccttcggtttgtcaacgaggatcacccggtcgcttgtctacgcaccgcgctgcgctaacgcttgcgcggtgttccgtggctgcgcaccgccctcgccttcggcggcgcggtgttccggcgctgcggacgccttttaggcgtgtcctcgcgcctccagccgcttcgcggccttcgattgcgcactgtgcttcgctccgtgtgctcgccacttcagcccttcgggccttcacctttttgtaagcgtttgcatccacagttcgcaatcgtcgatctgcatcgctcgcaagctcgcttgcagttctcgttgctcactgggcttacttcggcctgtttccgccactggcggcggccttcgttcgccccgcaaaaaatgccagaaatgacgtacacgccgtcatttctgattagaacctttttttcgagactttgtcaatagtctgttattcgccaaccatggttcgcaacagcggcaaaaaatcggcttcggcccgctcgagcggctgggaattttcgtaaatatagtcgtagcggtaattttccacttcgtcgtccgacgcgttgccaaaatggctctgcgcgcccggccgccgcaccagcagggacaggctgccgggaatggccgcctggagcttggcgatttcctttggctcgcggcaatggatgaagagaacgcgcgcttgcgaggcgcaaaacgcgcggtaggcctccatcaggctggcaaacggcaaatcgttgtaggcgatgaaggcgagcttgatgtcggagagcagcttgcggccgcgctcgtccttcacgccgtcccagccgccgaagcgagcgatttccttgatgcggtccacggcggaaacgctggtgaccgcgtaatgccgcgccgcgatggcgcagagcgtgtccttgcccgcgccccctgcgccgttgatgatgatgacggtctttttcatgcgcatacctccgcgccccatcacaggcggatgtagcaactggacatgccgtccagttccacatgcgcggcgaacagatcaaaggcgatggacgtttcggcccggttgagcacgcacagcacgcgctcgtgggggtattttttgccgaacgcgtcggtgccgcggatttcgcgcaaggcgcacaccacatcgtcgctggcggcgaaaaatttcaccatgccggttttgagcgcgtgcgaatggtgccgctcgctgaaaatttcgtgaatcgcccgcgtgagatccgtatcctcccgcccccaggggaacgcggcgcggttgaacggatcgtccatgccctgcataccggcttcatcgccgtagtagagggagggcatgccgggcagcgcgcacaaaaagcggaaaacggcgataaagcgctttttgcccagcgcgtacgcctcgtcagagagcgttgtcgcccggcgcagcgcgcggatgggggaaaggttcttttcgcccgcgagcacattgatcacccgcggccggtcgtgcgagccgagcaggttgagcatggaatagtagaacggggcgggcaggttctcgcgctgcgaatcgagctggcgcaccaatgcgtgggcgtcgatatcgcccagcataaaggagagcagcgcgttgcgcaggggatagttcatggtggaatccagcgtatcgcccaggcaataggagcgcgtttccccataggctactttgttggacggatcttcccacacttcgccgatcaggcacgcgccgttcttttccttcacgcggcggcgcaggccgcggatgaagtccatgggcagttcatccgccacgtccagccgccagccgtacgcgccgtcttccagatagcgggaggcgatggcgtctttgcccgatacgatgtattcataatgcgaaggctccatttcgcgcacgttgggcatggatttgaagccccaccagcaatcgtaatcgccgggatatttgcggaaatcgaaccagggatagtagggcgatttgggcgattggtacgcgcccaagtcgggatacgtgccctcacggttgaaataacggctgtcgctgcccacgtgggaaaacacgccgtccagcacgatgcggatgcccacgcgcttggcgctgcggcacagggcgcggaaatcttccagcgtgccaaagcccggatcgatggattcgtaatcgccggtatcgtatttgtggtttgtgcgcgagcggaaaatggggttgagatagagcacggtgacgcccagacggctgagatagggcagctttttgcgcagcccctccaggtcgccgccatagaaatcgttgcacacgttggcgtattcgtcccccgaattcagctcgggcggttcgttccaatccttgtggtaatgcgaatccgcgctgagggctttctgcgcgcgtggcttgccctcgcaaaagcggtcgaccatcacttggtacatgatgccctcgcgcatccattccggggttttgaaagcactgtcgtacaccgtgatctggaaagaaggcggttcggtttcgcgcatttgcccgctgccgcccagcccgtcggcggcgttgccataataggcgcgcgaagcgccgcaatcctcaatgaaataataccacattagtcctggctgcgcgggaatgtccagcacgatttcgaaaaggtcgcgttcggtgcggcgcatttcgtattcggcggcgttgcccgcccaccaggtgcgcaacagcacgcgcgcgtcggcaatgctggaacgcgcgcgcagcgtgaccgcgctcccgcagggtacagcgccctgcggtgcgcggtattgcaaatcgcgggaattgtgaaatagcatattcgctccctatagagacagtttgggcaaatgccacaccttttcgttgtattcggcaatggtgcggtcgctggcgaaatagcccgaagaggcggtgttcataatcgcccgttccagccagcggctgcggttttggtaatccgcgcccacctgcgcctgtgcgcgcacgtagccaggcagatccttcagcacgaaatacgggtcggccatgccgccgccatcgccaaagagcagggcgtgatacaggtcctggaacaggcgcggattttcggggcacagcgttccgtcgatgagctgctccatagcccggcggatggcgggattggtttcgtacacttcgctggcgcggtaggaagaatagcccttttccacttcctcggcggtgaggccaaagatgtagatgttttcgcgtccggcggcttgcataatttcgatgttggccccgtccagcgtgccgatggtgacggcgccgttcatcatgaatttcatgttgccggtgccgctggcctccttgcccgcggtggagagctgctcgctcacctcggcggcgggcatcagcgcttcggccagagagacgcaataattctccatgaacaccactttgatcagcttgcgcgcgcggggatgcttttccaccaactgcgcgatggcgttgatcaggcggatgatcagcttggcgcggtaatagcccggcgaagccttggcgccaaagaggaacgtgcgcggctggaaggtatagttcggatcgtccaccacgcggttatagagcatcaaaatcgacagcgcgttcattagctggcgcttgtattcgtgcaggcgcttggcctgaacgtcgaagatggtggccgggtcgatgagcgcgccctgcccatccttgaggatctgcgccaggcgcaccttattttcctgctttacgcgcgcgaattcccgctggaaggcggcgtccttcgcaaagggcttcagatcggccaggtgcgcgggctctttgcgccaggcgacgccgatcgtttcatccaacaaatgcgccaggccgggattggcctgcatcagccagcgccggtgcgtgatgccgttggtgatgcccaggaatttgtccggctgcatcatgtagtaatcgcagaaggtctttttgcgcaggatatccgcgtgaatctgggaaacgccgttcaccgtgtgcgaaaacgccacgcacaaattcgccatatgcacctgcccatagcccagcacggccatgtggccaatgcgttcccactggccgggatacacgttccacaggcgggcgcacaggcgcttgttcatctcctgcaaaatcatgtatatgcgcggcatcagcatgcgcaccatgtcttcgggccacttttccagtgcttcggccatcaccgtgtggttggtgtaggcaaacgtgcggtacacgatgtcctccgcgcgctcccaagagaggcccttttcatccagcagaatgcgcatcaactcggggatcgccatgccgggatgcgtgtcgttgacgtggatggcgactttgtccgggaagatgtcccaatccgggccgtaggtcttttcaaaatcgcgcacgatgtattgcaccgaggcgctggagaggaaatactgctgcttgagccgcagctccttgccctcgtaatggttgtcttcgggatagagcaccttggagatcacttcgcacagctcgcgctcttccatggcgcgcacataatccccgcggttgaacgactgcatgtcgatttccttgggcgatttggccgaccaggtgcgcagcatgttcaccatgttggtgtcgtaacccaaaacgggcatatcgtagggcacggcgaggatggtggaatagttcttttgctcaaagcacatccggccatccttctgcacttcttccacatagccgccaaagcgcacttccaccgcctggtccgggcgcacgatttcccacaggttgccgttttccagccagttgtcgggcagctccacctggtagccgtccacgatcttttgcttgaaaaggccgtattcatagcggatggtgcagcccatggcgggcagttccagcgtcgtcagcgaatcgagaaaacaggcggccaggcggcccaagccgccgttgcccaggcccggctccggctcctgctcgaacagcagccgtttatcgatgcccagcccttccagggccttcatgtaattttcttcgttcaccagcgaaaccatgttgttgtgcatggcgcggcccacgaggaattccgccgaaaggtagtatagcttcttggcgcgctggcgcttgcgctccccgcgcgaagccgtgcggcggcgcatcacttcctcgcgcacggtggaagccaccgcttggtatagctgtccctgcgtcgcgtcggaaatctcgcagccgaattgcccctcgagtttttcgacgatggattgttgaatttcagaaacgctcatgcgttcgattgccatggatagattccgctccattctatatcaggatcccctcaagtatatcatatttgccttttttgtgcaagcgcgacaatgatacagaaaaaggaaagcttttgcgcgcagattgccgtggattttgcgcagcgccgggaaacgcgcgtgaaatgttgcgattgagaaaagtggcgggcggcgcgggcgggaaatttgcgcgcatggtgcgccaatttgcggcaggatttgacagtttttcgccgcggcgctataatatttgcgggggtgtgggcatgaagttgtttcatctatcggatttgcatttgggcaagcgggtgtatgaatgttcgtttttggaggatcaggcgtacattctggagcaaatcctttcgctcgccgcgcgcgaaaagccggatgcgctcctgatcgcgggcgacgtttacgataagagcgcgccctccgccgaggccgtggccctgctcgacgattttctcgcgcgcctgagccagatggggcaaaagacgttcatcatcagcggcaaccacgatagcgccgagcgcgtggcctttgccggccgcctggtgcgcgcgagcggcatttatctttcgccggtgtacgcgggcacggtcgtgcccatcacgctggaagacgcgtttggcgcggtggatttttttcttttgccctttttgaaacccgccagcgtgcggcggttttaccccgaggaagacattcccaccacttcggcggccatcgcttgcgccatcgcgcacatgcccatcgatccttcccggcgcaacgttctgctggcgcaccagtttgtggcgggcgggcagctttgcgatgcggaggaattcgccgtgggcgacgcggacaacgtatcgcccgaggcattcgctcccttcgattatgtggcgctcgggcacttgcacggcgcgcagaacgcgcagggcgagcgcgtgcgctattgcggctcgccgctcaaatattcgttttccgaggcccggcagcaaaagtccctcaccgtggtggaactgggcgaaaagggcgcgctgcgcgtttccacgcggccgctcacgccccggcgggatttgtgtgaaatccgcggcacgctggaagaagtgacttcgcgcgcgttttatgaaagcgtggacgcgcaggcgtatatgcacgtcgtgctcaccgacgaggaggacgcgccgggcgcgctggcgcggctgcgtgcggtctaccccaatttgctgcgcgtttcccgcgataaccgggcggcgcgttcgctggggcaactgcccgcgatggaagaggcggccgcgcaatcgccgctggaattgtttgccgcgttttacgagcggcgcaatggcgcgcccctttccggcgcgcagaaggacattttgcaaaagctgatcgcgaacatttgggagggtgaaggatgcggccaataacgcttgtgctatccgcctttggcccctacgcgggcgagacgcggctggatttttccctgctgggcgaaaagggcctgtatttgattgcaggtgataccggcgcgggcaagaccatgctgttcgacgcgatttctttcgcgctctatggcgagccgagcggcggcaatcgcgaaccttccatgctgcgctgccgctttgccgcgccggagacgcccacttttgtggaactgacctttcgctgccgcggccaagactatacggtgcgccgcaacccggaataccgccgcccatcccggcgcggcggcgaaaccgtgcagcgcgcggaagcggttttgacctatccggatggcaacgtggtcacgcgcaccaaggaagtgacggggcgcgtgcgcgacattttgggcgtggatcgcgaacagttcgcgcaggtggccatgatcgcgcagggcgattttttgaagctgctgctcgcgcccacggaacagcgcatcgccattttccgccagatcttcaatacgagccgctatcaggcgctgcaaaacgcgctgaaagacgcggcggcggcggaaggacgcgcctgtgaagaattgcgcgctgagatgcggcaagccgtgcagggcgcttcctgcggggaggattcgccaaacgccgcgcgcttgtcgcaggcccaggaggagcggttgccggaggaggagatcgagccattgctgggcgaactgattcgcgcggatgaagagcgtcaggcgcgggcgcaggcacggatgggggaattggagcgggaaatcgccgcaaggaacgcggaaatcgcggtgctgctcgaggcggagaaagtgcgcgcggaatttgcagcggcgcagcaggatttggcggaggccgaacccaagcgcgccgcggcggaagaggcgctgcgcctggcgcggcaggcacaaagcagcgccggggattggcggcgggaaagcgccgcgctgaccgcgctgctgccccagttccgccagcttgccgccgatcgggacgcgctcaaagcggcggagacggaactagagacgcttcgccccctcgcacaacagcgcgcgcaaaagctggcggaacgggaagcgtatctggaaaatggcaaaaaacagttggcggagcttgccggcgcgggcgcggaatgggaacgcgcgctggcgcagacgaacgcgctcacacaagccgacggccagttggaggcgctggaaaaagatttgcgcgcgctggatgaactcgcccggcaggagcgggaggcggcgcagaaatacttgcacgagcgcgcggcggaacgggaaaagcaggacatctttgcgcgcatgaatcgcgcgtttctggatgagcaagcgggcgtactggccgcgacgctcaaagagggcgaaccttgtccggtgtgcggcgcgcgatcgcatccccatcccgccgcgctctccggatgcgcgcccaccgaggcggaactggaagcggcctccgcagccgcggacgaggcccgcacccgcgccacgcgctccagcgaagcggcgggacggctcaagggccagcgcgaggcgttgcaaaacgcgctggcacagcgctcggaggcgctgctgtcctgcggcgatctttcccgcgcgaaggaagcgctggcaacgcgcatggcggaagtgcgcgcgcagcttcgggaggccaagcggcaggaagaggcggcgcgcgagcgggaagagcgccgcaagaaggtgagcgacggcattcccgtgctggaagcgcagattgccgccgcgcgcgatcggcttctcaaggagcgcgcgaacctcgccgcgcaggaggcgcacgcggaagcgctgcgcgggcgaatcgcggcggcgtccgcgcaactgccttatgcggatgaggcgacggcgcgcgcacgcgtggaagcgctcaacgcgcaagcagaggcggcggaggcggcgctgcaaaaagcgcaggacgagcagcgctcctgcgccggacaggcgctcagggcgcaggagcgcgtggaggttttgcgcgcgcggctgcgccccgagcgggaagccgcgctcctcgcggcacaggaacaattggcgcgcgcgacggaagaacgcgaggcgatatccgcgcaaatccgttccacagccgtgcggctcgaccggaattgcgccgcgcgggagcggtttttgcgcggttgggagacgctccgcgcgcgggaaaagcgctacgcgcagttgcgcgcgctctccaacacggccaatggcgcgctttccggccaagaaaagatcatgttggaaacctatgtacaaatgcgctgcttcgaccgcattttgctgcgcgccaatcagcgcctgctcgccatgaccggcgggcgctacgaattgcgccgccgcgccgccgcgggggacaaccgcagccagagcggcctggaactggatgtgctcgaccattgcaatggcgcgccgcgcagcgtgaagacgctctccggcggggaatcgtttttggcttctctctccctggcgctggggctttcggaagaaattcaggcgtccgcgggcggcgtgcggctggatgccatgttcatcgacgagggcttcggctcgctggatgaagaggcgctgcgccaggccctgcgcgtgctctcctcgctgggcgagggggataagttggtgggcgtgatttcgcacgtgagcgaactcaagcaaaatatcgagcggcagatcgccgtcacgcgcacgccgcgcggcgattccacggcgcgggtgatattgccataggtgatgttgccataaaggtatgcgcgcaaaaaattcccgcgggccgaaatgcgcttcggtccgcgggaacgcagtttttgggattagccgtcctccattacgagcaggtagctcagcacgaagaatagcgtgtagcagcagatccagatggcttcttcctgcatttctgccacgaagaacgtgccgatgaccgcgcccatcacgaaggatacgatgatggccacgtatttgaacacgccgcgcagcgcgccgggccgcttatccaccacaaaggcgagaatgtgctcgcccatctggcgcaagttgccggtacacatggtggtggcaaaggacgtgccttccagcgaatcgaagctggccacctgcaccgagcagatgaacgccacgattacgttcaccggctccggcgggaaggaagcgggaatgtagccaatgatggtcaccaggatgaattccgcgaagatgacgatttgccgccagtgcaggttgcctttcgtaccgatgcggcgcttgaccacgccggccaccaggatgcccaccacataggacgccacctgcgcgaagtagttcagggcctgcggccaatcgccttccatcaggcacaggcccagaaaaatcaggttgctggtttgcgcgttcgcgaacacgccgccgcggatcaggtatgtatagatgtccagaaagccgccggtgaaggcgagcacacagcccagaatcaagcgttgcggcaccggtacagcggctctctctctctttggcgacataccttctccctccctggggtgtataggttacagcaaaatggccaggaattgtgaggcgagcaccacgcacaccagcgcgatggggtaggtggcagcgtaggccgaggcgacgtcgtccgtgccggccacgcgaatcagcgtgccgagcgcgggcgtgctggtcatgccgccggtgatggaacccagcgagttaaagatgctcagtttgagcagcttcgcggccacgaaatagcccaccagcatgggcagcagggcgatgatcgcgccatatacgaacagcaggaagccgtgctcctgcagcgtggctacgaaaccgctgcccgcgtccgtgcccgcgccgatgaggaacatcatcaggccgaattcgcggaaggattccagcgtgcgcttgttcacggaaaggtcgagactgcccaggtggcccaaatggccgacgatcaggcccacgatcagcgggccgcccgaggtgcccagcgagaattccgctccgccgggcagcggaatggtcacggccgcgagcagaaggcccagggcgatggcaatgctgaaggggaacagccctaccgagtcgcacgagaacagcttgccggtgtagggcttgagctcgacactgttggcggcttcgaagcgcttgcgctccgcggccacatccacatgcaggattttgggcatcaattgcacgaacagcaccacgctgatcacgccaaaaggataggcgatgccatagccgatggaagccatcgggtcgttgcccgaagcttcaatggcggccgccaggccgggcgtgctggtgagcgcgccggtcatcaggccgacgcccagggccgtgggcagtttggcgagcaggatgatggccgcgcaggaaagcgcgcccacgaggatgatgatgaagcccagcagcacgtaggatttggcgttctgcttaaagttgcggaagaatttgggcccggcaatgaagccgacggcggtgacgaaacacaccagcccgatatcgcgcaccagcgggggcgtggtgatgccaaaatggccaaacaccagcgccaccagcagcacggcggcggttcccagatcgatgccgcaaatggtgattctcccgatcaggtaccccagcgtcgcgataacgaataccgccaacagttcgctcatagaaaatctctcctaagccgaatgataaatttattttttgtggttgcgatagtccggcagcaactgcggggaggcggtgtgggtatcgatgcccgcgtccgcgagttccttggcgaatttttccacatgctggagcgtgggcgcgccgagcttgacggtcttggcgtgcgcggcggcgtgctggcccgcgttgcggccgaacacgatcacatccagcagggaattgcccatcaggcggttgcgcccatggatgccgcccacggcctcgcccgccacgaacaggccggacacggccgtcatgccgtcgggcgtgatcttcaggccgccgttctggtagtgcagcgtggggtagacgacgatcggcaccttgcggatatcgatatcatacttcgaatacatgcgcagcatgcccggcaggcgcttttccagcgtgccctcgccgtggatctggtcgatcatcggggtatcgagccacacgccttcgccctcgccggtggacacgccttcgccgcgctccttgcattcgcggatgatcgaggcggcggccacgtcgcgggtctccagcgggtgcatgaaggcctggccgtccttgttgatcagcttcgcgcccatggagcgcaccttttccgtgaccagcgcgccgaagatctgctccggataggccgcgccggtgggatggtactgcagggtatccgcgtagagcagctgcgcgcccgcgcggtagcccaggatcaggccgtccgccgtcgcgccatagtggttcgaggtggggaagccctggtagtgcagccggcccgcgccgcccgtggcgatgatcacggtcttggcgcgcgcgatgaggtgctcgccggtttccatgttgagcagcaccgcgcccgcggccttgccctcgtcgtccagaatcagctcgatggcggaggtgaagtccaccaccgggatgccgcggttgagcacttcgtcgcgcagggtgcgcatgatttccgcgccggaatagtccgccgccgcgtgcatgcgcttgcgcgaagtgccgccgccgtgcgtggtgatcatggtgccatcgggcgccttatcgaattccacgcccagctggttcagccactggatcgcgcccggcgcgtccatcaccagcttgcgcaaaagctccggcacgttggcatagtgcccgccgcccatcgcgtccagatagtggatggcaggggaatcgttgggcttgtccgccgcctggatgccgccttcggccatcatggtgtttgcgtcgcccaggcgcagcttggtggcgatcatcaccttggcgcccgcctcgtcggcctcgatggccgcggaagcgcccgcgccgccgccgccgatcacgagcacgtccacgtcgtaatccggcgcgttgaggtccagatccaggcccagcacgcggctgttgccctgcaacagggcggccagttcgtgcggcactttatcgcccttgttggggccgactttgagcgcctcaaagctctcggtcttataatcgggatggaactgcgccaggagcgcgtccttttcttctgcggtcatgcgccgcggctcaagcgcgatgtttgcgctgcggttggcttcgaccttcttcaaggattccagcatttccggtgtaaacatgcttgcgcccccttacttttcgatgtccctgtggttgtacagctctttcagctcttcgaccggcttttgcatcacgtcttcgagcagctggttgaactcgccctcgctgatttcgcgcacgcgctcggtgaggtgtttggcctcgggcgcgatgtacttgccgttcaggcggcgcgccagcatcgcgacctgcggatgggagatctgcgcggggcagcgcgaggagcagatgccgcacatcacgcaatcgaaggattcttccgcgcacttggcgtattcgccgcgctgcgcgtaggcgatatattgcatcacgttcaggccctgcgggcaagccttggtgcaggcgttgcagccgatgcagttgtagatttccgggtacagctgcatcatgatctgctcgtccggccgcaccttgttgatgtcatacacttcctttaccagcgggaagaatggcagggtggccacgtacatgtcgttttccaccttggtctggcaggcgagcgccactttcagctgccggtcgcccttgatgcggtatagcgtcgcgcaggcaccgcagaagccgttccggcaaccgcagccgcgcacgagctgatagccggcatattccatggcgcgcataatcgtgaggtttgacggcacagagtatttcttgccgaacaggaatacgtttaccatttcgctcatgtcttttctcccccgtcaatattcgttgggcagctcgtccaactggtcaaagcggaataccgggccgtccttgcagacgtatttgtcgccgatgttgcagcggccgcacttgccgacgccacacttcatgcgcagttccatcgtggtatacacgttgttgcgcttaaagccctgctccatcagcgccttgagcgtgaacttgatcataactggcgggccgcagaccagcaccgttttgttgggatcgaagcccagctccgtcacaaaggcgggcacgaaggccacatgcccgtcccagccttcctgcgcgcggtcgatggtcaggtgtacgttcacgccgggcgttttcgtccattcgttctggatttcgtcgatgtccaccaggtcttcggccgagcgcgcgccatacaccacgtccaccgtgccataattgtcgcggttggcgcgcacgtagttgatcaccgagcgcagcggcgccaggccgatgccgcccgcgatgaaaatgagatccttgcccttcaggtcgccctccaccgggaacccgttgccataggggccgcggatggtgatctgctggcccacgtccatctggtgcagccagctggtgaggcagccgcactttttgatggaaaattcctggtattcgcgcaccgtgggcgaggaagtgatggagaacatggcttcgcccaccccggggatggaaagcatggcgcactggccgggaatgtgctcaaagcacttgccgccgtccagggcctgcacgcggaaggttttaacgtcgggcgtgtcgcgccggatatcggtgacgacgcccagcatgggaatcaatgcgttctggttcatttcgcgtcacctccaagcgccttgatgaccttgacgatgtgggaagaaaccgggcacttcgccacgcaacggccgcagcccacgcaggagaacatgccgtcgttgttggcggggaaatacaccagcttgtgcatgaagcgctggcggtagcgctcgagctgcgtcgggcgcggggtgccgctggccatcatggtgaagtccttgtacatgcagctgtcccagcagcggtagcgctggatgccgtgcccggtatcgaaatcgcggatgtcgtagcactggcaggtggggcacacaaaggtgcacgcgccgcagcccaggcaggcgcgggaaagatccgcccacttttcggaattgaacttttccatcagcacgtcgccgccccagccgtccagcgtgaggtctttgagcggcaggcggtcgaggatttcgcgaatggcctgcttggccgcgtccgccgcggtatcggggcattcttcgaggaagggcttggcggtttccgtcagcgcctggcccttttcgctctgcggctgccaatagagtgtgtcgccgtcgatccagcaggccacgtcgccctgcggcgcggtcgcgtcgatgccataggcgtggcagaagcaggtttccgccgggcgcgcgcaggcgatggaaacgatggtgccgtttttgcggcgcgcggcatagcccgggtcggccggctcggaaaggaacacgcgatccagcacgtccagcgcgcgcacgtcgcaggcgcgggcgccgaagagcacgaacggctcatccggcttttccggcatgccgatggcgatgttcttgccttccattttgaagtgtacgatgtcctccgattgcgggaagaacgcgtccttggcgctgttcacggtcttcagcacgtccagccgcagggtttcctccgggctccaggcgccgaaattcacctgctccgcgcgctcgatgggcgcgatgactttgccgaaggaggcgagcagatcgctcacgcggctcatagccagcttatacatcatttcgcccctcccttggaaacgacggacggctccacgtcgccggtcgtgtaactggtcagcgggccgcgcgcatccggatccgcgcccgcctggtattcgccatagaagcgattgatatcctggatgaatttgcggttgagcaaatgcagcgggatgccctgcgggcaaacgcggctgcactcgccgcaatccgtgcagcggcccgccacgtggaacgcgcggatgatgtggaacagctgctcctcaaacgggtccacgttcgccttgccgctcacgccggaggcggggttgtcgaacacgcagttcaggcacgagcaggcggggcacacgttgcggcaggcgttgcagcggatgcacttggaaagctcgccctgccagaacgcgaagcgctcctgcggggacatggcttccagcttgctcaccatggagaagcggtcgcgatccggctcggtatagggctcgggatcggcgatcacttcgtcgaacgccttgtgttccttgcccttgcagcacaggcagcgctcgagcagcgcttcttcgcgcgggcaggtgtggtcgccatagagcgtgtgcacggtgagcgttgtgccatcgtcttccacgccggtgatgccctccatgcccatggccgtgagcttgcgcacgtcgatcttgccgcggcaggggatgcccagcacatacacgccttcgcggcggatgcggtgctcgtgcagcaactggttgaagctgtaggtgtcgcacggcttgagcagcgcgagcacttttccttcttttttggtttccgcgatcaggtatttcgaaaggttcgcggcgcagaaaaggtcgtatttcaggccgtccagcgcttccgccgagccgaatacggccggggtgcggtcgtacgccagctcgcccgcttcccagcccagcacgcggtctaccgtgccggcggcaagcagctcctgcgccttggccttgatttgatccactattgcttgcatctcagatcccccaacttcacattctcgcccagttcggtaatcgtctgcacaaaatcgttcatcgtagccgcgaacttggtgccttccgccgcggacacccactccacccgggtgcgctcgcgttcgatgcccaggtaatcgagcatgctgaacaggagggtcatgcggcggcgcgtgtagtaattgccggtggaatagtggcagtcgcccgggtggcaaccgcacaggatcacgccgtcggccccgcgctggaacgcgcgcaggatgaacagcggattcacgcggcaggagcacggcacgcggatgattttcacgtttgcggggtagctcaggcggctggtgccggccagatccgcgcccgcgtagctgcaccagttgcagcagaacgccacgatcagcggcgtgaagggttttttctcggttacggcttgcatatcgcgtctacctccgccatgatttgctggttgctgaagcccttcagatccattgcgccggacgggcaggccacggtacacgcgccgcagccctggcacacggcctcgttcactagggcgatgcgccgcacttcgcgccggccgtggtcgttgacttccttatcgatatactcgatcgcgccatacgggcagacgttctcgcaggtggagcagccgttgcacagcaattcattggaatgcgccacgcagggattgcccaccagcttgtccttggccaacaggccgatgaccttggacgccgccgcgcccgcctgggccacggtttcgggaatgtccttggggccctggcacacgccggagaggaacacgccggccgtggggctttccacggggcgcagtttcgggtgcgcctcggtgaagaaatcgttggtatccatgctggcggtgagcatcgtggccagcgggcgggcggatttatccggctcgatggccgcggccagcaccaccaggtccgcgtcgatcttgatctgctcgccgccgatcaaatcgctgccctgcaccagcagcttgccgtcgtgcggcacgaccttgccgaccatgcccttgatataatccacgccgtattgctccaccgcgcggcggtagaactcgtcgaagttcttgcccggggtgcgcacgtcgatatagaacacgtgcacgtccgtatccggatacttttcgcggatcatcatcgcgtgcttggcggtgtacatgcagcagatcttggagcagtagggcttgccgcaatccgtggtatcgcgcgaacccacgcactgcacgaacacgatcgtcttggggtgctcgtggtcgctggggcgcagcagcacgcccttggtggggccggccgcgttcatcaggcgctccagttccaggctggtgatcacgtccggcgattggctataggcgaattcgtcgtagcgctccagtgaaatggggttgaagcccgtggccgccacgatggcgccgtactgctgggtgatgatctcgtccttctgctcatagtcgatcgcgcccgcggcgcagttcttctggcagatgccgcacttgccggttttgaatttgaggcaggcctcggtgtcgatcaccggcacgttcgggatggcctgcgcaaaggggatatagatggccgtgcggttggaaaggcccaggttgaactcgctcttggtcttgcgcgaggggcacttttccatgcacaggccgcagccggtgcacttggtctcgtccacatagcgcgcctttttgcggatttccacggtgaaattgcccacaaagcccttcacagactgcacttcgctccaggtgtacaggtggatcttttcgttctgcgccgcttccaccattttgggggtgaggatacaggccgcgcagtccagcgtggggaacgtcttatccagctgcgccatcttgccgccgatggtgggcgtcttttccacgatgtccacctcgtagcccgcgtcggcaatgtccagcgcggtctgaatgcccgcgatgccgccgccgatgaccagcgcgcgcttgacgaccgggctctccccggccttgagcggcgtgttgagatgcaatttggcgatggcggccttggcgaggatgatcgccttttcggtgccctccgccatatccctgtggatccacgagcactgctcgcggatgttggcgatttccaccatgtacgggttcaggcccgcggcctgcgccgtcttgcggaaggtcgcctcgtgcatgcgcggcgagcaggagcagatcacgatgcccgtgaggccgtattcgcgaatggcctcgcggatgcgcgcctggccgccttcggagcacatatactgatagtctgtcgcgaatacgacgcccggctcatggctggccgcttccgccacagccttgacgtccacggtggccgcgatattgctgccgcaccaacagacaaaaacgccgattttctgcaatgaactcacttctccctcgttatggcaatggcgtcgcgcgcggcaatccgccgcccgcgcgcccatggcctaagtcatttcgcgtatttgcgcagggcgctggtaatggcctgctgcggcatttcgctgtccaaaagcgcgggaatatcattcatggtcatgtggttggcgtccttctggcggatcatcgccaggcggatgccctcaatcagcttggcgggctccacgccgcgcgggcaacgctccacgcaggcgaagcagctcaggcacatgaacacgctgggcgaggccatcagccgctcgatatcgcccttttccaccatagccacaaactggtgcggatgatactccatctggtcatacgcggggcaggtaccggagcacttgccgcatttcatgcacttgcgcgggttcacgcccgtgatgcgcaaaaccgtgtcgcgcagctccatcggattcacggccatgctcaattcgcctccttcacgccgagcgcttccgccagcagctcggtgaaatagtacaccggcggatggccttccttgcggttggtgtacaggttgtaccggcacagcgggcacgcggtgatcacgctgtccgcgcccagatcccgcatggaatccaggatgcggctggagagcttttcgggcacggacttgtcttccagcgccacatacgcgccgcagcactcgttgcgcagcgcggaaaccaccggttccgcgccgatggcgcggataaagtcttccagaatcgtgggattttccgggttgtcgaactgcatcacgtcgttggggcgcagcagcaggcagccgtaataggcggcgattttgcggcccttgagcgggtttacaaccttctttttcagctcggcaaaccccacgccgtcgcgcagcatttccagataatgcaccacgcgggtttcgcccgcgtagggctcggcaagctccagatagcggttggccttgccgcggatatcttcgtttgcgcgcatgtcctcgttcacgcgcttgatcacgtggtggcacgcggagcacagcgtgaggagcgggcgccccagttccttcgcgctgttgagcgcgcgcaccgacgaaagccgcgtggcgatttcatcctgcgcgatgggatacaccgcgccgcagcactgccactcgggcagctcttcgagcgtcacgcccagcgcctcggccgaccggcgggcgtacgcgtccaggtccttggccttggttttgagcgtgcagcccgggaaataactgtaaaccatgcttgcgatttcccccttacaccatctgctcgggatggaacaccgaatcgaatttttccgccgtgaggaagcccaactgcacgcacgcttccttcagcgagatgttttccttataggccttcttggccgttttggccgcgttgtcgtagccgatataggggttgagcgcggtcacgagcatgagcgagttgtgcaggttgtgcgccatcttctcgcggttggccttgatgccggacacgcaattgttgttgaaggagcggatgccgtccgccagcaggcgcaccgactgcaggaagttg

SEQ ID NO: 851 - DNA, 32759 bp, Unknown
  16S sequences of unknown bacteria
ccccggccagccccggcgaagccggggcgccctgcgggccgatgcgcggtatgcagggatttgcggggaagcagaaaccagcccctccttttgcggagaggctggcggaaaagcaaagcgggacaatcagccctccgcgccgcggcggttggtgatgccgcggataacgaacagggtagcaagcataaggacaatgccgatgggcaggacgatgacggcattgggaacgaagcctgcgatgatgtaggtaaagaaagcaacaatagccacagtggctgcgtacgggaactgggtggaaacatggttcaggtggttgcactgggcaccggcggaagccatgatggtggtatcgctgatgggagaaacatggtcaccgaataccgcaccggcgagacaggcggaaacgccgacgatcatcagggtgaagtcagccttaaagacctcggtgacaatggggataagaataccgaaggtgccccaggaggtgccggtggcaaacgccagtccgcaggcaaccagatagataacggccggcagcaggctgtaaaggccgctggaggcactgtgcattacgccggcgacaaactccttggcgcccagcagagtggtcatattcttgagggaggtggccagggtgaggatgaggatggcgggaaccatggcgcagaagccctggggaatgcagctcatggcatccttgaaggaaatgacccggcggagaacgaaatagatgacggtaaagaccagcgccacaatagcgccccagggcaggccgaagaaggcatcgcagttggcaaaggcatcgatgaaattatcggcgccattgaggtagccggagtagaccaaaccgctgacgcacagcaccaccagcacaatgatcggcagcagcaggtcgatcaccttagcgcgaggattggaaacttcctcaacggcctcgggctgctcgccttcggtgaacaggtcgttattgcggatggcgttaagctcatgccggcgcatggggccgtagtccatgccggtcttgcagaggaacagcaccataacgatagtgagcagcgaatagaaattaaatggaattgcacgaatgaacagatcaaaaccgctgtaatcctccacaacgccggagacggcagctgcccaagaggaaatgggggcgatcatgcagatgggggcggcggtggcatcgatgagataggcgagcttggcgcgggaaacacgatggctatccgttaccgggcgcatgacgctgccgacggtgaggcagttgaagtagtcatccacgaagatgagcacgcccagcaggaaggtagcgaacatggcgccgccgcgggtcttgatgtgggtcttggcccaagcgccgaaggccgcggagccgccggccttattgagcagggcaacaaggatgccgagcagcacgaggaacatgaagataccggcgttatcacggatggcggccactacgccgtcattgagcagagagtcgagcgcctccacatggaagccggcatagaacagggcgccggccacagcgccgatgaacagggagctgtacacttccttggtgatgagggccaaaccgatagcgatgatggggggaacgagtgcccaaaatgtaccaaacataagatttacctcctgaaaaatgggacgaaaaaagccatgagaaatgcggaaaacaaatctcatggccggcgtaataaaaacaaatagcaataacgcaggaacccgctgatagctctccacagtttctgtgacagtccgcagcatattctgctgcgtcccagcaaaaaggctctcgggggagcgctttcgcttcggcggctttccctttctccctccccggtctcccggaccgtatggggatggttactgatgaaacccgcaacctctaccaaattggctttattctgttgtcacatttatagcaccgttagcggaacaatgcaagtgtttttttacaaattggtcacattttggggacacgctaatatattgacgaagttttgcgtgatattttgtagtaaatgcacaacgaaaaagaatgaggctccccaccgaagggagagcctctggaaaagttattcgtggtgcaggatcatgcgggcacatttataaacatcgccgcagccaagggtaaggatcagatcaccggactcggaataccgatcgacataatccgccatggcctggaaggagggcaggcagacacagccggggatcttttcgcccagatcctccgaggtgatgtggtaggtattgacctcccggctgcccatgatgggcgaaagcaccacgcggtcggcgatggacaaggcggagacaaagtcctccagcagcatataggtgcggctaaaggtgaagggctggaacacggcccatacacgcttaaagtccagctccttggcggcggtgagggtggcgcgcagctcggcggggtggtgggcatagtcatcggcgacagtagcacctttatgcgttttgcccagcacctcaaagcggcggccggccccggtaaaggccgaaagcccggcggcagcctgctccggggtggcgcccagctgcatggcgcccgcggcggcggcaatggcattgaggatattgtggtcgccggggatttgcaggtggatctcggtgaggggcttgccgcggaacatgagggtaaagcggcggtccagaccacccaggtggcggagattggcggggtaatagtcgttggtgtcctcccagccaaaggtgaggaaggttcttccctcccctgccgcttcctccatggcacggcaggttttttcatcgctgccgttatacaggacggtatgggccttttgggcgaacctggtatagctcttcatggcgttttccacggtgtggaagtattccatgtggtcattatcgatattgaggacgagggcgatatccgggtgggtggaaaggaaggtatccttgaactcgcaggcctcgtacacaaagcgctgcgttgccccgctgcgcccgtacccgcctatggtccgcagcttgccgccgatgacggcggagggatccagtcccgccatatagaggatctgcacgatcatggcggtggtggtggttttgccgtgggtgccgcaaacgcccagcgcctcgctgtaccagctggagacggcccccagcattttggcacgctcccacaggggcaggccgctttcccgcgcggcaatcagttcggggttggtatccataatggcggcggaatagagaatgagatcggcgccccggatattttccgcccgctggcccatcatcacctcaatgcccatctgacgctccaaattgacaatgtcgctttcgttattatcgctgccggtaatggtgtagccccggccgtgcaggatttgcaccagcgggaacatgccgctgccgccgatgccaatgcaatggatatgtttgaccccttccgggattgtttcaatcggttttaccatactgtgaccgccacctttaagaatttcatacatggtatattataccccattagtagggcttttgacaatagcgacgggcattttaatacaaaaagcggcgggaagtgcataatttgccaggcggcggacaaggctaatggcaagcgaagcccgcaggcgcaggcggcgggcggcaggatcggatgagggcaaggagggggcgaaggcaggctggcgcccggtgaagacgggctggcgcctgtcgaggccctgacacagccctcgccgatcattccgttcgctgcctgcgcccaacaacaataaaaggcatctgaaaggagaaacaggcatgaatatcaccgatattcggatccgcaaaatttacgaggacgcacggctgaaggcgttggtttcggtcaccatagacggcgacctggctgtacacgatatcaaggtcattgaggggccggagcggctctttgtggcgatgcccagccgcaaggatgagaatgggacattccgtgatattgcccaccccatcacgccggaggcgcggcataccctggaagaggcgatcctggaccgataccagacccacctggcccagctggaggccgaacaagccgcgactccgcatattccggcataaggctgcataatatgggaggaaaggaccggcaggctctttcctcttttttctttacaagacaccggaattttgctataatatcacatggtcaaagcgccagtaccgcccggtttgtgtaccgcgggcggatgacgaggtggagggagtatcgaaaattcggcggatgccctcccgctgctgccacagcgcaggccggcgcaaaaacacgggcgaccgtgcaacaaagagccggccatggataacgaacaaaacagatatcccatgcggggaatgttttttggcatccctgcgggactccgcggagagaaacagcctgtattctcccctttggttttcgttatcctgccggcgcagctgctgtaccggcccgccgtgccatagggtaaaagcacttttagcgaaggtttctctcccgcgccatggatatctgcgggaaaggagccttattatttatgtgtggaatcattggttattcgggggcggaatacgcccgggaaaagctgctgcatgggctggaaaacctggaataccgcggctatgatagcgccggtattgccctgtgggacgagggaaaaatagaggtcatcaaggcggcagggcggctgagcaacctgcgggccgcctgcggcgaccagtgccttgccagccactgcggcatcgggcacacccgctgggccacccatggcgtgcccaatgatgtgaatgcccacccccaccggcaaggccgtgtgacgctggtgcataacggcattatagaaaactaccgggcgctgcgggagcggctggagcgtgaaggatatcacttcctgacccaaaccgataccgaaatagcggcggcactgctggaccaccatatgaagctgcacgagagccctgtggcagccatccatgccgctacggcggagatggagggagcttacggcttctgtatgctgctggaaggggaaccagataccgtttacggcatccgccggggcagcccgctgattgcggccaaggatgagaccggtagctatgtggcctccgatgtacctgccattatagaatatacccggcagtattacctgctggaggaggaagaagtggtggtggcccattacggggagctgcgtttttacgccccggacgggacccccatcgaaaaagaagccaagatcgccaactggtcggtggagcaggcacaaaagggcggctatccctgctttatgcagaaggagattcacgagcagccccgcgccctggccgataccattgatggacgcaccgaggatgggtttgtgacttttgagggtgatggcctgccggatggcttctttcgggatgtgaccaagctgtatatttccgcctgcggtaccgccatgtacagcggtatggtaggtaaggcgatcatagaaaagctggcgcggctgccggtagaggtggaggttgccagcgagctgcgctaccgcgatcccatctttaccccagggtgcgcggcggtggtggtgagccaaagcggcgaaaccgcagataccctggcggcgctgcggctctttaaggaaaaccatatccccgttataggtatcgtgaatgtggtaggctcctccattgcgcgggaggccgactactgcctgtacacctacgccgggccggaaattgcggtggccagcaccaaggcctattcggtgcaggtggcaatgatgtatctgctgggcttccgcattgcggcggataagggcgccccgatggactggtgctgccgccagctgccgaagctgctgaatgctgtcagctacctgccgcatgtattggccatggaaccggaatttttccggtatgccgagggactgaaaaatgccgagcatctcttctacctcgggcgggggttggattactcgctggcgatggagggctccctgaagctcaaggagatcagctacattcactgcgaggcctacgccgccggagagctgaagcacgggactatttccctgattaccgacggcaccccggtgatagcattggcgacccagcgcaagacgctgggcaagatgataagcaatgtgaaggaagtaaaagcccgtggggcgcatgtgctgctcattacgctggaagggctggaagtcgaccccgaatgctatgatgagattatccggctaccggcagtggaggacgaatatgtgccgctgctgttagttgtcaccttgcagctcatcgcgctgggagcggccaatgcccgtggctgcgatgtggataaaccacgcaacctagccaagagcgtgacggtggaataatcaataaaacgcgaaaagagaccctgcgaagggtctcttttttgcggcatgcataaaggcagggcggcggggcggagcgagggagggttgcctatcccaaagggatggcgccccgacggagagcggagcgccgccgcccggatggggcaagcttaggctttggggtagccctgcgggtttttgctttgccaggcccaggtatcccggcacatatcctgcagagtatactgtgcctgccagccgaaaagctcctttgctttggcggcatcagcccagtattccggcagatcgcccgcccggcggggaccaatgacataggggacctcccggccgctggctttccggaacgctttgatgacctccagcacactgtacggggtaccggtgcccaagttgaccgccgtgacaccagggtgttccatggtgtagcaggccgcccggtggtgccccgcagccaggtccatcacatggagataatcccggcggcaggtgccatcgggggtggggtaatcatcgccgaacaccataaggcgttcccgccggcccaccgcgacctgtgcgatgtaaggcagcaggttattggggatgccctgagggtcctccccgatgaggccagaggggtgcgctccgatgggattgaaataccgcagcagcaccgccgaaagggtcggatcagcgtgacaagcgtcttccagaatcttttcgatcatggccttggtggtaccgtaggggctggagcactccccacgaggcatatcctcccggtaagggatgggattgagcgagccgtaaacggtagcggaggaagagaagataaaccggctgacaccggcctccttcatacactccagtaccgtcagggcggcatcgagattggtacggtagtaggaaaggggaatttcgacagactcccccaccgcctttttcccggcaaagtgaatgacacagtcgattttattctcacggaagatgcggcggacggcttcgcggtcggttacatcgacatggtaggcaggaaaatcccggccggtgatctgccggaggcgttccactgccacggggctgctattggaataatcatccgctatgacaatatcacaaccccggttcagcagctctactgcggtgtggctgccaatataaccggccccgccggtcaacagtacattcatgggttcacgctcccctcttttttagcttaattataatcgactgcccagtaaaatcaatccccctgccaaaagtgacagggggataaagttataaaagctcaggagcgcttgtcccgatcgtgattgagcatatcaatgagggcgctgatatccaggtcatcattgatgggctcctgctcggtctgcggctccacttcagtgatcttgtcctccgggacctcggtatccaccgggggagtggggatgcggaagccggattcatggtcaaagttggtggcaatgacgacgatcttgatctcatcctccagcttttcatcaaaggcgacaccccaaatgaggttgacatccgggtgggcggcatcgtggatcatctgggaagcattggtgatgtcctccagatcgacatcgggcggaacgaggaagttgacgataacgccgcgggcaccgttgatggaggtttccagcagcggagaggcgatggccatgcgggcggcttcctcggccttattggggccgctggcggcgcccaggcccatgtgggcatagccggcgtccttcatgatggaggtgacatcggcgaagtctagattgatgataccgggaatattgatgaggtcggagatgctctgtaccgcctgcagcagcacttcatccgccttggcaaaggcattggccagagtgatcttttcctgcgagatactgcgaaggcgctcattggggataacgagcagagcatccacatgctccttcagccgctcgatgccggccgtggcctgatccatgcggcgcttgccctcaaaggagaagggcttggtaaccacaccgacggtgaggatacccatatcgtgggcgatgcgggcaataacgggagccgcaccggtgccggtgccgccgcccataccggccgtgatatataccatatcggcaccgcgcagcaccgaggtgatctcatcttcgctttcctccgctgccttttcgcccttcatggggtcgccgccggcaccctgcccgcgggtcagcttatcaccgatgtgcagcttgtaagaggcattggaaaaacgcagggactgattatcggtattaacagagataaattccacgctgctcatgccggattggatcatacggttgacggcatttccgccgccgccgccgacgcccaataccttgatcgcagccattttttcgtaatcgttatccagctctatattcatcatcagcactattgcctcctgtttagagttttctcctaatctatcataacagaaacatcatgaaaatgcaacccaaaaggcgtatatctgctactgttttccacccaaaatggccagatattgtgcatccgccacctgggtaagaggcagctgccgggtgtaggcccgaccgctgaccgaaacatcaaggtacccgataaaatcggcgggaagctcatcctggatgatcttttgggcggtgagcagcttggtggccaaatcgtattcgctgcccaggcgcagctggatgcggtcctgatagacagccttgtagctctgctcctccccgatctcaatatacccgatctcagggagcatcccggcgtcctccagggccgcgcgcaccttatccacaccggccagggtcttctgccattcctccggcagcttttccccggcggtatagccggaaaaatcggcaccaagcagcagacaggtatactccggcagagaggcacactgctccagcaccttgccattggcggaaagggtggtgacccgccccatgctgccgatacaggcgtaaatggtattgaactcgtgcagctccagttccagggtatcaggcaggcggcggtgcagcgttacacactcaatgtaggggcacagggcggtaattcgctcattcagggccttttgggaaatggtgaagatattctgctcctcccctatgtcggcggcttctatgatatcctcggcggcgtagcgggtactgccggtcacttctatatgggtggccctgcaaaatacactgacacagtaaaagcccacgccgcacagcaccgccgcaagcagcaggataaacaccgcacggcggcggcgacgggtctgctgtttacgggtgggcttggcagtcatgggctttggttctccttcctttggtttagacttccgtcaggtaaatatccgcgcccagatggcgcagggttggaacaaaatcggcatagccgcgttcgatgtgggagatagctgtaacgctgctttctccctttgccgctaatgctgctagtaccacagcggctccggcgcgcagatcggtgcaggtgagggctgacccgataaggggcgccccccggatgactgcatgactgccgaccaccgtgatatccgcacccaagcggcgcagttcctccacatgggcccagcgccggggaaagaccgtttcggtaaaggcggtgtagccctctgccgcggcggccagcgccataaagatggcttgcagatcggtgggaaagccgggatacggcagcgtaacgatgctgccggccccctgtaaatgttctggagcggtaagggtgatgctctgctccccggtggtgatacggcaccccatacgccgcagcgccgccaggggcgccgccaagtgttccgggctggcgtacactgtgatctctccgccggtaatggccgcggcagcaaggtaggtcgccgcctcgatacggtccgggaggatggcatagcagcagccggttagcgcttccctgccctgcaccaggatggcgccatcgggctgggattctattagggcgccgcagccccgcagataggccagcagatcggagatctccggttcggcggcggcaccggtgattttggtttcggcaggcgttcccgccgccgcgatgagcaggttttcggtagcgcccacgctggggtagggcagctgcaccgcggcaccatgcagaccgccgggagcggcacagcgcagggtatcaccctcctcgctgatgaccgcgcccatttggcgcagggcggaaagatgcaaatcaataggacggccgcccagggcacacccgccgggcgggcacagggtcacgctcccacagcgggccagcatcccgcctaggaacagaatagaggacctcatggcccgcatccattccgacggaacatcccggcagccggtatcctcccgggtaatgatcagggtatccctcgcccgttctaccgcaaagcccaggtgccgcaggatgtgacagctcaccgccacatcgctgaggttagggcagtttttaatctctgaacgactgcacagcacggtagccgccagaatgggcagcaccgcgtttttggcgccgtgcgccgctatggtcccgcttagtctgtttcctcctgtgatccgcaatccgcgcataaacggcatcgctcccccctgtattttcccttgggctttcgggggtattctatgcctatacggaatattgggtgaaaaaacaggccttacagcttattttctgtgagttttataaagatccaacagttcatcggtgatatggccgcatgcattggggacacccagtgccttggccgccagaccgatctcccgcagcttttcggggtcggcggtcatttcctttacagccgccaccagcttttcgccggtcagatctttttcctcaatgaccacggcagccttatgattggccaacaccatggcattgtggtactggtggttttccgccacattgggagaagggatgagcactgaggcccgccccactgcggtcagctccgccagcgttatggcaccggccctggctatgaccaaatcggcagccgccagacaatcgggcatatcatgtatgtattcccggatatccaggttggggttattctcataagcgacgcccttttcccgcagcagccgtggcagcagctccaccccataccggccggtggcgtggatgtggtgcagctttccctccggcacatgccaggccatcagcgccgctacggcttcattgatggtctgcgcccccaggctgccgccaaaggacaacagacacagctgcccggggcggacccccaaacgggcgcgggcggcggcccggtcggccgcaaggatctccggacggacggggttgccggtgacgatgtaatcttggcgctgcggcaggtgcttttccgcttccggcaccgccagcaggaacttatccaccttctgcgccaccatgcggttggaaacaccgggcagggcattggcctcgtgggtcatgcaggggatgcgcagtgccgctgcggccagcagaatgggggccgaaatatagctgccggtacccatcaccacatcgggggcataatcccgcagcagcttttcggcacggctgcgggcggtcaataaaaggcagacgcttttggcgttgcgcttcacattttcccatgtaaggcgccgctggatgcccatggagcgatagggggcaaagcgaaagcccgcccgcggcaccagggtggcctccatgccgttggggttgcccacaaacagaatatcacagtccggcacccggcggcgcagctcggtagccaccgccagtgcgggattgatatgcccggcggtaccgccgcaggcaaacagaaccttcataaagatgctactccttttctactgtcgtttggcgggagaccgaaagcacgatgcccatttctcccagcaggatggccagcgccgtgccgccgtaggaaaagaacggcaggctgatgccggtggaggggatggtattggtgacgaccgccatattaaggatggcctgcacccccacctgggcaatgaagccggtgaccagcatggcgccgaagcgatcgcgggccttaataacaatggtaaagccccgccagatgagaagggcgaacagcacaatgaccaccagtgccccaatgaagcccagctcctcacagacgaccgagaacacatagtcattctgcggttccggcaggaagaggtacttctgcctggagttgccgataccggagcccatcaggccgccggagccgatggcatacagcgactgcaggatctgatagccggtgcccaagggatcagaggccggattcttccaaatggtgatacgctccatggcgcgctcgtgcagcgagggcaccagcataatggcggcgacacccgcggcggcaatgcctcccgcggcggcgatccacttcatgggcaggccgcccaccaccagcatgatgccgcccatcaccaccaacagaatggtggcggaaaggtggggttcctttacgatgaggccggcataaacgcccagcaccaccgcaaaggggaaaataccgtagcggaaccgccccagctttttttcattggaaacaagcaggtgcgaaaacagcagtaccagtgagaatttagccagctccgagggctgaaactggaaactgccgatgaaaatccagcgatgggcgtcattgaccggcggcatgaagtagcacaggataagcatggcggtgaccaccgggaacagcggccaggccagcttgcgccacacatggtaatccatgcgggaaaaaacaaacatggccccaaggcccacgaccgcccacagcagctgccgcacaatgtagtggtagctgttgccttcgcggtaatagccctgcgcatagctggcgctaaacatcatcacaagcccaaataccagcagcagaatgaccattaccaagaaggtgaggtccacactggtattctcatatcgggggaacaggcggcggaagaatccctcctgtgattttggacgcgctctgcgcctactttctgccatggctttccgccccctttccgttgctttctaaattaaatcatcagataaaccggagcgctagaatgcccagcgcactcccgatggcggtgataacggcaaacatcaccacaatctgtttttcggtgtagccgctcatctcaaagtgatggtgaatggggctcatcttaaagatgcgcttgccatgggtcagcttaaagtagcagcgctgcagcaccaccgagccgatctcgataacataaataatgccgaacagcaccacaaagaagggcagcccggtgccaaaggccagcgcgatgaccataccgctcataaaaagggagccggtatcgcccatgaataccttggcggggtaatggttccagaacaggaagccgatgcagccgccgcccaatgcccccgccatgatgcccatttctcccatgcccagcaggtagcagaagatgagatagccgatggacaataccagcgtcacggaggaaagcaggccatccaggccatcggtgaaattgacagcattggaaagggcaatgatggcaaacatggcaaacacataatagaataccccaaaatcgtaggtgccgatatagggaatggttaccatggtggactgcgtgccgctgatgtgcagaagcagcaggtacaccgcgccaaacagaatctgcagcgccatcttctgcttttcggtcaggccctcattctgcttttttacgaccttcaggtagtcatcgaggaagccgatggccccgaatagcagcgccagcaccaggccatagaacatacgggcccgcataattgccgacattggatcgcccacggtagaggcatgcatgaacagataggctaccaccaccgcaatgggaatgcctatgataaacataaggccgcccatggtgggggtaccctgcttgccctggtgccacttggggccgatctctaagatagtctgcccaaaatgcagacggcgcagcatgggcaacagccaaaagccccccacagcggtaataacactggccagcagtacggccacgatgacagcggtaatattcatgatgcacttcccttttctgttctgttatattatgcgtggtaatcccggtaaaatgcggcaataacctcttccagcgccatgccgtggctggccttgcaccatatcacatcgccccggtgcgccgtggcggccagatattttgtcagcgcttccttttcctcaaagtgatgggcttccatcccggcggctttggcggcccgggtggcatactgtgccagggggccccaggtcagcagcaggtctatcccctcttgggcacacagggcgccgatctcccgatggctttcttcggcgatatcgcccagctccagcatatctgccgctacaaagatgcgacggccgtcacaggggaaacgccccagtgtcttgatggccgcccgcatggaatcgggactggcattgtagcagtcctccaccatggtaatgccctcatgctccaccaccttttggcgctggccgctgggagtataattcttcagggcctctatggcggtttccgccggaatacccatcgcccgccccgcgccaaatgccgccagggcgttcagcaccaggtgctccccagtgccggggatagtggcgcgccagctttggccctcggcatgcagcataaaattggtggaaagcggtgtggcactgacgatggtcgccttgatctccgcccgcgggctgttcaggccatagcgtactacatgaaggcgggggatgtcaacggtatgcagcaggtcgttatcatcacacagcagcagtgtggcgccatccggtaaagcgtcggccagctccagcttagccttcaggatattttcccggctgcccagatgctcgatgtgggaaacgccgatattggtgatgatacccatcatcggctttgccgcgtagcacaggtccttgatctcattcggggcgctcatgcccatttccaccaccgctacctcagtttcgggggtaatgctcatcagtgttttgggcgcgccgatctcgttattttggttgccctcggttttgataatgcggaaggaggaggccatcactgccgctaccatttccttggtggtggttttgcccacgctgccggtgatgcctatcacctgggccggcattttggcgcggtacagcgcggagatttccaggagcgcccgcaaactgctctttacccgcagtaccttctctgctggggtgtagtcgccgtcatgctcggccaccgccgcttcggcccctgccgccagcgcccggttgatgtagtcgtggccatccacccgttccccgggcagcgcaacaaaaagcgtcccggggccggcttcccgactatcggtgatcacacgggtgatctctccctccggaggctgggggcagcccagctgggcggctatttctcgcagtgacagtttttccatgggatcctcccgctttttagtatctcagtcacaatctccctttcatcaaaggggatcgttttattctgtatgatctggtaatcttcgtggcccttccccgccaaaagcagcagatcgccctgccgcatcatggcaatggtctgctctatggcctgtcgccggtcgggcacctcccgccagcgggtgtttttcggcagccccactacgatctcccgtcggattgcctccggcgcttcattccgggggttgtcatcggtaatgatgatgccatctgcccagcgggccgcggcttttgccatcagcgggcgtttttggcggtcacggtcgccaccgcaaccaaagagcactagcagccggcccttatgcacccgccgcaggctgcacaggatgcgttccagcgcatcgggggtgtgggcatagtcccgcaggatggttctccccatgccttgccacagcagttcggctctgcccggtacgggtggacactgcggcatcgccgccatcacctgccgggaagttagccccagcaccaacgccgtttccgccgcagccagcgcatcggggagaaagacttctcccgtcaaaggaacgataagctgcccgccccgccacggaagaatgctcctgcccggttcgcagcggtattgccacggcaggtggtaaccggagatcggcacattggccctgtccagcaggcgacgcccataggggtcggcggtattgatgaccgcgcagcggcattggctaaagatctttgccttggaggcaaagtatcgctccatatccccatgataatccaaatgctcgggcgaaagattggtaaacacggcagccgcgaaggtgatcccttccactcgctgctgttccaacgcctggctgcttacctccatcaccactgtggtgatgccgtcctccaccatctggtgcaggatgcgatgcagttcggtaggtggtggggtggtataggggttgggctgtgttttctctccccacactatgccgtccgtcccaatgcgcccggtcttagtcccggcgctttgcagcaagtggcacagcaggtgggcggtagtggtcttgccgttggtgccggtaatgccgatgattcgcagttctttggccggctcaccccaataacgggcgcacagacgagccagcgccgcgcgggtatccgggacggtatattcccggggcaggcccagcttcttttgggtcactatggcggcagcaccccgccgcagcactcccgcggcatcggtgtggccatcgtggcggtctcccttgatgcagacaaagattttatcttttacttccccgcggctatcgcagatgggttccatctccggtggcagcgcttgcagcagtccttcgcattgaacctcccggtcgggtcggttcggcatggtgtcctcctgtgggatgttatggtgatgcttcctgttttacgctgttagaaaatttcacggtgatgagggtacctctcggcacctcggtaccgggctctatgctttgctctatggctaccgcggtatcgcttatcctgccgatgccatcggcatccaggttcagcccggcgttggtcaggatggtattgaccacctgcccggttttgccgcgcacatcgggcacgatcgccttttgctcctgcgattcctgatcggtatacaggatgacggtgctgcccttttgaatgacggaaccggaagccggcacctgggcgataacggtatcgccgccgcctacgataacagcggaaagctgcttttgggtcatggccgccatgcccatatgggcactctggcctacggcattgggcaccgtcacattgatagtcgccagttccgcggcggtatagttagtttctacccccatatagggcaggatctcggaaaggatagcgcccaccacaggagccgccacggtagagccgtacaggtcggtctcatagggttcatccagaatgagcagtaccgccaccttggggtcatccatcggggccacacctacaaaggagtaggtgtagtagccgcggtcagaatccagcttctcactggtgccggtcttaccgccgatgctgtatcccggtacggccgcgtttttaccggagccgtaggtcacaacaccttccatcagtttgcacacctggcggctggtttcctcgctgatgacctggcggcggatggtcggttcggtgaccgaaaccacattgccttcgctatccaataccttatccaccacatagggctcatacaggtagccgccgtttaccgatgcggagatggcggtgatgagctgaatgggcgtcaccttaaagctctggccgaaggaggccgtttccaggttgccctgggtggaattgagctgtgcttcgctgtaaaaataaccgctctcctcgcccggcaggtcaataccggtggtctcggtgagtccgaaggaggtgaagaaattatagaaattggttccgcctatccgctcaccaatctgcatataggcggggttacagctgttctgcatagcctgcgccagtgtttgcaggccatggccggcatgcttccagcagtgctttactataccgcccgccacatagctgccggtacagttaaagctggattgcatcgtcaccgcaccggtttccagcgccgtggccgtggtgatgaccttaaataccgagcccggctcgtaggcctcattcactgccttattgctccactggatttgctgctcgtaggcaaaggcctccttatactcatcgctgccctcctcgtattgggccagcttttgcagggagatctccgaaacgatagcctgcggattattgggatcatagtccggcatggtggtcatgcccaggatcgccccagtattcacatcctgcacaatgactgtcgcgcggttctgtaccgcgtgctcggtcagagcggtggccaggtgcttttctatcaccgattgaatattgctgtccagcgtcagcatcaggctattgccgtcctccgccttggtgatatcctggtaggtatatggcatatcggtgccccaggcgttcttggcagtcactacctttccgggagtgccgcttagggtgctgttgtagtaggcctccagcccgtaggcgccctcgttatcggcatttacaaagcccagcacggtggaggccatggtgccgtaagggtagtagcgggtggtatccggcagcagcgtcacaccgtttattttattatccagggcgaactggtacgccgcgtcggcggtttccttatccacccggcttttgatgacctgataaaagctctttttgttgccggcgcgctccaggataaactcccgatccacacccaggatctcgctcatgccatcagccagcagtgttgcctgctcatcggtaatatccgccggagagaaaatgactcgccaggaggtggcggaagcggctaatatctgtccatcggcggaataaatggtcccccggttggcattgatggtggtagcccgcagctggcggctcatggcctcctgcttataggattctccctccaccagctgcacccggtacagctggtgaatgaccagcccaaagccgacgatgataagcaatgccgccaccagtatggcgcgtccgcgcatttttttattggggatcgaggccattcggagtctcctttccgctaaaatgaggaaaataggagaatttgtcgttctcccgtaaaatgtggcgaaagaggtaagacaggatcttacctcttgaaatctgcaccaccgttacagtctattttatttgatccgcaggtattccagcgcggtatccatgctgtccatcaggctctccagcaccgaaccggaaggcgccgcttcggtgcgcaccgctacatcggtatcattcagccggatgtagctcacctggtaatcctgcaccttgcacaggccctgggcagcggcatagctgtccacctcctgcgcggtcttggcagtcagtttgccgctcagatagctgtattcatcctgcagggcggcatacaggtcgttctgggtctgtatctcattccccagctcaatggtagaaacattctgatacagcaccatcgccaggaaaaccaccaccagcacggcgcaggcggtcaagcgccgcatcgcgcctctctgggccgctttcttgctctgggctttattcttggccaccgggacgggctgcggacgcttggccggctcggccgggacttcgtatagtgaaaggtcgtatgcttcggtgctgttccaacgggaattcatctgccgcccctcctttccgtttcacaccggtgtgggtggcagcgccggtgttacagtttttccagtattctcagcttggcggatttactgcggctgttctgtgccagctcctcggcatccgcttcgatgggttttcggttaatgagcttcgctctcggttttttgccgcatacgcataccgggaattccggcgggcaggtacagccctgacaatatcccgcaaatttctgcttcaccatccggtcctccagcgagtgaaaggtcagaatcacaaagcgtccgccgggattcaagcagtcaaaagcggtgtccagacattgggaaagttggtccagctcactgttcaccgcaatgcgcagcgcctggaagacccgtttggcggggtgtccgccctcacggcgggcggcggccggtatcgtcgcgtagatgagctcgacgagctggccggtatgggtaaagggctctttttccctctgtgcggcaattcgtttggcaatgggataggcaaagcgttcttcgccaaattcccgaaagatgcgggccatagcgtccacatcataagtattcagaatatcggcggctgtcatgccttcccggctcatccgcatatccagcggggcatccacactgtacgcaaagccccgttccgggttatccagctggtaggaggacacgcccagatccagcaggatgccgtctacgccctcgatgcccttttcggccaacacctcggggatgcgggcgaactcgctgtggatgacctctgcggccgggtagggcgccaatcgttttgttgcttccgctacggcatcggggtcacggtcaaagcttagcagttgtccggtggtcagccgctcggcaatggcccgggaatgtcccgcgccgcctgcggtaccatcaatataaatgccatccggtttgatattcagcccctccatgcactggggcagcatcaccgaataatgcgaaaattccataggcccctccttagaattccaaggagtccagctcctcggccacgctttcgctggtcaggtggccaatgtagctctgccagcgttccacatcccaaatttccgcgtggtcggaagcgccggttacgataacatccttctccaggtgggcgtattcccgcaggtggggcggcagcaggatgcgtccctgcttgtccggttctactgtcaccgcgttgctgaagaagtaccgcttcacgctgcgtccgcggctcatgggcagctggttgatcttctgctccagcttgtcccattcctcagcggaatacaccgcaatacattcatccagccctacggtcagaataaaattttcgcccagctgttcccggaacttggcggggaaattgatccggtttttcgggtcaatgctgtgctcgtactgtcccatcaacatctcggatcgtttccccctttccggtttgatatgatggcgaaacagggtaggtactccactcctacccacttttcaccacttacaagctgattataaagcgaaaatgcctacattgcaacacaaaactgttgttcgcgcagggcgtacacgcgcggtttttgtccattctggcccccaatggccgcatttccctaataatgcccagtttcttggtgattctgcccataaacagcaccaaaatttgattaaaaatgtcgaacgcttttccctactccaaagtaccgtttttccgcttctttgcagcaaaaaagcaccgcccggatctcctccggacggtgctgtatattctgttttcttcgggcttacttttccagcggctcctcccgcaggcccgcctggctggcggcctgggccagcgcctgccgggtggtggtgatgttccccaggctcttggccactacctcctggctggtgcgcaggatattctcggcaaattcatagctggcctgcttcatttcccggctgcgggtgctggcctcggtccgaatcgccgttgccttagcttcagcgtcattcaccgtctgctcggcctgcttttgggcatcctccaccagctgttgggcacgggtgctggcgtcgttcagcagggccatggccttggcattggcctgccgcacgatgctctcctgctccagcagctgcttggcccgttcctctgccttgcggatcaatgcttccgcctctcccttggccagagaaaggatctggttgcggtcggccaccacggcgcgtgcctgctttatttcggccggcatattcatacggatggaatcaatgaggtcacgcaccttttcggcgtccaccacgcagcgcccgccggaaagcggcaggctccaggaatcctctagcagctcatcaatatcattcaggatactttcaatggtattcatccgttcccctcccgttcattcttcagtagcattctgttccgggatgcgataagctgtcagcttgatcttcccgtaacggtattcctttttaatctggaacgcccctacctttggcggcagtgcttcgtccagcgccgattcacacaggatcaccccgccgggggacatcttcggctccagcagcggcagtgccttttccagcaggccgctgtggtagggcgggtccaacagtgcgatatcaaaggtatcgcggcagccctgcaggtaggcaatcgcatccatggccgttacccggctgtgctccgccagcttggtggtcagcaggttctggcgcaccatctcctgtgccttgcggctctgttccacaaagaccgccagccgggcgccccggctcagcgcttcaatgcccagctgtccactgccggcaaatagatccaacaccgcggcgccttccacctcaaactggatgatgctgaacatggcttccttcacctggtcggtggtgggacgcacatcgcggccctccagggtattcagtttacgcccgcgggcggtaccggttattactcgcacagtttttctccttggggcagttgcccttttactaatggtatattttttcccgtccgctgtcaatcccatcggtcgaaaaagtcagttttctgctgtttcttccccatgtaaatgctgatacagcgcctcggcagcaggccgactcatacccggggcctttgccagggtctccacatcggctgttcttatcgccgccatgctcttaaaatgctttaggagcttcgccgcgcgctgctccccaatgcccggcaccgctgtcagtgtggaggcaaagccggctttttggtgctttttgcgcgaaaagctgatggcataccggtgggtctcatcctggatattggtgaccagccggaacaccgactggctggcacggatggcgatctcctcgttttccgcccggatagcccgggtgcggtgccggtcgtctttcaccatgccgaaaacggggatctccagtccgaactgctccgccactcgtttggccaccgctacctgccccgcgccgccatctatcagccacaggtcgggcaggatctcaaagccgtcctttttgccggtctcggccgcttcgcggtagtgggtcagccggcgggtaagcatctgctccatcgcggcgtaatcatcgggcgctgcctggtcctttatcgtgaatttcttatacagccttttttcgggtcttccccggcggaataccgtcatcccgcccacaatggtctgcccgccaatattggaaatatcgaacgcctcgatatgatccggcgggttttgcagtcccagcagcctccccagctcggtcagcgccgctatctccttgccggtgcggttggtatcccgggccagctcctgcgcggcattgttctgcgccatctggcacagcttgcggctttcgccccgctgcggcaccgtaaattgaatcttcttcccccggtgctcccgcagcagctgctccagcagcggccggtcgggcagctcccgctccaggaagacctcggccggggcggtttccgcctgcatgtagtagctcagcaggaattcggtcaccacttcctccggttcgcccatgcagtcaaaggaaaagtccttcttatcccgcaggcggccctcccgcagcaccagcagcgaacaatagatcttatcctccccctgcacccagcccagcacatccaggctctcgtgcgggaattcaatgactttctgctgctcggtgatgcgccgaatggcggaaatgcggtcgcggtagcgtgccgcccgctcaaagtccagtgtctccgccgcctcctgcatccgctcggtcagcttctccaccgattgcatcccgccggtgcggataaattgtaacgcttcgtccagcgcctcatggtacgcctcccggctgatcttgccgctgcatacccccatgcactggtgaatgtgataattcaggcaggggcgctccttgccaaagtcctccgggaatttacggcggcaggtaggcagcaaaaaggcccggttggcttcctccaccgtctgctttaccaccatggaggaaataaacggcccgatatattcattgtcgtcgttccccttctgcagcgccagccggatgcggggatactcctccctggtcacgcacacatagtggtagcccttatcatccttcagcaaaatgttgtacttggggctgtgcagcttgatcaggctgcattccagcaccagcgcctcaaactcgctgtcggtcacaatataatcaaaatcctgtaccatttccaccatacggtagaccttcggcaggtgccgctccaccccgcggaagtaggaggtcaccctgtttttcagctttttggccttgcccacatagatgatctcgccccgccggtcccgcatcaggtagacccccggctccatgggcagggtattggctttttttcgcagctcggctaccttttgcatatccatccggcggcacctcctctttgcttttattataccataaatgcgccccaggtaaaagttttcgctccagcctttttagattatcagtatgcctatccggcagggacttccttttgctcctgcaaaaggaagcaaaacagggcaaaggggaaccaggctttcccctttgcaatcccctttggcgcttggctgtgctggatacgaacgatgtaaacatcgtccgtactgcgcacagatgcgctccaaaggtagccacaggcgtatctgccccttctcccctgccccctcccccgctatcgggggaggggatgtctaccccaatccctacttaccctctctttcatcttggcaattgctttctgctctttccgcggcaaatcttccctctgtggcctcaccgcaggtgatctttccacgccggaacgcaatatccttttccgtctaaaaataaaagggtgcggcagcccatggctttccgcaccttttcttctctgtctctcccggcagatatcactccgcgaaaccagtctccaccagcttcaccagggcatctaccgcttcctgctcatcagcgccatcggcgatgatcttaatggtcgtgccgcccacgatgcccagggaaagaacgcccagcaggctcttggcgtttacccggcgctcttccttctccacccaaacggaagccttgtactcattggccttctggataaaaaaagtcgcgggccgcgcgtgcagaccaacatgattctgaacggatacttcttttgcgtacatatcgacatctcctcttcgcctaaagaaatgggggtcccttatttctccattaagcattatagcaaaatccgccggctctttcaattacaaaccgccctcaacttttcaatttgccatttttctgacgaaccgctaatatccgtcggttttcggggggcgcatttgtgcacaattcctataattttttgtcactttctatccgtttcgccatccgtttgggccgcattggaatcgtttccgtcccttgcctccagctccgccttcatctgggccaccaaccagcggtccttttggctcagctcagccttttccagcagatcagggcgcttgatcagcgtgttccgcagcgacatctcatgccgccatttggcaattttgccatggtcgccgctcagtagaatatccggaattcttctcccgttccattccaccgggtgggtatactgcggatattccagcaatccgttccagtggctctcctcggtaaagcactcctcgctgggcagtacaccctccaccatccggccgatgcaatccaccagtaccagcgcccccagctcgccgccggtcagcacatagtcccctatggaaagctcctcatccactatctcatccagcacccgctggtccacaccctcatagtggccgcacagcaggaaaaggttttccttctccttcagctccctggcatgggcctgggtcagcaccttgccctgcggtgaaagatagatgacatacggcttctgcccgatctgctcgctcacggccttccagcagtcatggatcggctggcaggtcatcagcatacccatcccgccgccatgcagccgcaggtcggtgcggcggtgcttatcggtggtgtagtcccgtatctggtggcagtgcacctccagcttgccggcctttatgccccgccctatgatactgctgttcaccaccgtttcgcacatttccgggaacagcgtcgcgatgtcaaacctcatagtcatcctccgtcacatcgtcaaaaagccccgccagcggccgaatctcgatcacgccctcctccggggccagccgcagcaccacctgcggaatatccggggccagccgcaccttgccatcagcaaagcggatatggtacacccggttcgcacccgtttcggtgatatcgcacagcttgccgtattccttcccggtatcggcgtccttcacctcgcagcccagcaggtcctgcaggaagtattgccccttttccaggggaatatcctcccgccgggcaaagagcaccttctgccgcagcgcgctgcccgcctccggggtttccacgccggccagcgtcagcagcaccatgttcttgtgcacccgcgcgccctttaccgtcagcggggtcttgccgccatccaggtacagcgttttcagggcggtcatctcctcggggctgtccatccacacctcggccttcacctcgccgcgtaccccgtgggtggaaacgatctttccacattccaaaaattccttcatcgggctctccttttccgtgtaaaaaacagtaggggaggcacatctcgtcctcccccgcagttttgttcagtcaatctcgaccgtcgcgcggccgccggacttattggtaccagcacgcactatggtacggatcgccttagcgatacgcccctgcttgccgatgacacgccccatatcctccgcacctacatgcaggtgataaacgacattgccctcttcgtccgccgggtcagcggtaacactgactgcttctttgtcatccaccaggcctctggcgatggttgcaatcaattcttccatttgttggtctccttatcgcttcaaaaaacaggggactgcttatttcacgatcccctggatcttcagcagagccttcacggtatcggtgggctgagcgccgttggccagccaggtcttggccttctcctcatcaatcttgataacagagggctccttggtgggatcgtagtagcctacctcctcgatgaagcggccatcgcggggataacgggaatccgctaccacgatacgataaaagggagccttcttagcgcccattctgcgaagtctgatctttactgccatgttagtttacctccaaaaatgtttgaatgaaccggcattacaccgactgtttcctatattttttccggccctgccgggaaaaacctgtgttacatcataccgggcatcccgccggggaacccaccggggaagcccatgcgtttggcttttttgccgcccttgccgctcatcatcttcatcagcttgcggctctgctccagctggcgcagcaggcggttcacatcctccaccttggtgccgctgccggccgcgatgcgccgcttgcgcttcgggtcgatgagggaaggcttggcacgctccgccggcgtcatggaatagatgatggcgcgggaacgggccatctccttttcgctgcgctcggcgtcctcgtcgctcagcttacccgccgcgccgggaatcatattcatcaccgaggaaagcgggcccatctttttcagctcatccatctggtccagcaggtcgttaaagtccatttcattgcggcgcagcttatccaccatcttcatggccttctgctcgtcaatgccgctggacgccttctcaatgagggagagaatatcgcccatgccgaggattcgggaggccatccggtcgggatagaagggctccagatcctcgatcttttcgcccacacccgcaaacttgatgggcttgccggtcaccgcctttaccgaaagcgcggcgccgccgcggctgtcgccgtccagcttggtcaggatgataccatccacgcccagctggctgtcaaaggcagtcgccacattcaccgcgtcctggccggtcattgagtcgatgaccagcagcgtttcgtccggcttggcggcctccttcacggccttcagctcgtccatcagcgcttcatctatatgcagccggccggcggtatcgatgatgacgatatcattgccgtaatcatgcgcatggctcagcgccttcttcacgatcttcaccgggtcggtctggcccatctcaaagaccggcaccccggccttttcacctaccaccttcagctgctctatggccgccggacggtaaatatcgcaggccaccagcagagggcgttttccctgctgacggaacatatacgccagtttggcactgtgggtggtcttaccactgccctgcaaaccgcacatcagcagcacggtgggaatgcgggaagaaagattgatacgctggtgggtgctgcccatcagctcggtcaactcgtcgtttactatctttatgacctgctgggcgggggtcaggctttccagcaccccggcgccaatgcacttctgggtcacatccgccacaaacttcttggccacgccgtagttgacatccgcctccagcagtgccaggcgcacctcccgcatggcctcttttacatcggcctcgctcagcttgccgcggttcttcagttttttgaatgtcccggccagtctttgggtcagtccttcaaatgccatagggtctcctttttatcggttcagtcctcgtccagctccttggccagccggatgatgctctgtgcgctccggtctatctccggcgctccgccaaatcggtcattgagcttttctatcagctcggcctcctccacgatggaagaaagcacattctctatcctgcggaagcgtgccgccaggtgcagccgttcctcgtattccagcagctggccctccgcccgcttgatggaatcccgaacgccctgccgggtaatgccgctgtgcgctgcgatctccgccagggaaagatcctcattgtagtacagctccaccacatcccgctgcttatcggtcagcatatcgccgtaaaaatccagcaaaaaggatatctccaggttttttgccacgccgcggtcactcccgtccttccgccttgtaaagcggatttctttacagttcacattataccctaaccgcccctccctgtcaagtctttttctttacaccgccaaaattcgccccgcttttttatgggtttttgctcactcaaccgtttgttgtgccgctatccaaccgccggttgttaattttccccccgcttcaaccaatgcgttctttcttttttccccggcagccgctatactttaatcacggaacggagctcctaccccaaacaaaaataataggaggcttaatattatgatgaactcatctctcggcagccgcattgcggaactgcgccgcaaaaagaatatgacacaggaagacctcgccaacgccctcggcgtcacgccgcaggcggtcagcaaatgggaaaatgacctctcctgccccgatatcaccctgctgccgcagctggcccggctgttcgatgtcaccaccgatgaactgctgggtaataccggccgtccggagaccaccctgctgcccaaggaggagcgcaagcccatcaaggatatgatcctgcgggtcgtcgtcaattccaaggccggcgataaggtacgggtcaatctgcccatgtcgctggtgcaggtgggactgcaaatgggaatgcagatgccgcaggtgaccggaagcggcgctgcggaggccatgaaaagcatcgatatcgagcagatcatggcgctggtggagcagggcgtcatcggcaagctggtagaggtggaaagcgccgacggcgataccgttgaagtatttgtggagtaacccatgaagatcatcgttcgcaccaaggaaaaaaagctccggctgtggctgcccggcagcctgctttacggcaggatttccgcccgcatcgccatcgccgccatcaccaaatatgccccggactgcggcatcccgccggagatgctggggcagcttctcgcctccctgcgtgacttcgcccgcacccaccccggctggctgctggtggatatcaccacccacaagggcgatatcgtcaaaatcaccctctgatccctcgcgcaaaaagcattccggaaccactgtcccataaaacccaaggagccgcccccacgccatgtggggacagctcctttttttgaggcaaattcagttattcgcttggcatcaatacatgccgcccatgccgccggtagggtcacccatggggggcgcgggaggggtcggctccttcttatcagccaccaggctctcggtggtcagtaccatcccggcgatggaggctgcattctgcagggcgctgcgggtcaccttggtcgggtcaacaataccggccgggatcatatcgcagtattcctccttgtaggcgtcaaagccgtaaccggcctttccgctgcggcggatggtatcgatgatgaccgagccctccagcccgccgttggcggcgatctggcgtaccggctcctccagggccttcagcacaatgcgcacaccggtcttttcatcgccctctacgctgtagatcagcttggcgacggcatcggtggcgttcagcagcgctacgccgccgcccgctacaatgccttcctctactgctgccttggtggccgccagggcgtcctcgatgcgcagcttcttctccttcatctccacctcggtggcagcgcccaccttgatgacggctacgccgcccgccagcttcgccagacgctcctgcagcttctcacggtcatagtcgctggtggtggtctctatctggctgcggatctgggcgatgcgctccttgatgtcgtcggagttgccggcgccgtccacgatgatggtgttctccttggtgaccttcacctgcttggcatggcccagctgcgccatggtagcagcgctcagttccaggcccagctcctcgctgatgacctcaccgccggtcaggatggcgatatcccgcagcatttccttgcggcggtcgccgaagccgggagccttgacgccgacacaggtaaaggtgccgcgcagcttattgacgatgatggtggaaagggcttcaccctcgatgtcctcggcgatgatgaccagcttcttgccggccttcacaatctcctccagcagcggcaggatctcctgaatggaagcgatcttcttatcggtgatgaggatgtaagcatcatcaatgacagcttccatcttctcggtatcggtcaccatgtagggggtgatgtagccgcggtcgaactgcataccttccactacttcgctgtaagtctcagcggtcttgctctcctccagggtgataacaccgtcggccgaaaccttctccatcgcatccgcaatcagcttaccaatggcctcatccccggaggaaatggtagcaacacgggcaatatcatcgctgccgctcaccttctggctgtgctccactatggaagccacagcggcatccacggccttctgcatgcccttcttcacgatcatggggttagcgccggcggtcacattcttcatgccctcccgcaccagcgcctgcgccagcagggtggcggtggtggtgccgtcgccggcggcatcgttggtcttggtggcaacttcctttaccagctgggcgcccatgttctggaaagcgtcctccagctcaatatccttggcaatggtcacgccgtcattggtaatgaggggcgcgccatattttttatccagtactacattgcggcccttgggccccagggtgatcttgacggtatccgccagctgatctatacccgcctgcagtgccttgcgggcttcctcaccatatgctatctgctttgccataaataaaagcctcctattcgcttatcacgcgttattatttagtccacaatggccagtacatcgccctggcgcaggatggtgtaggtctcgccatccaccttcacctcggtaccggcgtatttcgccagcagcacatggtcaccgggcttcaggtacatctctaccttttcgccatccaccaggccgccggggcctacggctaccacctcagcaatgctgggcttttccttggcgctgggcgccaggataatgccgcccttggtggtctcctccgcttccagcatcttaatcacgactctgtctgccaaaggtttgattgtcataactgtatccctccgtaaattgatatgatttccttcattatttta

SEQ ID NO: 852 - DNA, 14883 bp, Unknown
  16S sequences of unknown bacteria
tcggagatgtgtataagagacaggtacatggatgctttgctcagctcctggacaagaccaatggccccttctgcggtataatatgcgttttcagctgcaagtgtttcgttctgcaacaactgaaccaaacagtgtcccttatcctggcaggcttttatccaatgctgtgtggccgcgccgcaaaacaaatgactgtgtgccgggcaagcctctaaaagctccgcacggtcgatcccacagatcggctgttctgccagcatcattggaagcagctgatactcggtttgtgaaatatgctgcaaaatagcctgggtattttccctccgcgtatcggaaaaatattctaccgaaaaaccacgctccctcaaaatatccagtacgattctatttctttggtcgccacccagaatcaaaagagttggtttcatctttcatccccctaacgacaatattgtatgcgcctttcattctccatttgccaatgaaaaaaaggcatccatagtggatgccttttatattaatgcatgaactggttattgcagcacggccttcaaagccttttcatcaatcttcccaactgcgcttcccgccagcctattcctatcaaatatgatcggcaaaatctcctggatatcctccattgtcaccttttcaatgctggcaatggtttcttcagctgtgcgtatctttcctgtcatcaccatggaacggccaatggcattcatcctagagctcgtagactcaagccccaaaatatagttgccctttagctgctctttagatcgattaaactcttcttggctcaagccgtttttcaaaatatcctgcatttcatccaacagcagctgatatacctccaccgccttagcagccgtaacgcccgcatagatagagtatacgccgttgcgcacataggtcgaaggatgggaatatacatcatacgccaggccccgttgctcacgaatctgttgaaacagccgagaggacatgctgccgccaaacgcattgttaaaaacattcaatgcatacatcctctcgtcctctaagctaaagcccggcatgctcaagcaaaggtgcgcctgttcaatcggctttaccctagataaaaaacgcggctttgcagcgccaaaggcctcatagcgatagggcttacggcccgaaggcttcagatgctttgtctgctcggctaccagatcacaaaacgcctcaaagtcaatgccgcccgctgctgcaaacacgatgttttccggcacatactgccgttccaaatatcgcagcatgatatccttggtcatgtttgcgatactctctgcggtacccaagataggacgagccagcggatggtccccaaaatacgcctccgaaagcagatcatgcactagatcctccggcgtatcctcaaccatgttgatttcctctagaacaacgcccttttctttttgcatctctgtttcatccagcgtagcatggaatacgatatcacaaagcagatccagcgtctgcggtagcttttcatctacgatcctagcatggtaacaggtgcattccttagaggtaaacgcattgagaatgcctcccatgccatccatctcagccgcaatctgttgagccgtacgcctttcggtccctttaaagagcatatgctcgataaaatgagaaacccctctttcctctaccgctacttcattggcggatcccgttccgatccaaatccctacgcttacagagcgaaacccttctattttctgtccgacaacacggaccccattttccaaggttcgttcaaaatacatgatcgtcctcctcttttgttcctcttatagtaccagttttccccaattctttcaatcaatgagcaattgtgaaatattttgatttttccatccgttttcttgcaggcttttctgcacagccgatagcatagatccatttaccgtcttggcatctaaatatacaaagtctcctttttttagctgtcccattaatatatccgcaaattcctcttctgttttatgcacaatcgctctaccgtcctggctaaatagcacaatattaatttcctgttctttgcaggcatttttaatggcaccgtttgcttgctggcgatagggcatataaaaccggacttgcttccccattgtgctttcatagcatcccatctctttgtgcagttgattacggatctcttcattgctcaatttttttgtatcaatcatcccttgaagaatgatctcaggccccatttcctccatagcgcgaatctcctccggatcgttttccaactgctccgcagtgacagcaatggaaaatacaattccgttgtcatggccaagttttgctgcctctgcaatctcctttttaccctcctgtccgcttagcaaaaaggcaatgccttctgaatttcctttatagatgggagactgccctacctgtgcaaatacattttgaagcatggcagcgttggttgccagataaatggatgcgatcatcagcagcaagacaatgttaatagcaaagtattttttcgctcttgtattcatttgcactccacctcgggctatgtatatgcaaaagaaggagaaaacttgtccgtagcgctttgttttccaatcaaaaaggaagccatgtatatggcttcctttgctgcttttaggaattttatttttcctttttctcctttttaggctctggcggcaagagatccttcctggtcaagttgatgcgtcccttatcatcaatctcgatgacctttaccagaatgtcgtccccaatattaacaacatcctctaccttttccacccgttcacgtgccaatttggaaatgtgaaccataccatccttgcctggcaacaattcaacaaacgcaccaaacggcatgattcgcacgactttgccaaggtaaacttcgccaacctcaatttccttgacgatgccttcgatcatcttacgcgcctgatccgctgcttcctggtccggcgtgcaaatgtaaactttgccgtcgtcttcaatatcaatcgtaacaccggtttcagcgatgatcttattgattgttttccccctcggacctactacttccccaatcttttctgggttgatggtaaagcatacgatcttaggcgcatattcggacagatgctctctaggctggtcgatggtttccatcatcttacctaggatatgcatacggccttccttagcctgcgccaaagcacgggtcaaaatttcccggtcaatgcccttgattttgatatccatctggattgcagtaatgccgtccttggtacccgccaccttaaaatccatatcacctaagaaatcctctaggccctggatatcggttaggatcgtgacgctatcgttttcggtgtctttgataagccccatggcaaccccggcaaccggctttttaatcggcacgccgccgtccatcaatgccaacgtagaagcacagacgctcgccatagaagtgctgccattgctgctgatgacttcgctaaccagtctcaatgcgtacgggaatgtttcctcatctggaatcatgggttccaatgcacgctctgccaaagcgccatggccaatttcacgacgccccgggccacgcatcatacgcgtctcgcccacggaatacggcggcatgttgtattgatgcatataccgcttacagtgctcgggagacagcccatccaaggattgaacttcgctcatagagcccagcgtcaaaatcgtcataacttgtgtttgtccacgggtaaatacaccggaaccatgcgggcgtttcaaaatgccgacttcactccaaatggggcgtacttccgtcgttttacggccatctgggcgcacaccctgctgggtaattttacggcgcacaacctgctttgtaagatcataaataattgcatcgatgcgtttgattttctccggatcttcctccccaaacgcttcaaatgcatcctgcttgatctgctcctgacgtgcttcgcgttcataacggtcaaaagtatccaaggaccattctacacgctcttttacagcttctgtgaccttggcatcaaagtcctcgtcgtgctcttccagcgcgatgacctgtttttcttcaccgatttctgcttgaatatcggaaataaaggcacagatccttttgatctcttcgtgtgcaaacagaatggcctccagcatttcgtcttcagaaagctctttagcgccagcctctaccatcatcacggcatcctttgtaccggcaacggtcagattcaaacgagaagcctccatttgctctagcgtaggattcaaaatgtattcgccatccaccatgccaactaccacggcagccgttgggccggcaaagggaatatcgctgatagataaagcaaccgaggagccaatcattgcatacactgccggcggaatgtcttgatccaccgacaataccgtggcaatgacctgtacatcgtttctatagtttttgggaaacagcggacgaagcgggcggtcaatcaaacggctcgtcagcaccgctttttccgtaggacggccttcacgcttaataaaccctccggggatcttgccgactgcatacattttttcttcaaattcgcagctcagcgggaaaaagtcaatgccttcacgcggcttggcacttgccgtcgccgttaccaacacagccgtatcgccgcagcgcacaatgcaagagccgccagcttgctgtgcatacttgccggtttcgatggtcagctttctgcccgccacctctgttgtgaatattctttcttccatctttcgttttctactccttcttggcatacgtgcccggtataaaaagatagagcgagtaacacccgctctaataagtggcttagtggcgcagacccaattcagcaattagctttctgtatctctcaatatccttttccttgagataattgagcaggccgcggcgacggccaaccatctgcaatagaccacgacgagaatgatgatcttttttgttgagctttagatgctcgttcagatgattgattctttccgtcaaaagtgcgatttgcacttccggagatccggtatccccttcatgggtggcaaactgctgcataatttctgctttacgttctttagtcatgttcttatactccttttatgataatacccccaccgcccgtgcctgccgccggagaacagcgcacaacacagaacgcggttgacagaaaaatagtatcatatccctattgctttgtaaactacttttccattattcgaccatgctttttcgtattttctccatctgtgctttgtctactccgatctgtaaaagataatcgtgtaccgttccaaatcgctctttgatcaacgacaaggtacgctgcatattatcaggcgacgtctcaaacataaatttgggcgcatgtacgccggcatccgccaactctttttcacgtttttggataaagactgtcaaatacttttcactgactgcataatcacctatgatgatttcttccggaacctttgcaatggtcaacagcagcatagccgttaaaccggttcgatcctttcctgccgtgcagttaaataaaatgcagtcgtttggatggtctgctatgatatccatcacgcgcttgaaggacgcctggctatccaaaattaagtctctataaatatcaaacagagagctgggcatgtttttgcccatatcttccggcttttgggaattgatctcatccagcatcggcacatgataatatgcaatgtctttatatccgtccaaacgactgggatgatccgatacttcataggtagatcgaagatctatcacacagcgcacaccataggtatacaacgcttcacgatcctgctctgttaggctgtctgttgctgcggcacgtagaaaacgatgctcttttgtccgtttcccatcctccgtttggtatccgccgagctctctcgcattcaaaatacttaccaaattcaatggctggttgattgcttgttccatgtctacctattcatcctccttaaaatctcttcccagtagtgcattggccaaatgatcttcatggtgcaatagcgcatctcgaatgcgcgtgctggaaaccgcttttccaaacatagaaacggttggtaccacaacagcggacaaagccggatgcgccgcacaataggctcttaaatgtgctacatcgccctggccttggaagccgtaacggaaatcctctccgcaatacacacacgacacgcggccatcctgagctagcatatccaaaaagtcctcttttgtcgttgctcggatacggtcaaacgtcataacaagggtataatcaaatcccatagacgcaaatatcgccagtttttcatcaatggataataaacttcttcccaacgcttcttccttttcaggatgtggggtgctggcaaaggtaaatacacagcttggccgccctgcactgtgagcatttttcaaacattgcttcagcaatgcctgatgccctacatgcactccgtcaaattgtcctaaagccatatgaacgtgtttgccgtttagttttgccaattccgttattcgttgcatggctcctcccaaatcaccttgactgtttgcacccctgtctgtgtacgctttgcaatacccaagaatacatcgtttacccacagttgacagggacgttcaaaggccttcggcacctcctgaatccatgccggatcaatgggttgtccgcaaagaacagctcttttggctatgccggataaatagattctctccatttctatacatccactttccattggctgcaaaatggcatagacagcatctgtatggaaagcatgttctatttcctccagcgtcacgctttcttctatccgaaatccgccggtttgggtgcgcaataaaaagcttagatgggctaccgttcctaacattttaccccaatcctggcagagagtacgaacgtaagttcccttactgcatcgtacccgaaatagaaatcggtttgtttccgtttgctctaaaaattccgtttcatagatctcaacaggccgtttaggaatatccacgcttttgcccttacgggcaaggtccaccagctttcgcccatcttttttcaaagcagaatacatcggcggtctttgatagattgtgcctttcgtactttccaaaacagactgaaactgctcttttgtaatctctccactttgcctactaataacttttccctgcgaatccaacgtatcggtttctagcccaaaataaatttcgccaatatattctttttgcccctgcatagcgtattcaacaaggcgcgttgccttgccaatgaaaatcggaagcactccggcggcatatggatccagcgttccgctatggccaatctttttgataccagacatccgtcgcataaacgatacaacattttggctcgtcatgcccggcggctttagtacattgatgatcccgttcatcgcgagcccaaagtcctttccagcatctgttttacttcgtcaacagcctggggcaatgtcattttcaacgtaaatccggaagcggccctatgccctcctccaccgtattgcgccgcaagatcggcgacattgatttcattgcgagagcgaagactgcccttgatgccatcctctttttctcgcagcatcagagaaatctcaacaccgtcgatctctctggccacatcaatcaatccttcacaatcgctctgatcacatccgcaatccaataaatcctgattggtaatcgttaccatcgcggcctttccgccacaaaagatttccaagctttcaatggcacggcccagcagcttggtttttcccaacgtttttctatgatatacatcataacagacgtctgcaatgcttgccccattatccaaaagctgtgcggccatctgcaaggtacgtggggttgtatttcgaaatccgaaatgcccggtatccgtcgaaagggccagcatcaaacaagtagccaaatctcccttgagcggtacatgcagcctttctgcaatctgatacacaatttcggccgttgccgcggctttgggttcgatccattgcagatccccaaacccttgattggaaatatggtgatcgatgacgataatacggctgtctttctgtacaagcgacgggcattcaagcctagatgggtctgaaatgtcgatgcaaacaatattcggatatgcctttgcttgttccggtttggtaatgcacggcgccagcggcatggttcgatacataaaaggaatctgttcacgtactacaaactgaacacgctttctcaacgcctttaacactaaaaaaagggcggagccgctgccaaatgcatctccgtcaggattaatatgcggaagaatggtgaacccatcttccgcacggaaaaattcaataatctttttctgttcgcttttcatcatcattcacaacctgatcaatcaactggctcatattcaccgcatacgcaatggaatcatccgccacaaaatgaagttccggcacgcggcgaagttccagcctttgcgccaattcgcggcggataaaaccgttagcacgggcaaggccctctatggcgctatccaattgcgctttgtcgccataaacgctgatatatatttttgcatgggccaagtcgcgcgtgacctccgcacgcacgacgctgaccataccgctgagtcccgggtccttcactgctgttgcaatgatggcctctatctcgcggcgtacttcttcattgattctctgagtccgaaaacttggcattattgcttcacttcttcctgtgtgaacgcctctaccacatcgccgattttaatgtcattgaagttctccaggctcaagccacactcaaatccggatacgacttcttttacgtcgtccttaaagcgtttcaacgaagccaagtgtccttcatacaccacaacattatcgcgtagcaaacgcacctcgcagttgcgcaaaagcttgccatcctgtaccatgcagccggcaatggtgccgattgcagataccttaaacgtttcacggacctctgcatgccccagcacaacctcttcaaagacaggctccagcatacccttcatggccttttcaatgtcctcgatggcttgatagatgatgcggtacaaacgaatatctactccatctttttcggcctgtgtacgggccgatgcatcgggccgtacattaaatccaatgatgatggcgttgctagcgcttgccaatagaatatccgtggaagtgatggcccctacgccaccatggatacacttaacgcgtacttcctcattggatagcttttccaaggaggactgaacagcctccacactaccctgtacgtcagcttttacaatcaaattcagttccttgatctgtccttcattgatctgatcaaagagatcatccaaagaaaccttgctggttgcttttgttttttcaatcttgatacggtttttgcgttcttctacgatttggcgggtcaatgcgctggtttctaccgcatacattgtttcccctgcctccggtacaacgtcaaatcccaacacctctaccggcatgctcggcgttgccttttgcacacgctggccgcggtcattcagcattgctttgatacggccgctggccatacccgcaatcacagtttgccccacttccagcgtaccattctggatcagcacagtggctaccgggccacgacctttatccagctttgcctctacaatcgcgcccttagccaagcgattgggatttgctttcagatcctgtacctcggctacaagcaataccatttccagcagggtatccaacccctggtgcgtccgcgcagaaacaggtacaacgatggtatcgccgccccagtcctcacaaacaaggccatattccgtcaattcctgctttacacgatcagggttggcatccggaagatcgatcttattaacagctacaatgatcggcacctccgccgcctttgcatggttgatcgcttctattgtctgcggcataatgccatcatctgccgctacaaccaagattacaacatctgttacctgagccccgcgggaacgcatggctgtaaacgcttcatggccaggcgtatccaggaacgtaatgctttccccatttacatctaccgtataggccccaatatgctgtgtaatgccgcctgcttcgccagccgttacgcgggaagaacggattgcatccaacaaagacgtcttaccgtggtctacatggcccataatggtaaccaccggcggacgttttaccagatccttctcatcgtccacagtatcgttttccgaaatcaactgctcctcggcagactgttctatcttttgctccagctctacgccaaattcactggccaccaaaaatgccgtatcgaaatcaatctcatggttaatcgtggcaatgatgttgagcatcatcagctttttgatgatttccgtagcaggcttcccaattctttccgccaacgtttttacggaaacggtatctcctgtaatcacagccttatcgattttaatgggctccggcttgggcgcctgttgctggcgcttacgcggccgacggccgcgaatgacctcatccaaaccgccttgctttgcataacgctccttttccagctgctttttgctcttttggcgcttatcgttatcaaatacacgcgtatagctatttttcttaggatcatagttgctgacgcgccctttttccatcggcggtgcaataggagcagccgagcgtggcctgcttcctgctcccatgcggttatgatcttgcctgggcctctcgcccataggacgctgtggacgatttccctgttgcggacggcccatcctattatcctgccatggtctattctgctggctatgcgcagcctgggggttttcccgcatacgctgtgcattgcgcgctgccgcatcgtcgcgcagcacgccgccctgacgacgtgccaatcgttcggccgggcgttcaaatttaggtttaggcggctcctgtttttcttctttgtgttgcacaggctccgatgcctttggcgccaaagcatccggcgtattctcccgtttttggggggctgcatcctctttgggtttttcgtcccttgtttctattgttttggtatccttttgctgtgtggtctgctctgttgaaacagccactttctctgcgggggctggcgttatagccgccgtcttttgcggttcagcaacaggctcttccgccttggccgttccttgagactgctgctctctcgccttgcgcaccaattctgcctccagctttcgcagagaatccgtctgcgcacgcaaataatcctgcacgtccttcattgcgcgcagttgatcgttggcgttttttgcaaccgccttggccacatcgttgattttgattttccctgttgtttcggtcatccttgtccccccgtaaaacggtttatactttcatgatctgctcagcaaagctgctttgcagaatcgccagacacaggcgtcccggctttccagccgcagaccctggatctgtcatctccatatacggtattttataatgtccgcataaattttgatagccttttttggtattttctgcacaatctttatccaaaagcacgagcttggcttttcttccgcgtattgcagactccacagctgttgcgcccgctacacactgccgcgccctggctgcaaacccgatcatggtttttgccctttgctcatccatctttttgtatctcttcttccaaagcttgcgtaacttcaggcgtcagcctgatcgatttatttttcattgcaagccgtaggcaatccatgttcttgcaaacataggctccacgcccttgtgctttccccgaaagatcggtgctctgtgcgccctctttaggttgcacaatgcgcaacagatccttttttggtttcatctgtttacagcctatgcacattctcatgggtacttttcgttttttcatcatgaattattcctcagtcggtgtctgctcccatctttcttgttccagaagctcatcatacatttcctgcgcctgggattggctcttgatgtctgttttccagcccgtcaaacgagctgctagctttgcattgatgcccttcatgccaatggctaaagagagctgattatctggcacgatcaccttggccgcatgctcatcctcgttgatctgtaccatgattacctttgcagcgcttaaagaggcagcgataaactcaataggatcagaactccacggaatgatgtcgattttctctccgcgcaattcatccacaatctgctctacacggctacccttggggcctacgcaagaccctacggcatcaacctgatcatcaacagaatataccgctactttgctgcgtacgcccggctcgcgcgaaatcgctttaatctgcaccgtaccatccatcacttccggaatctccaattcgaacaaacgctttacaatctcacgattctttctggaaacgataaccggcgtatctttgccgcgcacctctctatccacctttagaatatataccttaagacggtctcccggctggtaggtttctccctctacctgctcgctcatgggcagcagcgcaacattttttcccaattccacataaacattgccattttctacccgttggattacgcctgtcatgatctcatgcagctttccattgaattcattgaatacaatatctctttccgcttcctttaggcgctgtaagagtacctgctttgcagtttgtgctgcaactcggccaaacgaagccggtgttttgtcctcttcaacaatgtctccgatgccaaaatcgcccagcttacgcgcttcttccaaagaaaggtacatatttggatccatctcttcggttacttcttcaacgacctcacgctgagagaagaccttaaaatctcccgtttcccgatccacctctgcgcgcacgttgccttctgtgccgtaatggttgcgatacgctttcttcagcgcctcatgaattgcttcgtataaaatgtcttcatcaataccgcgctctttttcaatcgcgctaatggcttctaccaggccgttattcataatttccctatgcctcccgctgtgcttgcttttaaaactttatcgtggggcgcacgatggatacatccttcaacataaatgccatctctttgccgcccacatccaagatgatcttattttcttcttcatcataggctttcaaaacacccacatactttttctttccctgcaaagccttatataacctaagttccacttccttgccgatgccataatgaaaatcagaagggcgcttcaacggccgatcaatacccggcgaggaaacacataaaaaataggcatcagaaatgggatccaattcatcaatgatgggatcaatcgcttttgacaccgtttcacagtcatccagcccaatgccattcgggccgtcaatgtatacgaataatactttactatcgtcttcccgtccaatctccacatccacgatgcggtatcccagcgatgctacagttccttcaatcgcttgctcaattctttctgttattttggacaatcgacaacctgcctttcaagacaaaagagcgggttaacccactcttccctccataaagtatctttctgatgcattctagcacacatttttccgcattgcaagcatccgaaaaacaagagaattatcaaaacagagaaagctgagctgtatcccacatatccccaaacgctcctacctccttcagccttgcaatgttggtgttgttgagctttgtacgctcattgacatcctcaatcgtaacaaaagggccgtcctttcttgcttctactacgctgtttgctgcgttttcgcccaagccagccaccgccatgagcggcatgcgcagctttccatcctcgattaagtacatcgtagcatgagaaatctgaatatccggcggcaagaattcatagccgcgtgccagcatctccatcgcaagctgtaaatgcacccgctgtttttcatcgcgtgccgtagcatcctttttatgcttaaaatcctccaatatctttttgatatggtctatgccctgcaacgcgtcgaaggcatccatttcttcaccacgcacagagaaatatgccgcataaaaggccaatggcatatgcactttataatatgcgattctaagcgccgctacaacataggctgctgcatgcgcctttgggaacatatatttgatttttttacagctgtctatgtaccaatccggtacatgtgcctgccgcatggcattttccataacaggcgtcagtcctttgcccttgcggaccgattccatcgtatcgaacgcgatttttgcctcaacaccgcaatgcatcagataaaccatgatatcgtcacgtgtacagacgcattcccgtaaggtcgctgtaccgctggcaatcaaatcggccgcgttgcccagccatacatccgtaccatgggacaggccgctgatgcgcagcaattcggcaaccgtggtcggctttgtatccttcagcatgttcatagcaaactctgtgccaaattctggaatccccaatacccccaaatcaaatggaaaatctgggtccttaatatccaatgcatcacagttgaggaataaggacaacgtgcccggatcatccagcggcacatccactgggtctatccccgtaaattcatacagtctgcgaatcaccgtcgggttatcatgccccaatacatccagctttaccaatcgatcgtgcagggagttaaagtcgaaatgcgtggtgatggtttcgctgtccaccttgtcggccggcctttgcaatggcgtataatccaaaatatctcgatcctccggcacaacgatcagtcccgctgggtgctgtccggt

SEQ ID NO: 853 - DNA, 32759 bp, Unknown
  16S sequences of unknown bacteria
cagcagttaagctccttagcgctgatgatacttggcgggcgaccgcctgggaaagtaggacgttgccggttttgtaaaaagcagaccagatggtctgcttttttagtacagtaaaactttgttttgtggtattatatatatgcggcatttgaagaattgctgtaatactaaagaaagagacagactatgaaaattaaaagacttttaatattacttatagccgttgcagctgtaacctttgcaggctgcggcagtaacaattcgggcatatcaaagacgggatttttcctcgatacagtttgttccgttaccgtttacggtatagatgagacaaatcagtattttgattacggagataaaaaagaacaggaaaaacaaatcctgcagctcataaccgatgcatttaagctgtgtacagaatatgagaatactcttagcaagactatagactcgagcgacattgcgaggattaataattcggatggagagcctgtagaagttagtgatgatacaatagaagtcctgaagaaaggcatagaatatggtgatttatctgggggaacatttgatattaccataggcagagtaactgatttatgggattttcgttcagaagaagacagagacaatgctgatgccggcagaatacctgataaaagcaagctggaagctgctgtggcacatgtaaattacaaggatatagtggttaacgggaatacagttacattgaaagatccagatatggagattgatctgggtggtatagccaagggatacattgctgataagctgacagcatatctggaggaaaacggagttacaagcgcaatagtagaccttggaggaaacattgtggcaataggcggcaaggcagcaaagcttacaggagataaacagagcgacttctctgtgggtatcaaggatcctgattccaaaacaggagagctcctcggaattttaaaatgcagcaataaaactgttgttacatcgggaacctatgagagatattttgaagcagagggcaaacgatatcatcatattcttgatactgatacaggctatcctgtggatacagatattgtatctgcgacaataattgcggataagggacattctgttgacggagacggactcagcacctcctgtctggcgctgggaaaagcaaaagcaataaagcttatacaaagcattgatggagttgaggctgtgatagttgacagcagcggtgacatatatatgtctgatgataatataccttttgagaggtcttaaaatcagtttacagagaggaaaatgtatttgtgatatagagtaggtgtatataaaaaacagacagccgtaaagctgtctgagtatgtggcggagatggtgggattcgaacccacgtgccggaattaaaccgactaactgatttcgagtcagccccgttatgaccacttcggtacatctccatgcgtacctaaaaagtataacataattatattaaaaagtatagtttaaattataaatatatgtacatttatgttggaggaaagcttttgtgaataatatatgtttctataaatcgcccgtaggcgctgttcttaaaattgcagatgacggtgttaatattaaagaaataacctttgcgcataacgcctgcggctgctgcctcaatgcgatagaaagcagacttggacatatagcaaaaaaacagcttgccgaatactttgcaggcgaaagaaagtcatttgaacttcctattgctcctgatggaaccgaatttcagaaaaaagtttggaaggcgctttgtgatattccgtacggtcagcttagaagctacaaggaggttgccgaagcggcaggatgtccaaaaggctttcgcgcagtcggcggagcaaataacaggaaccctatagttattgttattccctgtcacagagttattgctgccgatggatctataggcggatacggtgacgggattgatatgaaaagaaagcttctggagctggaaggaagtcttgacacagtgaatgaataattatgcatgtaagattgcaaaatatgtcgaaaaagcttgcaatttatacttttgttgaaactgtgaatattttttatgaataaaataattttatgaaaatctgtggaaaacttatacttgacacaaattatgaatggagaaaagattgggattttaagtgatgcagacaatcatgatatacacaggacatatgggataaaattgtatacaatttcgggaaaactgtgggaaagtacatcaactgttgaaaataagggatttttgaattgtggaaaacacattggcgaatttgacagaaatcatttatattatgcataaaaacaatatatgtaatatacttgtttgtgatttttgaatgagaatttgcttatacaatatatagtagcgatgatttgattcgcatgttgaaattacagctttttagagaaagcgactgtgaagttatactgacagtgatactatatatgctgttttaaaggagaaaggtaatatatatgataggtgtaattgtaaatacagtggcagtacttataggttcgggaatgggcctgctgcttaaaaaaggaataccggaaaaatggacagacctgataatgaaaggaataggcctgtgcacaatttatataggaatgagcagcgcctttgagggctcgcagacccttgtgcttattgtttcaattgtgttgggagtaattataggcgcggcgcttgatctggacaggagattaaacagctttgcagaaaggctggaaaaaagattttcgaaggagggcgaaaaggtatctgttgcagagggatttgtgacctcaagcctgctgttttgtataggtgcgcttacagttgttggctcgcttcaggcaggacttacaggtgacaatgaaatgctgtttacaaaatcaactcttgactttatatcttcgattgtctttgcggcaagccttggaataggtgtaatgttttcagcaggctttgttttcgtttttcagggccttatagttgtgtgcgcggggtttctttcaccgctgctgtcagatgcgataatagccgaaatgacaagcgcaggaggtctgctcatattcgcgctggggcttaatctgctgggaattacaaagctcaaggttatgaactatatacctgctatatttatgcctatagcgctgatgccgctgtataactgggtaagctcattactgtgatatacagggaggacaatatggaattaaaaacagaaagactgatattaagaccgtgggaggaaactgatgcggagagcctgtacgaatatgcaaaggatccggctgtagggcctgttgcaggctggcctgcccatatcagcgtttccgacagcctcgaggttataaggagggttttgtcagcgcctgaaacctatgcagtatgtcttaaagaggataatcgtgcaataggaagcgttggccttatagcgcctgaaatatcaaatgtgagtgtcgggtcagatgaaatggaaatagggtactggataggtgtgccgttctggggcaaaggatatatacccgaggcggtaaggcggctccagaagcacgcatttgaggatttgaactgcaccgcgctgtggtgcggatattatgacggcaatgaaaaatcagagcgctgtcagagaaaatgcggctttacatatcatcataccgaaaaggacaggccatgcgaactgatgggagatataaggacggtgcatttctcatatataactaaggaagaatggctgaaactgaataaataacagaatataaaaggggagtacagacaagatgtattcccctttagaagatggtttaatttttgagagcctgcataggagcaggaatacgaccgcctctgttaatcataacggcaggcgattttttgttgacattcataaccgggcctctgccgagaagtcctccgaaatcaagttcatcaccctcgttaagaccgattgccggtattactctgacagcggtggtctttgagttcaccatacctattgcggcctcatctgctataattgcggatactgtttcagacggtgtgtctcccggtattactatcatatcaagacctacagagcatacagcagtcatagcttcaagcttttctattgtaagggtcttatctcttgctgctgctatcataccggcatcctccgttacaggaatgaatgctcctgaaagtccgcctacatttgaagaggccataacgccgccttttttgactgcatcgttgagcattgcaagggcagcggtagtgccgcaggctccgcactgctcaagtccgatttcctcaagtatatatgcaactgaatctcctattgcaggagtcggtgcaagcgacaggtctataattccgaaaggcacgccgagagccatggatgcttcagcgcccacaagctgacccattcttgtgattttaaatgctgtttttttgattttgtccgcaacctcgtttaacggtgcatcctttggcattttggcaagagccgctcttacaactcctggacctgaaacgcctacattaagaacgcagtcgggctctcccacaccatggaatgctcccgccataaacggattatcctcaggtgcgttgcagaataccacaagcttggcagcgcctatgcactgattgtcctttgtaagctctgctgattttctgactgtctctcccatcatttttacggcgtccatattgatgccggttttggttgagcctacattgacggaggaacatacgaagtctgtttcggcaagtgctctcggtattgattctatcagttctctgtcgcctgctgaaaatcctttctgaacaagcgccgaatatcctccgataaagtttacgcctatatccttggcaacacggtcaagtgttttcgcatatttaacgggatctccgccggaagctgcgacaagcattgctattggcgttaccgatattctcttgtttacgataggaatatcgtattttttctcgatagcctctcctgtgctgacaagatcctttgcaagtctgtatattttgttgtagaccttttcacaggatttatctatgtcggaatcacagcagtccagaagtgagatacccatagttatagttctgatgtcgaggttctcctcctgtatcatagttatggtttccataatgtctgtcatattaagcatagcggtccccctaaattctgtgcattgaattgaagatgtcctcgtgcatcacatgtatctgcatatcaggaacctcttccataatattttttttgagtgtgtctatttcacatgacatacatgctatatctattagcattaccattgcaaagtactcgtgaagaaccgactgggtaacctcaagcacgtttgcgtttgcttttgcgcaggttcctgcaaccttggcaagaatacctaccatgtcttttcctattactgttacaactgctttcatttgttttctccttatgaatttatcttaacattttatcacaatatatttgtttctatcaagggtttcttctgccttaaatgatatatgaagctttggatatttgtctgcaaagtattttctgttggagccgctgtgccctgcggcgtttgatatgttttgaggattgcacagaacagctaggtttccctcaaagtctgtaagctgtttttctatttcctctcgcgcaatggagctttcgacaagctgcctgaacgcagggtgataggtgcctcccgtaatggcgccgtcttcatttattatgtctgttgatttgagccccacccttattatatttattcccgcagcatcgagaattctgtacatttcctttgttacagccacagcctcatcaagtgtaagaggcgagtattctccccgacggtacatttcaagaagctccgtatcctcgattattattgtcggataaagccttgctatttcaggggctatttttactgtttcgcgagcagaatatatgcagctttcaaggctgtcgccgggaagtcctatcataagctggatgcccagtgtgaagccgtattccttaataagccggcaggcatcgtatacggcggcagcactgtgtcctctgtttgatttctcaagtacggcgtcgtcaaaggactggactccaagctctatgacatctacggaatatttcctgagattatcgagtatttctctgtctatatagtcgggccttgtggacatatgtattttgtctattatgccgcgctgcttgtattcgtatgctatggcaagaaatctgctttgctcctcaatgggtatgcctgtgaagctgcctccgaaaaatgacagctctattgttttcatattcatatcattcagtgttgaaagatatgttttaattgtatttcttacatcctcctctgtgacatcgccctgtcttgctgttatttttttctgattgcagaaaacacagtcgttgggacagccgcgatgacttatgaagatgggtattattgcgtgttttttcatatgattgagcctatgtcctccagtggataatcaaagtattttatatcaagacctctgtttttgataaaggcctgtatcgcgtcataatcggggtgggcggatatatcgccgttgaatattatctcatctccgatgcgtccgcaggtgcctccgatgaagccgtagtcaaagcccttcagtattatgtatccgggtcttatgagcagcacatcaagatgcggtgaggcagccttgcagatgcccttatccgatgtgattacagaggtttcatctattactgccgtattgcatttggtatatccctgcttcacgtcaattatgtgcattccctttgcccttgcggcatccagcaggcgctttgcggtatgcgctgtgttgtgtatgaaatatctgccggtgcaggcggcgttaaatgctatgtcgccgggatagctgcagccgatttcatgcggctctgcgtgaattacctcatcacccagtctgcacatatatatgtcggcgtgtgaggcaatctgaggataaacaagctctgttgcgcgcacgatatgaacctcgtctaatgtattaaggtattctttaagtggctctcctgcgttttcggatatgtatatcaaattaaaatcacctcccgcactatctattatacattatatctatggaaaagccatatgatttgtagtatactttaaattcagacaggaagaatatatagaatgtaccgggggaaatattatggttaatataggtaatgaatgggacaaaatattagacggagagtttgacaaggagtattatcagaagctgaggcagtttctgataagcgaatataaatccagaagaatatatcctaatatgtatgatatattcaatgctcttaaatatacgtcatacagtgacgtaaaggcggttatactgggacaggacccttatcatcagccgggccaggctcatggtctttgcttttcggttaaaaagggagtcagaataccgccatcacttgtgaatatatacaaggagctggaaaacgacacaggcattaagccgccgtcacacggctgtcttaccgactgggcggaaaacggagtgatgcttctcaatgcaactctgaccgtaagagagggtcagcctatgtcgcatgcaggcagaggctgggagattttcacagaccatgtgatagagcttctcaacgaaagagaaaaacctatggttttcatactgtggggaaacaatgcgagagcaaagaaaaaaatgataacaaatcccgcgcatcttgtgctggagggcgctcatccaagccctctgggagcgcacaagggcttctgggacggtaaatatttttcaaaaaccaacgaatttcttaaagcaaacggcatagaggaaatcgactggtcaattaaagaataaatttaaaggcttttcagaggtgtctgtacctgctgaaaagcctttgtcagctgttttatttgccggaaggaatgtgagagtatgagtcggcatatacggacgaaagctcggcatcgctgtcagggcttcctttgagactgaaaaccacaacgcttataattatcactatgcctccgacaaacgtacccatatcgggaacctcatgaagcagtatcagcgctattacagttgcaatcagagggttgataaacaaatagtttgtgacctcactggtacgctctgcaagagaaatggatttactccacagatagtatgcaagagcactcgggaatactccgagatagagcgccgccatatttgcgcctgctgtagcagctgcaacctcgtgaattgtgcccggaagaaagcccagcatttcaattgcgccaaacacagcgctccatgttgctatttccatagcagtatagcctttctctgtgagcatgcggttaagtacgttgtatgccgcaaataccagcgcgcacaggaacatccacagaatacctatgtctattgagaaagcctcgctgcctgtgccgaatatgttgttccagaacagcagaagcacaacacctgcgaaagctgtcactatggttatccagccgatgccgtttattttttctttgtagagtctgtagacagcaattgaggtcatgatcggaactgtggcgcagatgatgctgccctcagaagatgacagagtctcaagtccgagattaaaaaatatgaaatatactgaaaacccggtggcgcctgaaacaaggaaccagccgcagtctttgaggttaaacggtttgcgcatgccggtgaaggctccgattatgagcagtattacagcagcaagcacgcagcggataagccccaaattaaatgatgagatctgatctcctattactcgtgtaaaaggaaatcccgaaccccataaaagaactgtaacgaatgcaaaaatatttactttcagtctgttactcattatgcatacctctaaatattatagattttttcaagtcagtatattttaacacaataatatctgtgaggcaataagaataaggtctgatatatacaggacaaatacagtcaggacaatattctatgcggctttgtgcaaagaatatttgaaatacatgccggcacagtatataataaatgtatctgtgcaaaaggagatttgtgtatgaaaccgggcaaatacagacattataaaggcagagagtacgagcttctgtgcactgccgttcattcggaaacattagagcctatggctgtttacagagcgctttacggtgatatgaaagtctgggtcagaccgctgtccatgtgggacgaggacgtttgtaccgaaagcggcacagtcaaaaggtttacatatatagattagaggtgtgattatgaaaaaactgcttattgttgtagattatcagaaagattttgtagacggagcactaggctttgacggtgctgagaaatttgagaagcctattgcagacaaaataacagattacagaaacagaggagatgagattgtatttacctttgatacacacggcgaggcgtatatgactacagaggagggtcgcaatcttcctgtaatgcactgtcttgagggaagtgacggctggcagctttacggttgcataggtgaactgatagagcctgatgatatgtgctttaccaagaatacctttggttctgcggagctgtttgattatctcagaggcagagaatatgaaagcatagagcttgtcggtcttgtgtcaaatatatgcgtgcttgcaaatgcggttattgccaagactgcgctgcctgatgtgccggttatcgttgattatctgtgcacaggctcctttgacagcgagcttaatgagaaatgctttgatgtgatggagggaattcacatcagagtgcttaacagaaaggagcagggcaatgcagaaagttagactggtgcctgatgcaccatttgcaacaaagcttgatatagctgtatataccattgacggtgaaagcgagaagaaacgatgcggtattacggcagagtttgcaagaggtgatattgagcagctcaaaaaacaggatatggggcttggcgaggcgctggactattacagaagctggatatatgatgttgtaaggtatcatatactcgatgaatgggaggccgtatcgggtcttgatgaaactatgaatataatatctgaaaagataaaagataaattttaaatacggaggaaatatggaacttagatacaagacaaaaaacgtatacaaagaaggaactgacaaagagcagataaacggtttctgcgagggatacaagagctttcttgacagctgcaggacagagaggctgtgtgctgagcaggcgcagaaaaaactggaggcggcaggctttaccagatacaacggtgagaaattaaaggcaggcggtaaatactatgtgatttacagaaacaaagtcacaatggcgtttattgcaggcagacagggtatcgaaaacggtatcaatattatagtatctcacgttgacagtccaaggcttgaccttaaaccgcacccgctgtatgaggacagcgatatatgtcttttgaagactcattattacggcggagtcaaaaaatatcagtggacagccattccgctgatgcttacgggcgtgataataaacggcacaggagagaagattgacgttaccataggcgacagcgatgaggaccccgtattttatataagtgacctgcttccgcatcttgcggcagaccagatggacagaaagcttcgtgagggcataaagggtgaagagctcaatgcttttgcaggtacaattcctgcagagggcgaggaaaaagagcttgtcaaagagaacatacttatgcttctcaatgagaagtacgatataactgaagaggatctgatgagcgcggagcttactctggtaccggcattaaaggcaagggactccggatttgacaggagccttgttgcagcttacggacaggacgacaaggtatgcgcatacacttcaatgaaagcgctgcttgatacagaagcgcctgaaaaaacagcgctgtgcatatgggcagacaaagaagaaatcggttcaatgggcgttacaggtatgcaggccgactttttcagaaacttcctcgcaagactggcagaggcaaatgatgttaatgtatatgatgttatagataattcaatgtgcctgtcggcagatgtcgatgcggcatttgaccctacctacaaagatgtatatgatgtaaacaactcggccaagctgggctgcggcatcgtgcttacaaagtatacaggcgcaagaggaaagtcgggaacttccgatgcacctgctgaaatggtgggcagaataagaaagatttttaatgatgacaatgttatctggcagatgggagagctgggtaaggttgacaagggcggcggcggcacagttgcccagtttatagccaacagaggcatagacacaatcgactgcggcgttgcggtaatatcaatgcacgccccttatgaaatggtatcaaaggcagatgtatatatggcatacagaggatacaaagccttttacaaagcaaaataaaatatatggagagtgaaaatggagagagataaatttaaaagcaggaccggctttataattgcgtgcataggttctgcggtaggtatgggaaatatatggctgtttccggcaaggctttcggctcttggcggcgcggcgtttttaattccctatttcatatgtgtaatagtcataggctttacgggcgttgttgaggagatgacctttggacgtgccatgggagcaggtcctatgggagctttcggcaaggctacggaaagagcaggaaagggcaggaggctcggagaggctttctcgcttatccccgttataacaagcctttgccttgcaataggatattcggtagtggtaggctggataatcaaatacctgataggttcagttacaggttcggctatcaatatgtcaagtgtcgatgatttcggcgctgctttcggacagactgcttcatcatttggaagcgtgggctggcatattgcggctcttgccataacttttggcataatgattttcggtattgcttcgggaatagagagagtaaacaagataatgatgccgcttttcttcgttatgtttataggacttgcgatttacatagcaacacttccgggagcatcggagggctacagatatctgactcaccctgactggtcgatacttcttgacggcaaggtttgggtctatgcactgggacaggcgtttttctcattatcccttgcaggctcgggaactctggtttacggctcatatcttggcaaggacgtggatgtgaaattcagcgccagaaatgttgcgatgtgggatacgattgcagcactggttgcgggacttacaattattcctgcaatggcaacagcaggacaggagcttacaacaggaggtcccggacttatgttcatattcctgccgaatgtattttcacagatgccgggaggacgtattgtaatgataatattcttccttgcagttacatttgcgggactgacttctcttgtaaatctttttgaaactccggttgaggcaatccagacaaaattcggaatttcaagaaaaaaggcagttgcggtaattgccgtaataggttcaattgttgcaatttgtatagagggcgttgtatcaggctggatggatatatggtccatatatttctgcccgataggagcactgattgcaggtattatgttcttctgggtatgcggcagagattttgtaaacgagcaggtgagcctcggcgcgaagaagccggcgggcaaatggttttatcctgcgggaaaatatctgttctgcggacttaccttactggtgctggtacttggaacattacttggaggcataggctaaacaatggttttacttacaggtgagcatatcgcaaagagctatacagaaaaacctcttcttcgcgatattaatataagtatacacgaaaatgacaaaacaggacttgtaggagttaacgggagcggcaaatcgacgctccttaaaattatagccggggaaatcgaggctgagggcggcacgattacacgcaacaaccagcttaaaacagcgtatcttgcgcagaatcctgagtacgatccgaagcttacggtaattgagcaggctatggaatatgcaggcgcagatattcctgaatatatgtgcaggtcgatgctcaacaaggcaggaatggataatcatgacaaaaaaatggcagacctttcgggcggtgagagaaagcgtgtggcgcttgccgcagtaatggttaaggactccaacctgcttatacttgacgagcctacaaaccatatggataatgatataatcgagtggctggaggagcagcttatactctacaaaggcgctgtgtttatgataactcacgacaggtattttcttgagagggttacagataaaatctgtgaaattgaaaacggcaggctgattacatacgagggcaattacgacaagtatctgcagatgaaagcggagcgtcaggaaatggctcttgccagcgagagaaaaagagctgccatatacaaaaaggaattaaggtggataaggtggtcggctcccgcaaggacaactaaagccaggggcagaatagagagatttaagcagcttgaggaaagcaagcttgagatagaggatccgcatcttgaaatcggcacatcaagttcacgtcttggcaagaagataattgagcttaaaaacataaccaagggctacggggacagagtgctaatcagagatttttcatatatggttctcagaaatgatcgcataggtattgtaggaccaaacggctgcggcaagacaacgctgctccgcctcataatggggcaggagatgcctgacagcggcagcatagaaatcggggaaaccgtaaaaatcggctatttctcacaggaaagcacgcagcttgaccccgaaaagagaattataaagtatatagaggaaatctccgataatgtcaagacaggtgatggttatctttcggcatctcagatgcttgagagatttctgtttcccccgcatatgcacagcgtgcagataggaagactttcgggcggtgaaaaacgcagactttaccttctgagcatactgatgcaggctcccaatgtgctcatcttcgacgagcctaccaacgaccttgatatagatacgcttacggttttagaggattatcttgacgattttccgggagcagttatcatagtatctcatgacaggtattttcttgacaggcttgcaataaggactttcggctttgaagagaacggaaacatcaagcactatatcggcgggtacagcagctatgccaacgacagagaaagacggcaggcagaggcggcaaatgccaggaaaaataaggcggaggagagcgtaagcaaaaaagctgacggcagaaatcagaagcctaaaaagcttaagttttcatataaggagcagagagaatatgaagccatagaggaagatatagagaggattgaaagtgaaatcaaaggaattgaagaggaaatacttgaatattcttcggactttgaaaagcttgccgctctgtcggagcaaaaggatgctcttgatatgcagcttcttgaaaagctggagaggtgggaatatctttcggatcttgccgccagaattgaaaatggcgaaactgagtaaatttaagttgatatcggataaaaacagagtataatatatatgggtatgctgatgtagctcagatggtagagcagcgcattcgtaacgcgcaggtcaggggttcaagccccctcatcagctccatatgcagaacgcttgaaaacgctggaatttaaacgttttcaggcgttaattattttttgagaatttacagttaatgtaagattatatcgatgaaaggtcgtttaaggtcgtttgaggtgttgtacctagtgttgtacctgttgtaccgtttatcaatcttgcagcctcgaggatagtcgaattatcggcatgagtatagatatttgccgttaatgaaatatctgaatgccccatcagatattgtgctgttcttatgtcaattcctttcttctgcaggtcggtgcaatatgtatgtctcagattatacggaacaaaatcctctgccaaaggataaggcgctatgagttgatttcgatacacaatttacaacgtaaaagacctcacattactgcgaggccttgactaataggtcttttttcttctttgatgcactacagtcaacaggtttgtcttgattagaatattagactggagtaagatagattaaggataattacagcttatgagggagagaaacattatggttataaattttgacgaaataaaagaacagatactgcctgaattttttggcggtatgaagcagatgaacacgcatatgtatatcgatgatgccaacaagatttttacggcatcacttgaaccgggagcatcaataggagagcacctgcatgacggcaccagtgagataatatacattcttaaaggcagcggcatcgggaccgttgacggagaggaaatgcaggtaaagccaggtatgtgccagtactgcagaagcggacacactcacagccttgtaaatacaggcgatgaaactctggagttcttcgcagttgtggcaaagcagcagctttaatggagagattactatgtatgatgatgtaaacaaagatgaaatgataacaagggactaccttgcacttgacaggacggagcttgcaaactccagaactctgcttgcatatatcaggacagccattgcggtatttgcagcaggtataggaatgatggaatttatcgaaagcagagttatatcggtaataggtgtggtatttatggctgcatcaccttttgtggcagtgataggaattgtctactatatcagaatgaaaagaaagctgggaaagctcaaatagccggcaatgcttttcagatgatatagtattacatctgtatgaaaaagctctgcgcgaatatgcagagctttttcgtaatgacttataattcaacaacctctctgtcggcctcaaccgtgagaaatttgtctttcaaaggatttttggcattgactgttttgccttttttatttatctcgtcgattttcttaaatacaccttcttctttgccgcctgcaggctgagcaaatttgaatgacttgtttacttccagttcagcgaatttttttgacataaggatactcctttcaatatgtaaatgtatgaatttcattggtaacattatactttatccggaaggaaaatataatcgcgaaatggtattaaaaactatcatactttttgattaaatacgaaaattcagaatatatcgcacaagtactaaagtactatagggagggaaaaacatattttaaacatctttattgtgttgcaccgaaaaacgtacattgcccggtatataatacagttaaaagaaagcgaggtatgattatggattacgttgaaataatattaaacggcagagtttttacagatgcatcgctggcagaggagcttttacacaaggcaggtcttgccaaaacgcagaaatttgaatacttttgtgatataatatgtcacgttggcaagctgattgatatgtgcggcggcactgcagaaaaaataatatatgattatgacagaaaaagcggcacagtcagatgcagcatatcaatgctcaaggcagagaacggtatggacgggtcactttatttcttcaaatatatgataaacagagtggatgtgtttgaaatgaagcctgtatcagcagaggaaatacagcttgattttgaaataaaggatatttttgcggaggaacagttatgtcttacagcctagaagaaagacttgtaataggaatatcctcaagagcgctgtttgatcttgaagaagaaaacagagtgtttgaggaggaggggcttgaagcctattccatataccagagagagcacgaaaacgatatactcaaacccggaacgggcttcaagctagtaaaggcgctgcaaaatctcaaagtgggtgacagcaaggttgcagagataataataatgtcaagaaacagtgcggatacaagcttgagaatatttaattccatagagcattacggccttgacatcacaagggcggcgcttgcgggaggcagccgaatagagccttatcttgacgcctttgatacggacctgtttctttcagccaatgaggaggatgtgcaggatgcagtcaatgcaggcatagccgcaggtcttatctgccctgcggtatatgacgagaacgaaatagatgtaattaaaatcgcctttgacggagatgcggttatattctcggatgaggctgaaaaaatatacaaagaaaagggacttgaagctttctcggagcatgagagagcaaatgcaaagaagcctcttccggagggaccttttgcaaaatttctcaagaccatatcatacatacaggagcagtttgaggcagaccgcgcaccaatcagaacagctcttgtcacagcaagatgcgctcccgctcacgagcgggttataaggacgctcagggcgtggggagtcagagttgacgaggcgttttttctcggcggcatagaaaaaagcagagttcttgcatcctttggcgcagacatattctttgacgatcagcagcttcacatagctccggcgtcaaaatatgtgccgtcagcgagagtaccgtacaaagaagaacaaacttctattgaaaaagcatagggagttaatatataatgaagctactaataattaacacggaggaaccgcaatgagaggactaaaacacattgatgacgaaataatagaattaagctacaaaaagaatataagtgaagataaggatttagatttagaaataagcataaactacaggctggattttgacgaggatgcaagaatgtgctatggcaatgcagagatagaaatagatgatgacgagcatactcagcttgaaatcagaattcatacaataggcattttttcatacaaggctgacgtacttacagatgaaatcagaagacagctccacgccgaaacagtagtagaacttaaccctcagtggaacagcctgctgacaaatctgacaatgcttgcaggcataccgcctatcgagcttgaacctatggaatttgaagatgcagagatacagctcagtcacggagaaggtctgaattaaaattattctgcaaaacctgttgactcttacctgacgttatggcttagacttacagctgaggtgatgataatatgctttcagtaggcaaaacagcgaagcttcttggcataagcataagaacgctgcattattatgacgagataaatcttgttaagccgtcatatactgctccgtcaggttacaggtattatgacgatgatgccgttgagctgcttcagcaggttatattcctgcgtgagcttgaaattccggtgaaacagattaaaaaaatactgggcagtccggactgcgacagggagtttctgctcaaaagccacagacagcttctgcttgcccgcaaagcacatattgaaaacctcatatcactgatagacaaaaggataggagttgataatatggattacagagagggcattgcagaggagcagcttaaatcggaatttgcagacgaggtcagaagaagatggggagatactccgcagtacagagagtacgaggagaaaatcaaaaaccataaatccgaagataacactgcgggagcagatgagatttttaaggcatttgcagaagccgcaggcagtgcgccgggtgacagagaagtacaggaacttgtccgcagatggcaggaatacattacggcaaattattataaatgctcagatgaggttttgcttggtcttgcagagatgtatactgcggacagcagatttaaggactatctggacagcttcggagagggtacagcgcagcttatgagtgatgccattaagtgttactgcagatagatatataaccgttttgattttttttcaaagcggtttttccataatatacagcatataacccgggctgttatgcagataataatcttgaggtgatttatatgaagaatatgaaaaaggaactcgataacagccagagaataaacgctccgataggagcaggcagcttcaacaaaagccctgactatgaatttgtctatacggcagacgatatggaaaaaggcgaagtgccgggactttacaacaaggaatatctgagatttggcgaaaaatcagaaaaaatcaacggaaagtaggcaggaaactgtctgctttctttaatctttacaaacccttcacattcagtacgcaaagaggacatatacatatgtataatagttattgtagacaaaatacaatttcattttcactttcctttatttataggaggcgacctcgtttagaggtcgtctttttttctgtcatttagagctgctttgtgttagaatagtagtaatatataaatgataaggagaatatttatgcttacaatagatatgaatgtattaagaccgcacaaaatagcagtaggaagagatttactcaaggactgcggcaaatatataaaatgggcgcatggtccatgcagcgtgcttatcataacagatgaagaggttgatgagctttacggtgataccgttgcggcaagccttgaagaggagggctttgaacaggtcagatttgtatttgcctcaggcgagcagagcaaaaaccttggccttatagacagcgtgtatcaggtgctgtccgaaaaggaatttgacaggacagacctcatagtcgctcttggaggcggtgttgcaggagatattgcaggctttgcggcatcaacatatatgagaggcatagaatatgtacacatacccacaacaatgctggcaatgatagatgcggcagtaggcggcaaaaacggagttgacacttcagccggcagagatatggtagggacattctggatgccgagccttgtgctgtgcgacattgacaccctcgacacactgcctgacgagcagttcagagacggccttgcagaggcaatcaagtacggcattatatcaggaaacgaactgttctcgctgtttgaaaacggtatagacagagatgatctggagaacattataggtaagtgcatagagctcaaaaaagaatacgttgaaaaggacgtatacgaccagcatatacgcaaaatgctcaatctgggccataccataggaaatgcgatagaagccgcaagcggatattcaatttcacacggagatgcagtggcatcaggtatagttgcaatgggtcagatattcgatacgccttgcgttcagagattaaaggacacattcgaaaactgcggctttgatatggcagacatcgactttacggcagaggagctggctccttatgcggccgcagacaagaaaaagggcggagattttgttgtaatagttataccgagagacataggtgtatgcgaactcgaaagactgcctatagacgaaatagagtcaaagcttgaaaaggtctgcatatagataaatacaaggagtattacaaagggatttatggattgtataaccaacattgattttacagtgcttaactggctgcatgatacgctgtcgtgcagatttttagacagcgtgatgccggtaattacaaagctgggaagcaagggtattatatggcttgcagtcgcatttgtgatgatgtgcaccagaaaatacaggaaatgcggcatccttatggtgataagcctcatagcgggagtcctcataggcaatctgtttttaaaaaacatcattgcaagaccgaggccctgctggataaacgaggacttccctatgcttataggcgtgccgggggattattctttcccgtcggggcatacactgtcatctgctgcatgcgcgacggtgcttaccctcgagaacaggaaattcgcatactgggcaataccaatggcggtgcttatagctttctcaagactgtatctttatgtgcatttcccgacagatgtaatcggaggagcgcttataggaattgcaataggatatacagcatttaaacttgcaaaaaaacagattatataaaagaggaacatatatgggatttactcaccttcatgtgcataccgaatacagcctgctggacggggctgcaagaattaaagacgttgtggcaaaggccagggaactggggatgacctcccttgccatcacagatcacggcgttatgttcggtgtcattgacttttacagagaatgtatcaaaaacggaataaaaccgataataggctgtgaggtttatactgcggcaagaaccatggatgacaaggactccgaaaaggataagcatcagggtcatcttgtgctgcttgcaaaggacaacacaggctaccacaacctgattaagatagtttccgaaagctacaccagaggcttttactacaagccgagagtggacaaggagctgcttcgcagatacagcgagggaattatcgcgctttcagcgtgtcttgcaggcaatattccaagatttctgatgcagagaaactacgaggctgcaaagcaggaggctgtagagcttgcggatatattcggaaaggacaatttctatcttgaggtgcagaatcagggccttgaagaggaggcggctattctgcccgatctcaaaagactgtcacaggagctggagcttcctatggttgccacaaatgacgtgcattatgtcaatcaggaggacgcaaaggcgcaggacgtgcttttgtgcatacagactctctctacagtcgatgatcctgatagaatgaagtttccaaacgatgagttttatctcaaaagcgaaaaagaaatgcgcagcctgtttgcgggagtagagggaagctgcgacaatacagaaaaaatagccgaaaggtgcaatgtggaatttactttcggacagcttcacctgcctgaatttgacgtacccgacggcaaaacggcaagtcagtaccttgacgagctgtgtgatgccggacttaaagacagatatggagataaggcggaggagatcagagaaagacttgactatgagctttccgttataaatcagatgggatatgtggaatacttccttatagtatgggattttatcaactatgcaaaaaataaaggcataatggtcggtccgggcagaggctccgcagcaggaagcatagtatcctatgttctcagaattacagacatagaccctattaaatacggtcttatctttgagaggtttttaaaccccgaaagagtaagcatgccggatattgatatagacttctgctatgagagaagacacgaggttatagactacgttatagacaaatacggtgaggacaaggttgcccagataataactttcggaactatgaaagccaaggcggcggtcagagatgtaggcagggcgcttaatgtcagctacggggaaaccgatgccatagcaaaggcgataccgtttgacctgaaaatgacaatagacaaagcgctggagcttaacccggacctcaaaaatatgtatgaaacaaaccctaccgttgcaaaggtgctggatatgtccagagcccttgagggtatgccaagacatgcatcaacccatgcggcaggcgtggttatatccaaaaaaagcatcaacgagtatgtaccgctgtaccttgccgaaaaaggcgtatccacacagttccctatgacaaccatagaggaactggggcttctcaaaatggactttctgggacttcgaaaccttacggtcataagggacgcgctggagatgataaaagaaaaccacggcatagatatagatttttcgagaatgagctatgatgaccctgcggtatacgaacttatagcctcaggcaacacgcagggggtattccagcttgaatcggcgggaatgacccagtttatgaaaaacctgcggcctgactgctttgaagatatcgttgcgggtatatcgctttacagaccgggtcccatgggctctattcctacatatatagagaacaaaaaaaatcccgcaaaaatcagctatatagacaaaaaacttgagcctatactttccgtaacctacggctgccttgtatatcaggagcaggtaatgcagatagtaagagatctggccgggtatacctacggacgttcagaccttgtaaggcgtgctatgggtaagaaaaaaatggacgtgatgcttgaagaaaagcagaatttcatatacggcagagataacgaggacggcagcgttgatatcaaaggctgcatcagaaacggagtgtctgagaaggccgcggaggaaatctacagccagatggttacctttgcgcagtatgcattcaacaagtcccacgctgcggcatatgcggtggtaggctatgaaacagcgtatctcaagacgcactatccggtagaatttatggcagcccttatgacaagcgttatgggtgagcctaagcatatcgcaaaatatatgaaaaactgcgccgaaatgggcattgaagtgctgcctccgagcgtgcttgacagtaatgttaaattcacagtcgaaaacggcaaaataagattcggcatgatggctgtcaaaaacgtgggagagggcgtaatcagagaaataatcagagccagagaggaaaaaggcagagcgactgacatataccgcttcatagaaaatctcgatatacacgagataaacaaaaaagccatagagtcgctgattaaagcgggtgcctttgactgcatcaacgaaaacagagcgcagcttcttgcagtgtacgaaaatatcatagagtccgctcaaaacagcgcgcgaaagaacatagcggggcagatgtcactgttccagatgaattcagaagaaatggaaatcgaaaacctgacaggcagactgcctgaggtaagcaatttccctaaggagatacttgcagcaatggaaaaagaaatcctgggagtatatctgacgtggcacccgttaaacgagcatatagagcgcatagagaagcttgtgactcatacaagtgacagccttgacacagatgaggcggattcgggcaatataacggacggaatgaaggtcactatggcaggtatcatttccggcaaaaaaatgctcacaacaaaaaacaacaagcgtatggcatttcttgacgttgaggacatgtacggctcttttgaggttattgtatttcctaatgtatatgagaaatgcgcagactgcctcagagaggacaatatagttgccgtaaagggcagacttaatttcaaggaggatgaggccccaaaggttcttgcggatacggttatagatatcagggccgctgcagaggccggaagcacagtaaaaataaggataccgcagtcggcggagcaggggcttgtcagggttaacgagcagataatgaagcacagaggagatacgcctgtaatcatatatgcaaacggtaaaactttcaggtccaagcccgatatgtgggtaaatgtttccgaagaatttaaaaatgcggtgatacagattgtaggagctgagaatttcaaggaggtatagagatgaaaaaaataggagtgctgacaagcggcggcgactctccgggaatgaacgctgcaataagagctgtggtaagatgcggtattgacaggggaatgacagtctacggcatcagcagaggatatgagggcctgattgacggtgatatccgggaaatggacagagcttccgtaggcggcatcatacacagaggcggtacggtgcttggcactgcaagaagcgaaagatttatgaccgcaaagggacaggacaaggctgtatctgttcttgaggctttcggtatcgagggacttgctgttataggcggcaacggttcgcttacaggcgcccttgagcttgacaaaagaggcattaaaattatgggcatacccggaaccatagataatgatttaggatatacagactattccataggctttgatacggctgtaaacacagtgcttgatgatatatccaagctgagagatacatcatcttctcacggcaggacaacacttgttgaggttatgggcagaaactgcggagatattgcgcttcgcgcaggccttgcaggcggagccgaatttgttatgatacccgaaagagattacgatataggtgatgtatgcaggaagatacttgagggagcggcaagaggcaagaagcacagcataatcatcaaggcagagggttctaagctttcctcacaggaggtcgttgataaaatatccgaaatcacaggcaaggataccagaatggtagtgctgtcatatcttcaaagaggcggcagtccgacctcagatgatcgcatacttgcaacaatggcgggagctaaagcggcggagcttctgtatgatgatgcagacagtaaagcgataggcattgtgggaaacaagataacagtgcttccgctttatgatgcgcttcagattacaagggatatagatccgtatatgctggaacttatagacgttttgtctaaataaccggggtgtttgaaatgagcagagttcttgacgaagatctggtatatgaaatactttctgtggttgaggaaatccccgaaggaagcgttgccacctacggacagattgcaaggcttataggcaggcctaaaaattcaaggcttgtaggcaaggtactgtctatgtcgcagttttacggcgattatccctgtcacagagtggtaaaccacgcaggaagactcgccccgggctgggatatgcaaagggagctgcttgcagacgagggcgttgagttcaaagacgaaaaccatgctgatatcaaaaaatatcagtggaggatataggccttaactgattaaaacaaaacattgggagaaatttttatgagtattacggtttctgatttactgaagctgccttctctccggcaggcagaggttgtaggcggacacagagggcttaacaaaatagtttcttcaatttcggttcttgagggtaccgatactaatcagcttgttgacgggattttcggtcagggagagttttttggaagcgagattgtaataacagggtttctcaactgtcttgatgatatcgaatgtcagtgcgccaatatacgcaggctcgcagagggcggtgaggtaggacttatcatattctatgcgggagtatatcttaaggaaatagaccggaaactgattgacaccgccaatgagctggacttcgtgcttattaaaatgcccccgctcaaaaccctgagatacggcgaggttataagtgatgtcaacgaatttatctttaacgacagagcagaggaggagtccatagtatcggatattcttgcaagagtttcaagactcccggagcatcagagaagcgtagatacagtgctgagaatgctgagtgacagagttatgtcatctgtagtgctgaccgattcggctatgcacgtgctgaaccttgcgccgtggccgcagagtatgagagatacgcttaacagcaatattgctcatctcaaagaatatgcagaagtcgagggcgagagcatatgcagctttatacccgacggtcatatatatcattttgagatataccctgacggcagtgataaaatgcacattttcgttattaaagaggggatgcagcttcatcggagaataaaagagcagattgcagatgttgtccggatatgtattaatatatggggcagagagcacggcacaatagtactgagagagctgatcagagccataattcaggatgacccgataaaaatgcgcagactttctgatatttttaagatagatattgccagcatacatgagctgtggattctgagaggaaaaagcgatgaaagcacagctctcctcagaaaccgtgcagacagcatatgcgaatgtctgaaggagtgcaccgatgttgtttttgcagatatgtatgaagatgagctgctgctgttttcgagcacgccgtattcagagctgcaggcagaaaaagcagcaaaggaaataatcagagaaacagaagccataggagaggatatgacggtatcacgctgcggaagtcttgaaaacaccactgatgtgagaaatgcctatatgaagcacaggcagtatatatcagatgcggccaaaatctatccggcaagaaaatggttcagcataggcgatattgaatttgcagcctcctgccatcagcttgcagacagaggcgaggagtcgcttgacgcggcatttaactgtctgaggaagcttcagtcgggcaattacgaatgggatgtgccggaaacccttgcgatatatcttcttgataccgattcgagtgtgacaagaaccgcggagattatgtttcttcacaagaatacaattaaataccggctaagagtgatttcagacgaattgggcttcaggccaaacaagatgcccgacagtattccgctgtatcaggctcttgcagtcagcagactgctcaaataaagcaagacagtacctgcctctttgtcctttgggacaagcgggcaggtatgttttttatgccttaatgacaattccaataaacagctttggaatatagaatttattatgttatcaaaaagcaatattggaggtatttattatggcagagaataaagtcaaaacaaataaaaatgacaagggtctgtcacagataggacgtgacgagaaaagatcatggggaagtgtcgcctttatatggatcggcactatgatatgtatacctatgctgatggtcggaggcatctttgccgaaaacctgaccataggctctatattcggagtaacagtagcggggtttgcggtatgctgtctgctgatggtgctcggcggtatgataggaagcgatctgggacttaatgcaacaatgacatcaacccatgccttcggtatgacaggagcaaatttttctatggcgcttgtcatatttatagccgaaacgggctggtttgccgttcagacagcaacctgcgcgctggcgtttaatacgctgatggaaacaataggcattgcttttcctttctggctttcgtgcacaatatggggaattgttatgtttataacggctgtatacggtgttaaatggatggctgtattaaactatattgctgttccgctgcttgtaatactgtgcggatacggctgcatacattcgataaacactgccggatggagcgcaatatcgggcgcagtggaaaccaatgcaatgagtattcccgttgcggtatcaacagttatcggtctgtttgcgcttggcgcaacctgcaattcggactatacaagatactgcagatcaagaggcgacgttatcagggctactgttttaggtgttctgccggctgcggtatttatgattatgataggggcgataatggcactcggaagcggcagttatgatgttacaagtatgtttgcgggacttggacttcctgttcttgcaatgcttgtgcttatacttgcaacctggacaacaaacacaggcaatgcatatatgtcggggcttgccgtatgcaaaatgttttctattaaagacaaagaccgccctaaggttaccatgggcgtaggaattataggaattatactggcgataatgggacttgccgatgtgctcaatacatatataagcataataggcgctgttgtacctcctattatgggaatagttataagcgactactgggtaatctgcaggggcaataagaatatatggaagcctgtcagaggtatcaactggataggaattatagcgtggatatgcggcggcggctttgcacttcttgaaaccctcggcattattacagtgttcagtccggcgctggacggcgtaataattgcatttgtaatatatattgttctgtataagctgcttggaaaaacagcaatggcaggcaagggtgagatgacagttgaagaggctacttctgcagccagataaaaggaggaaacaaaggtgcgtaaaataggtattaaagaaattgaagatatagcattgggcgctgcgctgcttggcgcaggcggcggcggagatccgtatgtgggaaagctggttgccatgggagccgttaaggagtgcggagaggtaacgcttcttgacccggatgaaattccagatgatgcgctggttgttcccattgcaatgatgggagcgcctacggtgcttgccgaaaagggaatagggggaagtgagtataaaactctttacgatatggtttcacagttcttcggtaaaaagatatacgcatttctgccaattgaagcaggcggggttaattcaatgctcccaattgctgcctgcgcaaggctgggtctgccgctggtcgatgccgacggaatgggcagagcatttccggagcttcagatggttacgtttacaatcggaggaatgagcgcaactccgatggcccttacagatgaaaaaggcaacagcgttatatttgaaacaattacaaacaaatggacagaggaactggcaagagctgttaccatgagctgcggaggctcggtatcggtgtcactttatcctatgagcggagagcagctcaagaaatatgccgttaaaaatattgtcacaagaagtcagaaactgggtgaggcaatccgcaatgtcaaaaacagcagtgacaaaactccggaagagtattttcttgatttttcgggcgcatacaagctgtttaagggtaaaatcacagatgtgcttcgtgaaacaagaggagcgttcaacttcggtaaggttatgctggagggtataggagaatgcaaagggcatcaggcgtttgtggaatttcagaacgaaaatcttacagctacggtagacggacagatagttgcaactacacctgatctgatatgccttgtggatacggatacgtttattccgattacaacagatgctttaaaatacggaaaacgtgttctggcagtcggtcttaaatgctttgaaatgtggcgcaccaaagagggccttgaccttgtgggaccgagatatttcggctgtgataccgactatattccactggaagagagatgcaaaggaggctggaaataatgtataaactgggtatagacgtaggcggaacaaatacagacgccgtacttatagatgagaatttaaacataattgcggatataaagcaccctacatcagaggatatctatgacggaataataggcgcgcttcgtgatattcttgaggtgaccggtgttgacagaagcctgattaagcaggcgatgctgggaacgacgcagtgcaccaatgccattgtggagcgcaggaaccttgcaaagataggaattatgaggataggcgcgcctgcaaccacgggaatactgcctatggttgactgggcggaggacataaagcagattgctgcaggcaatactataattggcgggggcagcgaatatgacggcaaagagctggcgccacttgatgaagatgcggcaagagagttttttgcagagatgaaagaaaaaggcgtaaaatccgttgcaatatcttctgttttttcaactgtgcgtgatgaacacgaaaaacgcgcggcagagatttgcagagaagttatgggggaagatgtacatatatcagtatcgggtgaaataggctccatgggtcttatagagcgcgaaaatgccactatattaaatgcggctctgtggcaggtggccgaaaggtttacggacggatttgcaaagagccttgccgatgagggaattataaatgcggatatttatctttcacagaatgacggaacccttatgactatggagcacgcaagaaaatatcctattcttacggtagcctgcggaccgaccaactcaatcagaggagcaagctatctcagcagcctcagaaatgccgtcgttatagacgtgggaggaacaaccacggacctcggcgtgatacagaacggatttccgcgagagtcaagtgttgctgttacaataggcggtgtaagaacaaatttcagaatgcccgatgtgatatccataggactcggaggcggttcgatagtccgaaaccgggaggacggtactgtaacagtgggtcccgacagcgtgggataccagattacggacaaagcccttgtgttcggcggtgacacacttactgctacggatatcgccgtaagacttggtatggcagaggtgggagacacatcccttgtagccgatatacctttgaatcttgctcagaaagcgcaggaagtgatacgtgaaatggttgaggactccattgatgcaatgaaaatatcaaacagcgatatagatgttatccttgtgggtggcggttcgatagttttgcctgacagcctgcagggtgcagcttctgttgtcaagcctgagcatttcggctgcgccaatgccataggctccgccatatcaaaagtaagcggcacttatgagaagcttgtgaattacgatgaaatccctcgtgaggaagcgcttgaacaggcaaaaaaagaagcgacagaaatggcggtttcggcaggcgcgataagagacaccgttgaaatcattgaagttgaggacgtgcctcttgcctattacgcgggaaataccaacagagtaaaaataaaggccgcaggagatttaaaagcatagatttataccggtgcccttgcattatgcaggggcatctgctattataatcgcaacaggacaataaatatttttattcgtggaaaggcggtaaagcttatgaaaatcagaaaaccggcatttgtaattgcgctggcgctgtgtcttgttacagcactgtttgtaccgcaggcagcgcttacggcagaggctgcatcggtagtgaatatttcttccgcagcaggacttgccaaagctctcacagactcaaagagcgcagcatacaaactgacggcagacatcagcggcatcaaaaaagaaatcagagttaccggcggcaccaagacacttgacctgaacggtcacagcatcaagggaagcagcactgcaagctccctcatatttgtcaggggcggggaccttacaattaaatcatcggcttccggcggtacgatcagaaacacaaacaatcaggacgccgcaggctgcggaagcggcaggctgacacttgaatcgggaacactgcaaggactggtatacggcatatatcaggaaggcggcacggttaacatcaagggaggtacggttaagggtatcgaaaacgcagtcaagactgtaaagggaactcttaatatttcgggaggcagcctcaagacaacaggcacttccggcaaaagtatatatctttcgggaaccaaaaaaatcacagcgaagctgtcaggcggtaaagtaacgggatccaactgcatttatcagtttggtaaaaacagcagtcttacaattacaggaggcacatatacgggaagcaggcaggcattatgtcttgacgaaggcaaatgcactgttaaaggaggaaccttcacaggcagcaagagtacggcaatagatatatgtccgctcatgggcaaggctgtattttcgatgaccggaggcaaggctgtctgcaaagtcaaagaaagtgcggcgctgacagcgcaaaacaggactgatctcagtattacaggcggcacgttcataaacgaaaagggaggatatcagctccagatatttaataccttctccggcaaaaaagaaattgccgaaggaattttcgataaagaaaaaatatatgatgatacacctgaaggcaagggccttatag

SEQ ID NO: 854 - DNA, 31958 bp, Unknown
  16S sequences of unknown bacteria
aagctccattatgacgctttcgatctcgaacggtccgatgcggtagccggacgacttgatgacatcgtccgcgcgtccgacgtaccagaagaatccgtcctcgtccatccacgcaagatcgcccgtgtggtacatgccgtcgtgccaaacctcgcgcgtcttttcttcatctttataatatccggagaagagtccgcaggggatattccgatcggtgcggacgacgacctcgcccgtctcgccgagcggaacgggatttccgtcgggatcgacaagcgcaatatcgtaagcgggcgtgggcttgcccatcgagccgagcttgtagctgtttccggtgagattcgctatcgtcagcgtagtctcggtctgtccgaagccctccattacgcggagccctgtcatcgcctctatctgacggaacacctcggggttaagcgcttctcccgcggtcgtcgccttgtggaccgaagagagatcgtactttgtgagatcttcctttatcatcatgcggtacatcgtgggcggtgcgcaaaaggtcgtgatgccgtatttcttgaaaaggggaagtatatccgctgcgtggaagcggtcgaaatcgtaggtgaataccgagccctcgcacatccactgaccgtagagcttgccccagagcgccttgccccatccggtatcggatatcgtgaagtgaagcttgcccgcctcgacgcagtgccaatatttcgcggtaacgaaatgtccgagcgggtatttgtaggtatgctcggcgatcttcgggtagcctgtcgtacccgaggtgaagaacatgagcatcggatcgtctccgcagggggaatcctccgtccgctcgtactttccggagaagagcttgtactcgctgtcgaaatcgtgccagccatctctccgacctccggcaagaacctttgcgcgcacgccggggcagcgctcgcaggcgcggtcgatctcgtcggcaaggtctccgtcgtcggcgcagattattgccgaaacctcagccgcgttgaagcggtactcgaaatcgtgctccttcaagaggttcgtcgcgggtataacgaccgcgccgagtttgtgaagtccgaggatcgagaaccagaactgatagtgacgcttcagcacaagcattaccttgtcgccgcgcttgatgccgagcgaggtgaagtaattcgcgcactgggacgatgcgcgcttcatatccgcgaaggtgaagcggcgttcgtttttcaggtggtcgaggtggagcatcgcaagtccgtcggggttcttcgccgcgagcgcgtccacgatatcaaaggcaaagttgaagcggtccgcgttcacgaattcgaccgactcgggcgcgccgttttcgttttcgacggtctttacgaaatcctccgcaacaagcttttcgcgccgtcccgccgaggatatcgtctgcgatatctcctgctcgccgggcttgtcctcgccgctcattacgaccgcgagaaattggcatgcctctccgtcgattgcgatcattccgtgcggggtggagctgttgtagtatattgaatcgccctcggaaagcacctcggtgtgctcgccgacctgaaccttaagctttcccgaaaggatgaggtcgaattcctgtccggagtgcttcgtcatgtggatgggctcggtctgctgctttgcggaatactcatatgttacgaagtacggctcggcaagcttcgaacggaacatcggcgcaagattccgtatctcgatcccgtcctccttcgcggtctccgcaccgcctccgcgtctcgtgacggtgtaggaggaaagtctcgctccggagccctcgagaagctcggtcatttctattccgaaggcaagtgaacatttgtggataaaggtaaacggaagatccgcttcacctttttcgtaggtcagatactgctcgaccgacacctcggttttgagcgccatctcgtcaacggatattccgctgacctctctcatttcacggatacgctgacttacctcagcgagcatgtttacgggattcttctccatcttcaaaatctccttttctcattttccaatcgaacagaaaacaaaaatccgcctcaagattctcttgaggcggatagcataaacgcgacccgtggtaccactcaaattgcgccggaaaaccggacgccgctcacggactcaaacaagtcctgtgcttttacgcagcaatacggaagcctttacttacccgatggcgggtgttcgggacttcggctcggaagggatgggcttgctaagctttcaatacggactcgcaccaaacgtccgctctctgaaaaatcgggcttaaaccgtcttcgtcacagccttttcttattcgattgaccaaattatatcaccgaacatccgctttgtcaatagcttttttgaaaaatttttcgatcgtaaaaagagccggcaaagccggctctgtacgatcaatcgagataatatttgaaatcgtcggcaaaagctttgtccccgtcaacgccgatctcgaccgccagaagtatataataccttccgtcgcggtcggcgtacacggtatagctttcaagatcaagctccgttatgccgtcgccgtaaacttcgagcgcctgcgagcgcgcataagctttgaggcattcctccgttattccggaaagcatatcgggagtgagggagttgaatttgccgagaaggctcgaagaataggaaacaagcttcccgtcgtaggagatatcggcggtcacgccttcgtttacataaaatccgccgaccgtgcgaagaaaacaaatatcgtaaaaaccggaatccgcacggtcctgcacctttttcagtttgagatcggacatatctattccgaaagattcaaacgctttgacggcaatattgcacgcctcctcggcgctgatcccggcgcagtcggcaagatcactcgcccccctcatgtcggagctgtgatatccgctcagctttccgtccttgaaaacatactcgtttccgtcgccgtctgtatatacgtcggaatatccgtctccgccctcaagcgatttgtcataagttacgttgagggtttcgctgtcatccggcgcggcgggatttttcagaacgattttctcttcgatatcgtctctgcggatgcatccgcttttgaaggaaattgaatgatcatgtcccgcaccgtcagtcagtgaaatcacccctaccgcaagaagcgcgccgagtgctaaaaccgttgccgaaattacgactgtcttttttgtcatactacgcctcccgtgatttttatttccgatatcgctccgccgccgtgattctccgtcggcataatcttttcgattacctttgcattttaattatatcacagcatttttgtcctgtcaatattttgattaaatatttttgcttgctccggtgatttattatttgttattttaactatgcccgacagctttcaaaacatctccgtcccggttctatccgcagtccgctttatttcttcggtttctccgcatcatttgcatccgatgtaatttccgttttctccgcctgtgtcaggtcggcacaataccgaccgagcatacgggtgatcttcttctgattctcgagaacgagatcgagcttcttgtgaagatcgtcaacgatgagctcgcttttgagattcactttataatcgttttcggcgcgttccctgtccttcgcctcctgccgattctggctcatcataataagaggagcctgcaccgcggcaatacatgacagcacaaggttcagaagtataaacggatatgcgtcgaacgcccgtgaggcaaggatcacattaagcaccatccagatcaccataaccgcgatgaagctgaagatgaaagcccagcttcccgcaaattttgcaaccgcatcggatgcgcgctgtccgagggaaagcttctcccgctgctccgaattcttcgtaacctttgttgatataagctcatgtatgagctcctcatcggtaaattccctgtccgtcaggtcgagaagctcttttacgatcttttttctttcatttgcgtttttcattctattccttctttcgttgtaagtctgccgcctccgaaacaaacagggctttgacaaaacgaaaaacatcttgtcaaagccccttcgacggtcagtgattccagataagctgaagcagcagaatcagcaatgctccggcggcaataaacacaagcgcgatcaaaagtcccgcacgcagagccgcgccgataaccgttcttttttcttcgcgtgtgagcctcggggcattatcgcccgagttttccgacgggtcgtcggaaaggcttcgccgtctgccccgcccgcgcgggataaacatcgacggctgatctcccactccgctcatatccgcgacggtacgtccgtcgtcgtcctccggcaaacggtcccgcttcatttatcgtacaggtggcacgcgacgaagtgtcccggctcgatctctcgctgtaccggaatctcggtgcggcagcattccatgcagtttgcgcatctcgtattgaatttgcatcccttgggcggattcgccggcgaaggaatggttccctcgagcacgatacggttcatcttgaccgtcggatcggggatcgggatcgcggaaaagagcgccttcgtatacggatggagcggattacggaagatatccttcgttgagccgtattcgacaaggttgccgaggtacataacgccgaccgtatccgatatatgctcgacgaccgagaggtcgtggcttataaagagataggtgagcttgtacttatcctgtatatccttgagcaggtttatgatctgcgcctgtatcgacacgtcaagcgcggataccggctcgtcgcacacgatgaattcgggattgagcgccattgcgcgcgcaatgcatatacgctgacgctgaccgccggaaaactcgtggggatagcgatccttatggaacggctgcagtccgcagttgtccataacctgattgatataatcgtcgaactcttccttcggaacgaggttgtgctcgcgcaccgcctcgccgattatctcaccgacgggcatacggggctggagcgacgaaaacggatcctgaaagatgatctgcattttcgtgcgcatctttctcatctcggcggcggagaagtcatagacctccttgccgttgaagagaacctgacccgatgtctttgtgttatagagacggagtatcgcgcgtccggttgtagtttttccgcatccggattctccgacgagacccatcgtggttccgcgcttcagattgaacgttacgccgtcaaccgctttgacatatccgacggtgtgggcgatcattccgctctttatcgggaaatatttcttaaggtgatttacctgaaggatatactgaggatcgtactcaacgggggtgaaatcgtctgtgatgatatctgttttcttagtttttttcgactttttgacatcctctgcctgcttttcgccgtctgcgaactcctcggcttcctcgcggatctcgctcacttcttcctctgcgcgctgttcctcgttctctcctgccttccaaatcggcatatcattcaccctcctttctcagattttcctcatagtagcggtagcagctcaccttatgggtggggctgatctgtatctgctccggatacgcgccgtcgcagccgttcacgcacatttcgcagcgatccttgaaatagcagtagttcggcatgttgatcggattcgggaccttgccggggatggagtaaagcttatccacctgcttgccgacgacgggctttgaagccataagtccgatcgtataggggtgtgccggatgaacgaatatctcctccgccgtaccctgctcgacgatgcgtcccgcgtacatgacaacaacgtagtccgccatttcggcgataactccgaggtcatgcgtgataaacatgatcgacgagtcgatcttgtccttgaggctgcgcagaaggtcgagtatctgagcctgtatcgtaacgtcgagcgccgtcgtgggctcatccgcgattataacacggggctcacatgcaagcgccattgcgatcatgactctctgacgcataccgccggacagctcatgcgggaacatcttgtaaacgccctcgctgtttgcaattccgaccgtttcaagcagcttgatcgtgcgggactttatttcctcgggcttcagtccttcgctgtcgtggagcttgataacctcatcaacctgcgctccgatacggaacacgggattgagcgcggtcataggctcctgaaagatcatggatacaaagtttccgcggaggtgctgcattacctcattcggagccttggttacatcatatgccttgtcgccgaggttgaggcggatctcgccgtcaacgatctgtccctgaggacgctgcagaagctgcatgatcgacaggctcgttacggattttccgcagccggactctccgacgatgccgaccgtctttccgatcggcacttcgaatgtgattccgtctaccgagcggacagttccgacgtcggtaaagaagtaggtatgaagattttctatctcaagcacgttgttcttatcgtgcatctcggtgaggtattcgctctccgggacgttgcggcgcttgtgcttcttttcgagcgcgtttgttatctttcggttttctcttgatatgcggcgcgattccttggcggaaaggtagccgtcatttactttctttgacatctttctttcccccttattatcgcttcatgcgcgggtcgaacgcatcgcgcagaccgtcgcccacgaggttgaacgcaagcaccgtaagaaggagcagcatgcctgccgggatccatacgaaccaataggtcgtaagaacatgggtgttaaggcagtcgttgattatgttaccccacgatgcaaacgggaatttaacgccgagtccgagaaagctcagcgtcgcctcagtaataatgatggagccgagacccatcgtgcagttgacgataagctgcggaattacgttggggataagatgcttgaagatacggttctttacgctgataccgcaggcttcggtcgcagtcatgaattcctgctcgcggagcgagagtatctgaccgcgcacaagacgcgcgatccccgcccagccgaggaatccgaggatgagcatcaggtaaattatacggagcgtcggatcgacgcgctgcttatccatcgcggcgcctatgatgattatgacgggcatcgacgggatgcaatagaagatatcgacaagacgcatgatgatatcatcgatccagccgccgaagtatccggcgatacctcccatgattactccgaggaaggtctcgatgaacactacgatgaatccgataaggagggatacacgtccgccgtacataagtctcgtgagcatatccatgccgtatttatcggtgccgagccagtgagtcttgctcgggaaggagtagctgtcatactgacgcgaaacctgctcctgacggacggtccagccgggatggttcgcctttttctcaatcagatattcggcagtcgcacttgcttttccttcatcggaagtgttgtcggccgcgatcgggctttgctcttcaccttcctcctgagtttcagcaccctcttcggaatcgacgatcagtgattcgtcggtgtatgcgaattcgcttccgcctgattttatcgtctcgataagcttgtccttgaagtcgcggctgaggaatacgtcgggcatgatcgcctgaacaacgtagcggcttatataggcgacctccgccgaatccttcattaccgtatcgccgtcaacggtatactcgctgccgtccgcggtaaaggaaaccgttccggcagccgcgctgtctccgagataagcgcggagcgcggcgtatacaaaatcaaagctgagagtctctccctgaaccgacgaggatacaacatccttgtaggcgataccgacgatctctccgtcgcttgaaacggaatagaagtccgcgccttccgtggtaacggtatagtctatttccttataggtaaaggtgtcggtcttgtttataagcgcgagcattacctgcgcctgaaccggcgaggtaaacttctccgcatcctttgccatgtagcgaagagaatcgttctccgtgactgcggcaaattccttggggatgatcttatcacggtagaagaattccttctcgccgtagggcgagataagtccgccgacaaacgagaacagaaacatgaagataagcacgctcattccgacaacggcaaggcggttgcggaagaatcgcttcgcaaccatcattccgggagtgagtacctttacgcggcggtcgtcattgagagaatacttcggctcatcgccgtccgtattctttccggcagcctttttcttctgcgcatgatccttcgccgagatatcgggggcgttgtccgtgctgagctgtgatttcgttttttcgttttcgtcaaagttgctcatttcatcgtccccccttctatgcaatgcgcacgcgcggatcgaccactgcgtacagtatatcggatatcaggtttccggcgagagtaaggatcgccaggaataccatatagaacatggagaacggtatgtcgccgccgaccatggcctgatatgaaatatagccgattccgggaatagcaaaaagcgtctcggtgataagcgcaccggagaagagtccgggaaggcttccgccgattatcgttacaagcggaataagcgtgttgcggaaggcgtgatggtacacgacacggcgctcggaaagtcccttcgcgcgtgcggtgcgtatatagtctgcgctgagaacctcaagcatattcgtgcgggtatatctcataaggcttccgacgctgacaacaacaagcgttactatcggcagaacaaggtgattcgctctgtctaagaactgccccgccgtgctgagctgatagtaatctcttccgataagtccgaaaagatcgaaccagccgagcttgacgctgaacagaagcttcagaagcgacgcaaagaagaacgtcggcagcgatattcccgcaagcgcaattaccgatatcgtatagtccgtccggctgtactgcttcgtcgcggcaactatgccgagcggtatggcgatcaatacttcaaatacaagcgatattgcgcccattacgaacgaaagccatatgcagtcgttgaatttctcgagaacgggaaccgtatagaaccagctgtctccgaaatgtccctgcaccgcctcaccgatccacgaaaggtatccggggagaatatccttgtccatatgatatgtaaccgtgagctgttccatccattcctcatagcttttggaaccgggctgcatcgacttttgccgtgccatattttcgatatacgacgtaggcagacagcgcataagcgcataaattatgaatcccacgaaaaacagaatcacaattgaaataagaatccgttttaaaatgtactttcgcaaaacttttcctccgatccggtatacaacggctttgtatttccgctgcacaccgggcagcgtctttgtcatcgcaagggcgctccccggcatgcagccgatataccgtcccggcggtcaaaacgaccgccgggacgtttttcgactattaaggcaataccgcacaattccgacggtgcgagtgcgccgtcggggcaatcgcctttaattgtgcggtgttacctcagatatcagattcagataaatccgagatgattattttgcttttgcctgtacgttctcgatctcagcatcccagccgtagaaggtcgtgatgtcgggagtaacggagctgatgtcaacacgctcggtcgagaagatgatcgcgttctgacgctgatatacaggtacttcaactgcccaatcgacaacgatgtcgaggcaagccttgtatacggtcttgcggtagttctgatcgaggctcttgcgagcgtccatgacgagcttatcaagctctgcgtcggcgatatcgtacatgtagttggaaccgccggctgctgcgccgttgtttgcaacgtctgcgtagtagatctggtacatatcgggatcgatagttgcctgccatgcagcgcaccacatatcaacgttctcagcctcgatgtccgtccaaagctggctggagtcggtaaggtcggtgacgataagcttcatgccgatcttagcgaatgccttttcagcctcggtgagcatcatgaatgacgggtggttacccttaccgtctgcggggatctgtacttcgtactcaagctttgcgccttcgggagcagcggtaagcttaccgtcggtaacggtgtagcctgccttctcgaagaatccgagagctgccttgagagctgcgtcgtacttctgctctgcggtcatgccggaggtgtagatatcctttccgtcagcatcaacggagaatgcaaccttgtagccgtcatcggtcggctgaggagctgcccaggaggtgttggagataggatagttgataacgcttgctctctcaccgtagtaagactcaacagcaacgtcacggtaaaccgcgagtacggttgcaagagccttgcggagatacttggaagcatcgcttccgggcttgccggctacgttgatgcggtttgcgctcattccgagataaccgtaaccgaggttatcaacggtgctggtggtgatcttgtcgccggtgaggctcttgttgctgttttctttttctacagcttcaacggtatctccggagaatgcgggatcggtgatgtcgatagtaccggtggtaacaccgttgagcttatcgtcatcggagatgcactccttgaagtttatatacttggaaacgggtctgcccttgtagtaagtgtcgttggactcgaaggaaacaacaccgttctcatacttgataaacttgtaaggacctgcgcccataggagtggtggtctttgcacggacaacgctgaggtcgcccttcgggaatccgaacttgttgttcgcatagtcgaactgagcctcgtcgccgtagtagtgcatgggagcgacggtaacgccgagctgatagatagcggtagcgtcaacctgggtaagagtaacagtcatgttgtagtcatcctgcttctcgataccggaaatgcttgctgcggaatcaccgtattttacagcggtggtaggatagttgttataaacttccttgtccataacctcggagagaactacgcctgcggtctcagcctccatagcggagaatacccagctgtacttctcaccgatagccattgcgaagtcttcaacggtagcgtcttccttgagaccgtcaaatccccagttagctgctgcgccggcaatgtcgcccgcttcattggcaccggcttctacacagtagtcaacgatagcctgagcgaagggaacgagaccctcgtcgaatgccttccagaaagcagtctgctgctcagcggtaacgatggagagatcagccttgtctctgccgaccatcgggaagtacttcgaaagagtggtcatacctgcacggtactcatccatgcccttgatcggaacagcaaacagagtggagctgccgtcgtaggtaggatcgcaaagtacgtacatgctgaagattacgtcatcaacggtaacaggcttgccgtcggagaaggtcattccctcacggagcttgaaagcgtatgtaacggttccgtcggtgttctcggtgatcttgcagtcggatgcaccggtataggtataggagtgaccgttgtactccctggtctcgccttcgatgcctttcatgatgatagcgccctgacggtcatttccgagaagaccgatctgggtcagctccataacgtcctggtcataagcgctctccgcaaagaagggagaaaacttttcgttgaatgcggaataaccgacaaccaacggggtaagattctgctcacgctgttctacaggtgccgtggttcccgtaccgttatcggtgcttgcgggatccttgtcgccgttgcctttgcagccggcgaacattccgagacacatgattgcagcaagaagcaatgcgagtgttcttttcatggatacatactcctttttttatttttttgcttaaacggatgttatccgtgtggcacattttcagtgtccgcccgaggcggactcggcatctgaatgccgattttccgcgacatccgagacgtgcggagatgcgatccgatcgcatcacgaagcggtcgcgtgcagcaccgccgtgcatcatccggggacttttccaagaagcatttgtgcgaaaatcgcagattttcatttttccgtgcgggattcgtcatccgagcagaggctgcgcggcgcttctctttcccactgcgttttccgaacaatgtctctcagcgcaagcgcagacagtatttcgagcgccttcagaacgaagaaaaggatcgccgatataactctgccttcgttccccgacaggatcaggtacacggtctcggacagtgcgccgactgcggcaagcacaagaaatgcgatacaccttctcggcacggactcgaccgcactgcggtattcgtaatcgcgcagacgtgcgccgccttcgctcaggcggaatgatgcccacacgatgcttcccgcaagcgcaagctcgacaagatacgggattataaggtacgcgcatccgcgcattcccggcgcgccgatacatccgccggcgaccgccgacagaaaggatatcgccgacgcgatccagacatacgcgagataccgcccgaacggacggtcggatcgacagacgtaatgcgcaccggcgtaaacatattttccgtccgcgccctgtcggaaatttccgagtcgggagcgtctcccgcgtccttccctgcggtcggacatgtcaggagatacccgtcaggtcgtaatcgtcgagccacgcggaggcagtctcgcagacgccgcgcaggcagttctcgtcaaacggactttcaagtcccgcattctcgagaagctttgtgaaggtgcggcttccgccctgaacggtatacgccatgtagtgcttccatgcgtcgtcgcgatccttctgaagcatattccagaattcaagtgcaacggtctgcgcaaggcagtaatctatgtaatagaacgggttcacataaatatgtgtctgacgctgccatccctcgccgtcggcgtagaacgggatatcgccgtcaagcttcacccacggcatatagatgccgagaagctccttccatacggcatggcgctgagccggcgtcatatccggcttctcatacaccttgtgctggaagtgatcgaccatggttccgtaggggataaatgtaagcgcaccggacagatggctgtagcggaatttgcgcgcatcggagccgaagaatccttcggcattgcgccatgcaaagaattccatactcattgagtgaacctcgcatgcctcgaggctcggccagatactttcgatcgggacgcggtctcggttcgtgtagcaggcgaacgcatgacccgcctcatgggttatgacctcgacatcgtgctgcgttccgttaaagtttgcaaatatgaacggcactccgtaatcgagaattccggtgcagtagccgcccgcttccttgccctcggtcgaaagaacgtccataagtccgccgtcaagcatcgcgcggaagaacttttccgtctcgggcgaaagatctgtataaaatttgagtccctgagcgaggatctcgtcggcgtcgcccgccggacggggatttccgctgcggaattcgagcgcattgtcggcaaagctcatcggatagctcttgccgaggcgctgcgcctgtgcgcggtagatcttatccgcgacgggaacgaggtacttgcgaacggcggcgcggaatttctccacgtcgtccttcccgtagcaattgcgcatcatgcggtagtagccgagcttggtgtatccgccgtagccgagctttttgcccatcttgtcgcgaagatgcacgagctcgtcgtatatcgagtcaagctttccgccgtgctccttataccaccgaccctccgccttccatgcggcaaggcggcgcttgtcgtccgcgccggtcttgaagggcgagagctgagacagagtgtaagctccgccttcaaacggtatctgcgcggacgcgaggagcttttcgtactcctgaacgagttcgttctcgcgctgaagctcggggattatctcgggagagaatgccttgaggcttatctcggcattcacgaacatgagatcgccgtattcagccgagaaatcttcgcggaacggtgttgcaagcatagccccggtccacttctgcatatactcctgaagctcgggcattgctccgttccagaaattcttttcctcatcgtagaacttatcccgcgtattcacggaatgacgtatggaaacgaggtttacaagggtgtcgatatgtttttcgagcttctgctcctcgaggaatacctctttggcatccgcgtagcttttcgccgaagcaaggcgctcggtgaggctgtcgaagcttttcttagtttcatcgatatcgggtctggtatagggcatttcgcaaaatttcatatcggtcctccgtttgaccgcccgaatatgtcccatccgcgcaaagcgcatcgagagcggctgatgccgagcggtgtgatacgcctcttcccggttctgtcgggttcgcgtaatggcgcaggcagcgtatgtgcggcacctttcggtaaggtgcgtccaaatcatgcacgcctctttgaagcaccgtcccgaccgcatcgaaacgcacttcaaaaggcatatccccggacggagcgcgcctttgcgaatcgttccgggaatatactgcacatttttttactgttattatactcgatttacgcacaataatcaacagtttttgcaaaaaaccgtttataaatttttaacaaagcgatttttttgcgaataagagctgtttttcagaatttttttctctgtttccgaatttttttgctccgtcagcggcgtcaaaaaaattattttttcagtcggttgattttgacgctgaaaatgatatcccgatacggtcgcagcagtgccgtccgaagggtcccggtcggcttcgggtgaaaatatctcaggaaacggcaaaaatttttgccgttttttcgcctcgcctcttggaagagccgaaaaaatgtgataaaatatgtagaaagccgcgcgctccttgctgcggcgaccgaaccgatcgattgaaccgatcatcccggcgcgtcgattcacgccgcacgccgtccgaaaaaacagtatttccgaaaggagacctccgcatgcggaggaagcgtttcaatatggaatcagaaaaacagaaaaaacggaagaaagggcttctccgtcgctttcttccctacatgaagccgcaccgacaaacgattgcgatcgatctgctctgtgcatctctcacctgtctttgcgatctcgtcctgcctcttattctgaggacgatcacaaacaccgcgtcgaccgatcttgcgtcgctcacggtatcgcttgtactgaagatggcacttctttacttcgtgctgcgcatcatcgacgcggcggcgcagtattacatggctgacatgggtcatgtaatgggcgtctacatagaaacgaagatgcgcgaggacgctttctcgcatcttcagcttctcgggcacaactattattcgaacaccaagatcggtcagataatggggcgtataacgaacgatcttttcgaagtgaccgagtttgcgcaccactgccccgaggaattcttcattgcgttccttaagatcacggtaagctttataatcctgtgcacctacaatgtcccgctgaccgtcatgatcttcctgtgcgtgccgcttatggctttcgtttcgggaatgctcaatcaccgtatgcgcgatgcgttccgcagtcagcgcgtgcagatcggcgagctgaacgcgcagatcgaggacagtcttctcggcgagcgcgtcgtaaaggcattttcctccgaaaaagcggaagaggaaaaattctcccggggaaaccacaaatttgaagcgatcaagaaaacatcgtacagattcatggcgctgtttcaggcttcgacccgccttttcgacggacttatgtatcttgtcgtcattctcggcggcggacttttcgtgatctacggcggtatcacccccggcgatcttgtagcttatgtgctttacgtttcgacccttatcgcaacgatccgccggatcgtcgaattcgccgagcagttccagcgcggcatgaccggaatcgagcgtttcttcgagatcatggacgcgccggttgaggtcaccgacaagccggacgcgaaggagcttgaggtcacgaagggcgagattgaatttcacgacgtaagcttcgagtatgaggacgacagcactccggtgctcagccacatcaatctgaagatcggcgcgggcgagcgagtggcgctcgtcggctcatccggcggcggaaagaccacactgtgcaatcttgtgccgcgcttcttcgacgtcacgggcggagcggtgctgatcgacgggcaggacgtccgcgacgtcactctgaaaagcctgcgcgacgcgatcggcatagtccagcaggatgtataccttttcagcggctcggtatcgcagaacattgcctacggcaaggtgaacgcgaccgaagaggagatacgcgaggcggcgatccttgcgggagcggacgaattcatccgcaatcttcccgacggatacgacacatatgtcggagagcgcggagtcaagctctccggcgggcagaagcagcgcattgcgatctcccgcgtatttctcaagaatccgaagatactgattctcgacgaggcaacgagcgcactcgacaatgaaagcgagatcgtcgtgggagagagcctcgaaaagctcgctcacgggcgaaccacgctgaccattgcgcaccgtctgaccacgataaaggactacgacaggataattgtcctcggcgcggacggcatcgaggaaacgggaactcacgaaacgcttctcgccggaggcggaatgtactacaagctttggaaccagataaaataaacatccgccgcgcattgccgcggtgaaagcataaaggagaactaccatgtcagaacagaaaatcgagacaaaatgcctgcatgcgggatacacgccgaagaattcggagccgcgcgttcttcccatagtacagagcacgacctatgtatacgattccaccgcggacgtcgcggcggtattcgacgatcccacaaagagcctgatatattcgcgcttcgcaaatccgaccgtcatggcggtcgaggacaagatcgccgcgcttgagggcggcatcggcgctatgtgtacgacgtcaggtcaggcggcgacgcttcttgcgatactcaacatctgcgaggcgggcgacagcctcatatcgacccccgagatctacggcggaacgatcaatcttttttcgttcacgctgaagcgcttcggcattgaatgcatctatgtcagccaggactggaccgacgaggagatcgaggcggcgataaagccgaacacgaagctgttcttcggtgagacgatcgcaaaccccgcgctcaccgtattcgatatcgagcgctttgcaaatatcgcccaccgtcacaatctgccgcttatcatcgacaacacctttgccaccccgatactctgccgtccgatcgaattcggcgctgacatcgttatccattcgacgagcaaatacatggacggtcacgccgtgcagaacggcggcgtcatcgttgattcgggcaaattcgactggacgaagggcaatttccccgggctctgcactcccgacgaatcgtatcacggaatcacatacaccgacacctacggaaaagccgcgtacatcctcaaggcgagaatgcagctcatgcgcgatttcggcgtctaccccgccgcacattccgcattccttctcaatctcggactcgaaactctcgcggtgcgcatgaagcagtactgcgaaaatgcgctttgtgtggcgcgccatctgagcgaatcggaaaagatcgaaagcgtcacataccccggtcttgagggcgatgcgaattacgctctcgcacagaagtatctctccggagcgtcgggcgttatatcgttcgtcatcgcgggcggacgcgagcgtgcaacgaagttcatggattcgctgaagcttgcgtcgaacgaagtccacgtcgcggacatccgcacctgcgtgcttcatcccgcaagcgaaactcaccgtcagctcaccgacgagcagcttgcggcggcgggcatcaacgcaggcatggtacgcttctcggtcggtcttgaaaatgtcggcgacataatcgacgatatagatcaggctctcgcacagatttaaccgttaaacggaggtaaagcaaatgctcaggttcaaggacagagaaagaatagtttttgcgggagacagcgttacggacgcgggacgcgcataccccgtcggagacggtccgaacggactcggaaacggatttgtccgtgcggtggacacaatgctgaacgcgttctacccgcagttcatgttcgacatcataaacgccgggataaacggaaacaccactcgcgaccttctcgaacgctgggaccgcgacgtaatggcgctcaagcccgaccgtctcgttatatgcatcggaataaacgatgtatggagacagttcgactatccgtgcaatcccgaccgtcatgtgctcccggaggaatatgaagcaaacatgagaaagctgatcgagagcgcgaaggaaagcgttccggagatacttcttctcacgccgtactacatggagccgaatgcagccgacacgatgcgcgctcgcatggacgaatacggcgcgatcgtaaagcgtctcgcaaaggaatactctctgccgtgcatcgatcttcagcccgtgttcagcgagtatctcgccaaccgtcactcagcatatctgatgtgggatcgtgtacatcccggccccatcggctcgatgctcatcgcggggaagatactgaaggaattcggattcgacaagaatatcacggagtaattttgcagtgatccgcgcatcggcagtcatacgaacgcgctcggcgtgttcaagatgcggagcggtaaattcccgcggcgcttcgtctcgcgtctcgcgtatcagactaaaccttcatacgaaagcagggaggctcaaatgagcctccctgctttgccttcttcggcggacgtacaaagtcgtccgtttgcctttccgtctgaccttcgcccgataaaattttcagccttaatgtgcagacggggagagcggtgtatgccgctctccccgttttttattatgttttcgatcggaccgacgcgcttcgtctttatccggatcagccgacgactgccgccgggcgcgtccgatctgcggaacgtgtaatgtttcagcttatctttatcgcgccggacatacggacggaaagcgtgtagcacgaacccgcgccgaagattccgtccatgtactcgctgtactttgcggcaagctcaacgggaacgaatgcctgaatggttccggcaaatccgccgccgtgtacacgccatgccgcgcccgtacctgaaaggaatgcctcggtcacgcaaagcgcgagagaaagtccctgctcggacacgttcttcgtggtgtatacgttctggaggtactgatagctcgatcttcccgaagccatgacaccctcaaagaatgcattgcgatcgcctgccttgagcgcctcgacctgctcgcctacgcgatcgttctccgcaatgaagtggagagcgcggaggatggcacgatcgccgaccttctcgcggagttcgggaattctgtcgatgatatccttccgggtaagtccgcggagaacctcgcgtccgaactcatgtgcaacggacttcatctctgcgggaacggaagcgtaatcctcgttcagatcggcgtggttgccgcccgtgttcacaatgcagagcgcatatccttcctttgcaaggtcaaatccgagcttctcgataacgggggatgagggatccgcaaagtcgatggtgatgaatccgccgaccgcgcaggcggtctgatccataagtccgcacggcttgccgaagaacttattctcggcgaactgcgccatctttgcgatttcaacattgtcaaccttgccgccgttgtacatatgggagagaatgtttccgatcatgacctcaaaagcggcagaggaagaaagtccgcttcccttgagcacgttcgaggtcgtgtatgcgtcgtatccgccgactgcgtatccggcatcgaggaacgctctctccattcccgcgatgatcgacgcggaggtgaagaatttggactcatcgggagcctcggcgcactctgcgggaacaacgtcctccgggaatccctcgctctttacgcggataactccgtcgtcgcgctttgcggcaacggcgatgatgtcgaggttgatcgacgcagcgataacacgtccgtggttgtgatcggtgtgatttccggaaatctcactgcgtccgccgaccgagaaaagctcaactccgtcgcggtccgctccgtagatctcggcaaaagcatcgatcgccgcggcaacgcgcgcacggtttgcgtcggcgcggtcggcgccgattccgcactctgcggcaaacttcgcatcgaattcgccggagagcactttgttcttaagttcagaaactgtcattgttcaaattccttttcagaaaagtttttcaatcttttttattctaccacgctttttcggaaatgacaatacgtttttcggaaagaacgcaaaaatttgcattctccgcccggtcgggcaccgtatatgccgatgatgccgcgccgtcaatttccgttaaaccgtcgcgcggatgagaagaacgaggtccgccatgccgatattcgaatcggaattcatgtccgccgccttctcggaaattttcacgtcccagccgaaaagatatcttataagtgtgacgatatcgagcatgccgaccctgccgtcactgttcacgtctcctttgagaaatacgcttacgcggatcggtcccgagcaaagagcatattgaaaatcgttatcaagattcacggtgtgattgaaatacaccgtatattcgccgggctccgtgaaggtcagcgaaccggagtccggcgtgaactttccttcggctccgggcacggtaacctcgacctttgaagcctttcgggtatctcccgggatatttgcgattcttgccttgtactcgatcgcctctccggtaccgacctccgtgctgataaattcaacatcaagtctccgatagaacgccccgagaatgtcgggaatgtccgtggtaagcagcatgcttccgtttgcggtatactcaaaaagcgtctgcgcgttatagaacgtccatgtcgccaccgcaactccgcgcgaatgagcctcaatgaccatttcatcgaacgacgaaggtctgatcacatacttgatatcgaacccgcatccttcggagcgcacctgcatactgaggtttaccgcagttccgaatatatcgccgtcattccaatcgccgacgagcagcgaacggctgattccgggcatggcttcctttacaaaacggagctgatcggcgctgaaggagattatgctgcatctgctctccatcttatactgacggataacctcggcgatacgctttgcggtgttcgtctgcacgctcttgatctcaaggaaaaattctatatcggaatcggcgaccgcatcaaaaatttcggcgagcgtcggaacagatttgcctatattatcggcgatgctgcgaagcgaagcaaaatcaataccttcgatatcaacgccgttgatcgtcgggtcgtgatgtatgaccgggacttcgtccgtcgttaaatatatatcgatctcggcaacatccgcgccctcgcggtctgcggtcagcacgctctccacggaattttcctgtgcgtgattcgggcttccgcgatgaccgatattgagcgggaatcgcgtgacggtgttcggcataatgtcatctgtcgccgccctgtagagaatatccgtgctgtcgcttaccgcggcaaacgcacccgaaaggatcacgttcagcgcctcggcttcatcgatctctccggctgtgtttacccacgaaaggataaagtgaccgtagagataccgtgcggtctcgggcgtgacgcatccgtctgcaaaaagcgcaacggaggcggaggcgatgttcatctccgttacgatcttcgaaagcttttcgcggtcgggaacgctgtcaaatgcctttctgtagtccgcgatcgcgccggatgcgggataaaagcccttcgcctttgcaagcagctcaagcgaatcggacataaagaagaagtccgagactcccttgttcatgaagaacgatgccgccgcgcctgcagtctcctcatcggtgacgtacacaacgggtcttgagctcgagccgagaagagtgagcgcccgctcaagggaatacccgagcgcgccgtgcgcactgtcgtaaagtgcgaggctcttatccggatagaatataaatgctccgggaacgacctcgcccgaaagcttcgcggaaagcgccgcttcgtctcccgcctcctccacaaaggtaaatccgcccgctacattgttataggacgattccgcggagacgatcggagcagtttcggattccgcgctgaccgcggcagcgaacgaaagcgggcacataagagccgcaataagtacggcagttatacgtttcatcattttcacggcgaaaaacctttcgaaaattattcggcattcgatgccgcagatatggatatgttaaaaacgcagcgggagcggcggcgtacaatccactgatctctgccgttacgctcccgcaacttagtatttcgttattactctgcgttattctcgccgaaatccgcatatgcttccggattgtcggtggagaataccttcggctcggaagcttcctctgcctgtgcgtcgtcggatgcttcctcagcctcttttgcaccctgctcgagaagagcgcggatcgaaaggcttaccttcttggtctcctgattgatatcggtgatcttgacatcaacggtatcgccgaccttgagaacatcgtccggcttctcgatcttgtgatctgcgatctggcttatgtgaataagtccgtcaacgccgggaacgatctccgcaaaagcgccgaagggcataaggcttacgaccttgacgttcgcggtatcgccgatcttatacttgttgttgaaaatgaaccacggatcggtatcctcggtcttgtatccgagagagattctgcccttctcgcggtcgatcgactttacgaacaccttgataacatcgccgaccttgacgacctcggagggatgatggattcttctccaggaaagctcggtgagatgtaccattccgtcaacgccgccgaggtcaacgaatgcgccgtaagaggtcaggctcttaacgggtccttcatagatcgcaccctcttcaacggtatcccagaatgccttctcctttgccttgcgctcctcgcgtgcaaccgcacggatggaagcgtaagcgcggcggcgctcattcttgacctcgatgatcttcacgcgctgggtcgttccgacaagtgcggaaaggtctccgtcgcgcgggattccggtctgcgatgcggggatgaatacgcggttggaatcgagagaaatgataactcctccctttacagcctcgacaatcttgccctcaagaatctcgccgctttcgtaagccgcgactatgtttttccaattcttatcggaatcaacgcgctttttcgaaagggtcgcaataccgtcaacgtcgcttactttgattacgaatgcttcaacttcgtcgccgagcttgaacatatcttcaagctttgccgactgatcgtcggttatctgatcgcgtgaaataacgcccgtggtcttggctccgagatcgaggtggatctcattgggcgaaatagccgatactgttccgcaaactacgtctcctgtatttaaagttttgagggattcctcaagcatctgtgcaaaattttcagtggtctcgctcatgtttctttctacctcccttattacactgtacggcgtcgatgcgccggcagttatggacactgttttattgtacggtatcacgatatccgaaagtcccgaagcatcctcaatgaggtatgtccgatcgcagaccgaactgcagatctcgtaaagcttcaccgtatttgaacttccgcggctgcctatgacgatcatcacatccgatcttcgggcgagatcgtaggcctctttttgccgttcagccgtaacattacatattgtatcaaaaataaatggatttgtatatactttttcaataattttcaaacattttttccattcggacattttttgcgtcgtttgcgcggctattgatacccgacagcggcgatatttcagcgattcgtccgaacaaatccacctctcgagagaatcggcatcgggaaaaacaagtccgtcgccgcggcagcagctcatgatcccgcgcacctcgggatgctccgcggcgccgatcaggatgaaaagactgtcggggccggagttttcctccgcgatacgtcttaccttgtcaacataagggcaggtgcagtcgagcacgcggaagtcggggcactcctccctcgccgcttcaagctcgccgagcactcgcctgtcctctccgtgagccctcaccacgaccgtggtcggctcgccggaacgcgcacgcgcgatcacatcgccgagcccgtcggaggaaatgctcctgacaccgcgctcctcaagcgaacggttgtagccgtcgttatgtatcagcctgccgagcgtataaacggtccttgagcccgacgcgatctcatcctcgagagttttcgttgcacgtctcactccgaagcaaaagcccgcagaagccgcgatctcaatcttcatatgccttcctcacaaacggaatttgccgcgcctcatgcatctgccgtgcgctgcacgccttcgccgaggtcgcatatcgcgtcgaaaatcatatgcgacgccgcggaatactccgccgtgccgccggacacaaagccgaggtcggagtttgcgatcggttttcctatgattatctcggtgcggcgaaacggcttcacgcggtacgccttggtctttatgtatgcgggcacgacacatgcgcccgagcggtacgcgataagtcccgcaccgttctttatcggcgtgccgcgcgcgcaccttcccttgactcggtgaccctgcggaaatagggacacgacctcgccgccctcgatcatcgcaatagattttttgatggacgaaacgtccactccgccccgatcgaccggaaacgcgccgagcgcgcgtatcagctgagaaagaagcggaatcttgaaaagctccttctttgccatatacctcggctgcctcggaagcgcggcggcaagcacgacgacatcgcgcatgcttgtatgattcgagcagagcagacatccgccctcggcgggaaggttctccgcaccgatcacgcggacgcggtaaagcgcacgtaccggacgtgcgaaaattttatatatcgcctcgtaaaatttcatgatttcccctcagcttatactgatttgccgcaccttcggcaccggacggcgcgtctgccgccgtcactcggtcttttcgcggatgattctcagcgcctcttcgacggtgccgtcgaaatcaagctcggaattgtcgaacatgaccgcgtcctcggcggggacgcacggcgcgatctcgcgctcgcggtcgtttttgtcgcgctcctcaatgtcgcagagcacctcctcaagcgtgcactcccgacccttctcggtaagctccttgaagcggcggcgcgccctcgcctcggcggaggcgaacacaaacagcttgcagtccgcgtcaggcattatcacagttccgatatcgcgtccgtccattatgacgccgcccttgtccgccatatcgcgctgaactccgaggagaaagcttctgaccgcgggaagcgcggacaccgccgacgcatatttcgatgcctccggcgtgcggatctcgccgcttacgtcctcaccgcagagataaacgtgctgaccgtcgtcctcgtatttcagcgatatatcgcagtccgcaagaagcggcttcacctgatcttcgtcgtgagggtcaaccccggcgcgggatgcgcagagtccgaccgttctgtacattgctccggtatcgacataaacaagcgaaagccggcgcgcaagcgcctttgcaagcgtgctttttcccgcgccgctcggtccgtctatagctattttcataatccgtattcctttcttccttgaaagaattctttatccgggaaaatcccgtgcgaccgcgccgcatcagccgtgtgaaatccttccgtaccgtccggcggcgcacccggcgctcacatcccgagcacaaaatccgccgcgccctctccggctgcatgacccgtggaaaaggcgatctggaggttgtaccctccggtgtatgcatcgacgtcgatcacctcgcccgcgaaaaacagtccgccgatcttcttcgacatcatcgttttcggcgaaagctcggcgacggacacgccgcccgaggtcacgatcgcctcgtcaatcgggcgaaacgaccgcggagtcagcgtgaaatgctttatcactttgccgagcgccgctctttcctccttcgtgatctgcgcgcatttcctgtacggatcgacaccgcttcgcctcacgacctcggcgattatcgacgagggaaggagtgcgccgagggaatttatcagcgcctttgcggggctttccgaaagatcggagagtatccgtctgtcgagcgtctgcccgtcgagcgcgcatttcatatcgatctccgccgaatacgcagcgggatcggggcgcatatgagcggatgcggaaagcgcgagaggtccggagatgccgaagtgagtgaagagtatctcgccctgctcggcgaataccttctttccgccgccgtccttcacggtaaacaccgcgtttttgagcgcaagtcccatcatcggggatgtgtcctcaaccgtgacgatcggcacaagcgacgcctcaggagccgaaacgtcaagtccgaaatcgcgcgctatgcggtatccgtctccggtcgatccggtgcgcggatacgaaaccccgcccgtagcgacgatcaccgcgccgtgcgggtgaaaagagccacccgccgtcactcccgtgacctcgccgccctcgctttttacagaagaaacctcaagattcacgatcctgaccccgagggagcgcatctccctatcaagcgcatccgcaatatccgcggcgcggtcggattcggggaacacacgccgtccgcgctccgtcttcagatgaacgccgagcaattcgaaaaactccatcgtatccgccggagtaaatcggttcaccgcgccgtagaggaatttcgaatttttcgtcacatggcggagaaactcatcacacgggcagttgttcgtgacattgcacctgccctttcccgtgatcctgagctttttccccgtgagcctgtttttctcgtataccgtgaccgacactcccgcgcgtgccgccgttatcgcggcaagcgctccggcaggtccggcgccgatcacggctgccgtattatttcgaggcatcgtcattccccgcgggcgcaacgtcgtaaacgtggtatctctcccagagagtttcacgcttcgtaagagttttcgtcacttcgtcgcgtctcttcatgccgaccgcggcgatcagcgcgtttatcacggaaagcggcgcggcaagcgaatcgacgaacgatgccatgtcggatctcgcctcaagcgtcgcgtaagcgttcttcgcaataggcgcaagcttgttgtctgtgagcgcgatcacccttgcgccgctctgcacggcaaaatcgaccgcgtttatcatgcgcgcgctgtatcgcggaaagctgagagcgatcatcacatcgtcgggtgtaagtccgataagccgatcgaaaatctcgcttccgcttgtcgaacgcacaagccgcacgttgtcgaaaacgagggaaagatagtggttcataaactccgcaaggcaggcggaggaacgcatgccgattatatatatgttcttcgcctcgaggatcgccgacgtcgcgcgatcaaacgcctcgcggtcgagattctccattgtgtatctgatattctccatgtctgcggaaagcaccgccgcgggaatgtcctctccgcgcagcctgtcgttcgcaagcgcaatccgctgaaccgacgtcagccgctttctcacgctctcgcggatctctccctgaagctgcggatagccgctgagcccgagctcgtttgcaaagcgcaccacggtcgattcggagactcccgcctcctcgccgagcttcgacgccgtcatgtacgccgcgcggtcaaagtgattcagaatatacgaagctatgagcttctgcccctttgaaaagcccgacgaaagcgcctctatctttgccagaatgtcgttatacatcttcacatccgtttttatccggcatattccgcccgaaaagcggcatgcctgaaatcatactgcaaattaagccattatgattatattacaaagcgcggtcgatgtcaagaagcgcatcttgcatttccttcgattttgatataaaataaaaggcaaagcatcaaatcgaacggagaataacatgaaatacactgccgtaatatgggatttcaacggaacgatcgccgacgatatcgatctcggcatcggtgccgtgaacaaaatgcttgccgagcgcggtctgccgatcctctcgacaagagaagaataccgcgccaagcttcgctttccgataaaggattactacgccgacctcggattcgatttctcgaaggagccttacgaaaagcttgcgcacgaatggatcgcgctttacaatgcgggagaaaaggatgtccgcgcgtgcgcaggcgcgcccgaggcgatccgccgcatttcggaaagcggtcttgagcagataattctttccgcctccgagctttcgatgatggagaacactctccgccggcttgggctttacgactgcttcgaccgcataatcggacaggacaacatctacgcatcgggtaagctcggggccgcccgcgctctctcaggcgagctttcgggcaattatgtgatgatcggcgacacggtgcacgattttgaagcggcgcacgagctgggcgcggactgtattctctattccggcggacacgcgccgtatgaaaagcttgccgaactcggctttccgatcgtcggcgatctgcgcgatgcggcggacatcattctgggagattaagcgtaccgccgccgcaatgcatgatgcgaatacggagatgcgaaagcggaacacggatgatcgcataatgctcggtcgcggacagcgatgcggcggcgcgccgcttccgaaaagccgcttttttcgggaatatctccgaccttgcaatacgtcggttacggcgttcgggactccgagctctcttcacctcagatgtgcgggtgaaaatcggcgcggtttcgcaaaagcacgcattcggcgcaaaaccactgaatttaccgaatcaaatgccgaaaatccgagtacactgcaagttttgccgacatatttttcttttatctttattttggcgttttttcaaaaaatccgcatgtttaaaatcatcggcgcggtacaaaatatatttgccgcaggaagcatccgacacggtttcggaacgcggcaaatcaaaaatatctgcaaagcacgttcagcttacggagaaaggaaaactccaatgctcgacagaatagcactcattcttgtcatcataggcgcgatcaactggggaagcatcggtcttttccggttcgacattgtaggatggctcttcggcggagccggaagcgtcctcagcaggataattttttccgtagtcgcacttgcgggtctgtggtgtatctctcttctgttccgcagacgcgcagaaagccgggaataaccgaaaaaaggagatcgcgccgaggcacggtctccttttcgctctctccgaaaaagcgaaaggagccgcgcagtgcgcggctcctttattcctatattcctattcgccgaacggatctggcacgaagtattcaaacggatttctttcaagatcgaattccgcattgaagtaggagggggacgctccctccatcgcctcaaacgtaaccatgcgattgcactcgacaaacatatcgtagcattcgcggtatctctccgccatgaccgcgcgctcatcagaacttccgttcgtgtatctgtcctcataggttattccgatacagacgtacatcattcccgagaagtagctcttcaggcgcttttcctgaccggcgctctctgcctcgtcaagcgcatcgtgataaagctcgtacataaagtcgaaattgtccgccatgtacttcgcatcgaccatgcagtgatcccccgcataatcaagcccgtggtggaacgagcagcagcattcgtcgaggatatcgtttgccgtttcgcacatgcggaagtatgtgtacacgtcgtcgcctgattcctcgccgtagacgatgtgaaaccattcgagcgcatatgcgtagtattcctcttcggtgatcgaagcgtcccacgcaaggcgggagccgagatagagcgaaagcggatagaggatcgagccgtcgcccaattgtccgtgatacatgagcccgccgatgttctgcgatgcaaggtacttcatgtcgttgagaatcgaatcgaaaagcggcatcgaatacgcgacgttgtaccactgaagcgggtaataccatacatcgacgttcgggctcatctccgtccacttcttgaacaggcggttcattttgaagttgccggggcagttttcgtcatcgatatgatgtgtgttgcagtagaagtcaccgtttgaaatatagaagcagtaggagatgcgcacattgtcaagcggacggaccgtcttcggcggcgcgtcggtaccgtggtacgcaagcatcgaaacataaactcccggatacgcttcggcaaggacagccgccgcgcgattggtcatcatgagcaccgctccggtgttgcagccttccttattgaatacggcgcggcagtcgtcgcaggtgcagaatgacgcgttgtcgggctgcgcgatatcgatcgtcacgatctcgcgtccgatcctctgcccggcggcaataccgctttccaccttccagataacgtaattttcgatagcggtgatgatatcttcgtttgtgtagcagggctgtctgccctctatcctctcaccgaggtattcatcgtttttgaatatgttcgagtgatccgcgtcaagtccgtgacaggctttgcccgtaagtccgtaagcacccggcacgttgaaggacactttgaatttctttgcaagcggagtattgtaaaccgtatccgccgcatcgtagaattcgcggtatttgatcgacgaatcctcaaatctgtccgcggcggaggtcacgtcaacgtgctccgactcatagaggtaatctatctggtaattgttgttgccggaatgacgtccgtatatgtcgttcacgaatctccagccgatgtcctcttcgaggaaatcgtatacgccgtacatgcagccgcggtagcgtccgcccgtgattaccacatcgcccgaatccgtgacctttatcgagaacgcttcgtctccgtagtcggcagcgctgccgatcgcaagacggagcgcgtgcgccggaactgcgtcatgatcggtcacgatcgcaaggcgcgctccgcacgtcttttcgatatagctctgaa

SEQ ID NO: 855 - DNA, 2525 bp, Unknown
  16S sequences of unknown bacteria
ctgaaagcctgtgcccccatgcgctgggtggggctgatgaacacgctgaaagtgcaggtggaggaaactatttttcaagagttgatatttcaataatcatgtaagcgccagagttccctctggcgctcattttatttgcgctgtgcgttttttctgtactctaatggcaacaatcccgtgctttttcggaataattctgcaaatcggcttgaagtggaatagcctactgtttgggcaacttgtccgactgtcagctctgtatatgccagcagatattctgcttggctcatgcgccgctgttgaacatattccgtgatggtgcagtcgtagtatttcttaaaacagcttttgagctttgtcgttcccatacaggcaatctgtgttagccgatccagaggaatatcaaaagcatagtggtcgctaagataagcggcaactatttggagattttcaatatcctgttgagagagcttatgggctggtttatcaggatgtttcttctgatattccaccaccattgaaacagcttctgcgactttaccctcataaaaaagttttgcggcaatcccttccccgcgatagtctttgatttctgtgagtaaccgtgacatttctggaaagtcggaagtttggtcgatcttccgaaatgcatccacaggattgatctgtgcctccgggtacagttttttcaggtagtcctcataatatgccggtgcaatctcaatcccaaccgaacggattggaatatttttatgtatcaaagccttgtatggagtgtagcctccaataaatgttttgatacaaccggcagacagtctacggtatggagataattcctccccggaaatagagtcataccgagtgatactcagacattccggcatggagcattccaacatgaaatcttcgtggaaggaaaagttatggattttaatatcatataagtctttctgtccataagtccagtaggtgccttctccaacttcgggagaaagtttccagcagtcacctaatgccccatattgctggttgtctgggtcacggataaaaccgtgttcaattagtagcggtgtataaaactggtcaataatttcagacatgaaaacagaccgcctcctttttgcaacgattagacgaacttttgaaaggaacagacgaacatcgccgggacctattgaatgttgttcgataaatgcgtattgtattagacagtggttagaactatctaaccgaagaatatcacaaaccacttgtcgagtcaagacaatgaaaggtaggaggtcaaaatgagtaatcaagtaaattctatgaacaaaggtctgacagtgaaagaccttgtaacaacaggtatttttactgcactgttatttgtttttgtattggtgggcggtgtcttttttgcaacgaatcctgtacttacttttttcatgccagcaggaggtgggctgcttgctggccccatttatcttttgctgattgcaaaagtacataagcgttggagcctttctataatgggcgttatcatgggtattatttggttcgtgaccggtatgcactgggcttttgcgctgggctatctgattatggcgattgtcgctgactttgttgcgggtgcagggcaatacaaaagcaagaaactcaacagtctgtcttacatcctgttttccctcggcggtactggatcgtatatcgttttctttgctgaccccaacggctgggcgcagacaatgctgggtaatggaaccgaacagagctacatcgacaccatgcaggcaactgcaaataccggcatcctgattgccatgtttgttgctgttatcattacatctgcaatcagcgcttttgtaggctgcaaaatgctgaaaaagcagtttgaaaaagcaggtattacagcatgagcggtaaccgccacaagaaagggctttggctcgacccacgggccaagctctttcttattcttatgtgtgttttatcgtccatgtttgctccttcacttgcatatcaatttgtccttgttatgctgattgcggtattgggggctttctttggaaagtggaaatatgtcattaaggctgtatgcttttatgcggtcatctgtgccctgacagtttggatcatggcagaaatgacaggcacgctgcggacaatgtttattgcctttttaggattgtttcataaggtatatgcgtgcggaaccttggccgggattgttctgactactacaaaagtcaatgagttcctgtctgctatgaaccgtgtccacgcacccaaaaagttagtaattcctatggcagttatgctgcggtacattccaactattcaagaggactggcgctatatcacagacgctatgcggatgagagatgtttcaccatctctggcgggctttttaacacatccgggcatgacggttgagtgtatttatgtgcctttattgatggcagcttcaaaagcggcggatgatctttctgttgcttctgtcactcgtggaattgaaaatcccaatccacgcacctgtcttgtcc

SEQ ID NO: 856 - DNA, 2587 bp, Unknown
  16S sequences of unknown bacteria
tcccatttcagacaaagccagagagaaacaggaggcattatgacagattttcatcaagactactgcgctgtacgaaaagcgattatcgagcaggattatgcccatctgaaccccatgcagcgcaaggcggtcatggcgaccgaagggccgcttctgctgctggccggcgccggcagcggcaagaccactgtgctgatccaccgggtggccaatttgctgaaatacggccgcggcagcgacagcgacgaagtgccggccgatgctacggaggaagatctggcgtttttaaaagcctatctggagcatcccgacccgcagcaggagtaccgtgcacggcagctgtgcgccgtgcagccggcgctgccttggtccattattgctatcacgttcaccaacaaggcggccggggaactgaaagagcggctggaagccatgctgggaagtgaggcggccgatgtgtgggcatctacgttccactctgcctgtgtgcgcattctgcgccgggatattgaccggttggggtttgacaagagttttactatttatgacagtgccgacagccaacgggtgattaaagacattgtaaaagagtttcagtatgatgaaaaggcgtttcagccccgcacagtgctgggggatatcagttcggccaaagacgcgatggtgctgccggaacagtttgcacaggagtgggtcactcccggcgattggcgcatggagcgaattgcaaaaatataccgggagtatgtccgccgcctgcgtgaagccaatgcgctggatttcgatgatatcattctccacgcggtcacactgcttcagcagtttgatgaggtgcggcactattaccagcgcaaattccgttatgtgctcatcgacgagtatcaggacaccaacaatctgcagtatctgctctcctcgctcctggctggggaacggagcaatatctgcgtcgtaggagacgacgaccagagtatttaccgcttccgcggtgccaatatcgaaaatatcctcagctttgaaaaggattatcccaaggccagggtcatccggctggagcagaattatcgctccacccggcagattctggaggcgtccaatgcagtgatccgccataacgaagggcgtaaggggaaaaccttgtggacagagaacgacagcggagagccagtacatattcaaacggtgttcaatgagtccgaagaagcggattttgtcgcagggcagatcctgaaggagttcagttctggccgtaactggcgggataacgctgtgctctaccgtatgaacgcccagtccaaccagctggaacgtgctttcaaacgcaatgccattccttataaaatcatcggcggaatccgcttttttgaccgtgctgaggttaaagatatgctggcttacttatgcgtagtcaataaccctgcagacgatctgcggctgcgccgcattatcaatatgcctcctcgcggcatcggtgcgcgtacgattgagcaagtgcaggaagaagcgattcggcagggtgttcccatgtttcagattcttatgacagcggatcaatatccggaattgaagcgcggtgtgccaaaactgatggagtttgcttctatgattattgcgctgcagggtaaagccgagtctatggagctggacactttttatgatgaagtatgccaggacagcggctatctggccatgctggaggcaaaaaaggactttgaaagccgcggccggctggaaaacgtgaaagaacttcgctccagtatcgtcggttatatcgacaatcacccggagggagcagttctctcaggttttctggatgaagtggcgttgtatacggatctggacgatcagagcagcgaagagaatagcgtggtaatgatgaccatgcacagcgccaagggattggaattcccttcggtttacgtggtggggatggaagagaacgtatttcccggcacccgctgtcttgacgacccggcggaaatggaggaagaacggcggctgtgttatgtggctatgacccgcgccaaggagcggctgacgctgaccaacgccggccagcgtatgctcttcggccatacaacgaccaatccaccgtcccgttttttgcgggagattccggaagaaaaccgcgtctggacgaaaagtgctgcgccgcaggaattccgcccgggatttgatttccgtcaactcactgccgggatcggcggccgttctgcctcctctgcgggccgctcaagccagagtgatgtgcagaataagcctgtggagcggggggcaactatattatctgcggtttcttctgcggcagcagagctgcgccagggtgatatggtgcgtcacagggcatttggccgggggatggtaatgagcgtgcagcccatgggtggcgatgcactgctggaaatcgcttttgatgaagtcggcactaagcgcctgatgcgcaactctgccatggcctatcttgaaaaagaaggcggctgagcgtcatcggggctcaatggttcggcttttcccaatatgcacagaacgaaaaagcgcctttacatatcgtttttcaccgggaattgatgcaggaagtcaaaagttc

SEQ ID NO: 857 - DNA, 32759 bp, Unknown
  16S sequences of unknown bacteria
tcctgcctgatgggtgattcgacagcgcttgcctcagcaattgtgcggtgctgccctaaattctttactgattcaagatctccataaactcttcgccggtgatggtctctttctcgtacaggaactttgcaagctcgtcgagcttcgggcggttctcctgtaaaatccgcaccgccttcgcgtgctgcttcttcacaaggtcaaccacctgtctgtcgatctctgcctgcgtttcggcgctgcacgccagtgaagcatcgccgccgaggtactggttcgtcaccgtctccagcgcgaccatatcaaagttgtcgctcatgccgtagcgcgtgatcattgcgcgggcaagctttgtcgcctgctcaatgtcattcgatgcacccgttgtaacggaatggaacacgacctcctccgcggctctgccgcccgtgaatgtcgcaatcttgttttcaatctcctcgcggctcatcaggtaatggtcgccgtcctccacctgcatggtgtagcccagcgcgccggacgtgcgcggaataatcgtaatcttctgcaccggcgcggagttcgtctgcttcgccgccaccagcgcgtgaccgatttcgtggtacgaaacgatgagcttttcgcgcgttgtgagaatagagtttttcttttgatagcctgcaataacaacctcgatgctctcctcaaggtcggcctgcgttgcggaagcacggccgtcacgcacggcgcgcagcgcagcttcgttcacaatgttcgcaagctctgcgccggaagcgccggaagccatgcgcgcgatcttcgcaaggtcaacgtcgggtgcaaccttaattttcttcgcgtgtacacgcaaaatcgcctcacggcccgcaaggtcgggcagctccaccggcacgcggcggtcaaaacggcccggacgcgtcaaggcggggtcaagcgactccgggcggttcgtcgcggcaagaataataacgccgttgttgccctcaaagccgtccatttcggtcaaaagctgatttaaggtctgctcgcgctcatcattcgtgctcagctgattatcgcgctttttaccgatggcgtcgatttcatcgatgaacacgatgcaaggcgctttttcctttgcctgcctaaagaggtcacgtactttcgatgcgcccatgccaacgaacatctcgacaaattccgagccggacatggagaaaaacggcacgttcgcttcgccggcgaccgccttagccagcattgttttgccggttcccggagggcccacaagcaaaatgccctttggcatggaagcgccaatctctttatatttattcgggttatgcaggtaatcgacaacttcggaaaggttctccttcgcttcgtcctcgcccgcaacgtccgcaaacttaatgccgtccgaagactgcacatacaccttcgcactgctcttgcccatgtcgaacttcatggcgttcgggccgcccattttcttcatgagctgccgcgacaaaagctgtcccagtaccacaaagagcacaaccggcagcacccagctcacgataaagctcatcagcggagacatctgctccacaatctcgccggaaaactccgcgccggaatcgtaaaggcgctgtacaaggccgtcgtcattcaaaaggccggttttataaattttgctcttgtccttatttgtgaacaaaatctggttgtcttcaatctccacctggccgatttctttgttctccgtcatcttgatgaacgtgccatagtccacttcctccacctgatgctgtgtaatcagtggcatcaccagcatgtttaaaagcagcaaaacgaccatcgcaatgccgtaataaaaaataagcggctttttcggcgttttcacttcgttcatgttctctctcctctcgcgcgcgattaaaataagcgcgatattattttagcctattctatgcgttttttggcggaaagtcaatctcaaaatttccaacttttcgtgaacaaatcatgaaagcatgcggatattctcctgcaccgttcccgcgggcagcgctcctctccggtcataacaagtcgcttctcggcaaggccggcaaaaactcccgagaaaacatcgtccttgccacaaaacagcaccgcccgggttgacacttcaccccggcggtgctatgctttttccaaatttacgatttgtatttgagcttttagggggtattttcatgagcactgttttgattcgtgacgccaagctttccgacgcaccgcgcctgctggaaatttacagctattacgtaaaaaacaccgccatcacctttgagtacaacgtgccgtcgctcgaagaattccgacaccgcatgaaaaacatcacgctgcgctacccgtacatcgtcctcgaagcggacggcaaggtcatgggctacgcctatgcgggctcattcatcggccgcgccgcctacgattggtcatgcgaaatgaccgtttaccttgaccgcaccgccaaaaaactgggcttcggcagaaagatctacgaagccatggagcagcgcctcaaagatatgggcattttaaacctttacgcctgcatcggctatatcgacaaggaggacgagtacctaaaccacaacagtgccgattttcacgcccacctcggctacaaaacggtcggtacgttcaaaaaatgcggctataaattcggccgctggtacgacatgatctggatggaaaagtgcatcggcacgcacaccgatacccctgcccccgtccgctttttgaccgatgcacccgacccaaacgcgcattgattttatgcaccccataccttaccgcattgcaagcagcgctgcggacttcttcaatcttgttttcgcgcggtttgcgcaggcggaaagctccgcggcggcgcggcaatcgtccatttttaaaatgcgttccaagcgtaagagggccttttcgtcccactctgccttgttctgcgccgcagcgcccagcagcgccatcgcatccagataaaccttttcgggcgtgcgcaggcggcgcagcgtctttaaaagcgttttgcagtccatctggccctcgctctgcttgtgtgcaaaggcgaaaagctcgtccgggcggtcgtgcagcgtctcgtacacagcctgcaccatgtcggcgctcatcatctcgcccagcacctcgcgctccgtgttttcttcgcccgcaaggctcgcgccaagcgccatgctgccgtcttcgccctcaagctcacggtctaagctgtccggcacagattttttaaagcgatcgccgaggatattattcatcacatacgcaaacagcgtcgggataaaatgcgcctccccctttttgaaaaataaatcaaggcgcactgtgcccttgttttcgccctttgtaatggggctcatcaggccgatgaacgtctcgtgcgtgtattcggtctgcgccgtctccgcttcgccgccgcaaaaagcgcacagtgcgcgcagctttacacccgccgcagcactgcccaaaacgtcctttaaaagaaacgcatacagggtttcctgaaagcgtgcggaaagggccgcgtccgcccacaacacagcaacgctgttttttccgctttcgtacacttcctttaaaaccgcgcggaacgctgtttcctccgcgctcttttcaaataccttcgctgccatatccgttcctccttaaagcgtttttcttgtgctttaaggataaaaaacggttctcggtactatcccgaaacggtctcgattttttctcgattttcgccgaacagcgttgaagaaccgcacattcaatgctataatcgggttatccataaaaaaggaggaaacgcggtggacgagctttataaaatccaaaacgtcacgtataacgccacgggcggtactttaaaaaacgataaagcggtcatcgacctcaccgcacagcaaaaccgcctgctgcgctaccttgtcttaaacgccgggcaaacgctcacaaaagagcagatcaccgcgcatgtgtgggggtatgatgtcgattcggacgtcagcaacctcatttacgataccgtctccgccgtgcgccgcctgctgaaaaaagccgggctaaacggcgccgtcaccaccaaaaccggcatcggctacgcgtttacggaaagcgtcgaaaaaatcaaacccacagccgccaaaaccgaagaaacatgcgaaagcctgccgcccgtttttgcggaaagcgccccgaagttcacgctcgatacggtctatctgctgcttatgggcgacagtatgtataaaaaagcgtggtttttgcagtccgtcggccatgttgaaaagcttccgccgctcagcttggagcccggctcagccgacaccgtcgccgaggacgcgttttacagctggattttacccgaaagcatctgggcgcgcattttgtgcacataccccgaagaaagcgaccgcagagcgttgtatggcggcgaaggtacaagtgaactgctcctcgacttaaagcagaattttcaaaacgacagcggctggcgcgggcgtgagcttacacgaaactgcaaaacgtatttggagcgtatgctgattccgagcgtgattgagaccacactcggcgccgtgctgcaaaattcgccgcagctaagcgagctttaccacctgtggcaacggtgcagcgaggaaaataacgtccaccgcggcgtcgcacttgtcatcctctgcgccctgctcggcgagcggaatttcaaaatgcttgcggaaacctgcgatgtcattgaactgctgaatgaaaatttctgaccacaaacgacgaataaagttttgctcaagctttttcaaaagcttgtcagattccaaaggtgaagcctttggtcgagctccgcagagctcgaaacccttttgcctactccaagactatgaaggtagatttgaacgtccgggggacgttcaaatcgtaggaaacccagtcaatgggtttcctaaacggatcgccagagccgttcaaaaacaaactaacccatataaaaagaggtgcaaagccacatggaaacccctgttaaacctatcgcccaaaacacactgcatatctgctccgccgcagaagcgctcgctttgctcagaaagcacggcgggcacggcagcgccgcgttcatgcgcagccttgcggatgccgtctcggatgaaaacaaccacatcaccggcactgtcggcgatttcaacaacctcatcgaccgctttgaggcgctcggcgattatttcgacgctttgcgcgtgtgtgattttgcacttaaaatctatccccgcagcgcaacgttgctcgccatcacgctcaatacctgcgcccgcagcggcacggacggcgaaacctatcttgccgcagccgaaagcctcgggcgcgaaaactggaacgaaccgcggctttttaaagacgccgccgagtattgccgcacccgcgccttgtgctgcccgccggagcagaccgaagcgtattttgaaaaagccttctccgtctgccgtgattttcagcgtattttcccgcttgatgagcgtggttacatgaaagaagccaccgtgctgctcgataaaaaccgcaccgcagacgccgaaaacgtcctgcgccgcgtcatttttgagaaaatcaccgcaaacggccgtccgcagcccttaaacgccgcaaactgctgcaagctgtaccttacggaaattctgaagaaaagccttgaatacgacctcatcctgcgcattgcacaaaagggactttcgttctctgccgccgagcagaattccgagcacatgggctacttcagctaccgtctggcgctcgccaaaacagcgctcgtcattgaaagcgattaccgcaataaggccgatattgaagaagcgctcacgtgctgccagcgcgcgttcgaccttgtgacgttccaaagctatgcggatgatttaaagcgctgctacgtacagctgtgcgaaaacccgcagaatcccatcgacctcaaaacgcaccgccttgtaaagcacgttttaaacaccgcagagaccgcttccgcaccgacacaaaactaaatttgagctttaacatgccttgttctgtgaaaagaacagggcatttttcttttgtgcgctcaaaatttcgtatgcgccgttcgtagtaaaggtgaaagcaaacggatctaaggaggtttttactttgcctacacaaaacagcacccaaacctacgaaatgctcaaaacatatttggatgagaccgcggacagctttgaaaagctcgacgaggaacccgggtttttgtaccgcaaaacggacggccgcacctcgctcgttttctgcgcccgcgtggataaagagctcggctttctgcttttaagcgcctaccccggcattttagtccgcacgtcttacgagccgatggtcgccgattactgccagcgcatcacgccggaggtcggcgtcgtgtgtgtagaatccaatttgtgcgaggtctattaccgcacggaggtcgcctttgagcacgcgcccgtctcccgcgccacactggagcttttggagcgcaccgcgttcgccgcactcacgccgcacatcagcgctctgcgttcgctcagcgcgggcgtactgccggaggcgctcccggagacgcaggagatccacattccgtctcccgccccgtcccatgcggaagattttctgcctctcatggaggaatattttcaaaaaacgcactttaccgtgcttgcaaaacatgcgcccgatgaaaccggcgcgtgctacctctacgagtttctggccgcgcaccgccgctggaagctgcacgtcaccttaaatgatgagaagacctttttcatcctgcgcctgttccccggtcgcaacgcccttgtttttgatccacgctacctgcacgccgccgcgcagatctgcaacgcggaaaacgattccgtaaagtccggcgcactcttcgtcggccgccgcccggagggtctgtgcgcaaaaatggccctttccgcactggaagttcctacatcactcggagaaacgctgtattccgccgtttccatcctcgtttcgcttttgtatagccgcgaagcagagctgcaaaaagccgccgcaggcgtgatttttctgacagggtttgatgctgagaagctaaagccctccgcgtcagaccgcaaaaaacggcttgaagacgcgcagcgctttttggccatgaccgcccgcccaaagccgcttgaccccgcgtctgccgaaaaagaattcaatgccctgttcggcggcgacatcgccgagaccgatgacgaagaccccgaaccgttccgataaggaggctcttatgccggattattacattgccgaagacggcaccatccacgaccgcgaagccgagcaccgcagccgcacacagcacaccgcagcccccgccgttgccgataccaccgccgaggacaccccccgaagtcagctttgcgcgccaattcgtttactggcttttcgcgctttccgcttccgtctttgctgctgtttgcgtgtttcatgagatgcaggcagcgttcaccccgcccgcacacctcgattttttggaggactacgtacagcagttcgtgtttgagcacgccaaagcgctcgttatcaccctaaccgtattctgcatctatctttacggcaaaacgggcgcgaaaaagcaccgctataacgtgcttgcctacctctgcaccgtctccatctgctgctttgcgccgcccgccgccgtgttcgtactcatggccgcgcccatccttatggcgctcgcgcttgccgtgctcgtgctcggcatcatcgggctcgtcaaaatggcgttcggctaaatttttcgaaaaggagttttcccatgaatgcaccgttttccgccgttttccgcacgttaaacggcaccgccgcttcgctttccgcgctgcatgaaacgctccgccgcatggaagcggagacccgcaccgcgctgcgcctgaacgaccaaaacagagaacgccgcgtctgcgccgtacaggacgcaaccgacgagcttttagaagacttcgcgcacgagtacgatacacttaaaggcgatgccgaaagcctgctttccgccgccgagattgcgatgaacgacattctcgacccgcactttcaccgcatgcagccgcagtatttttccgccgccatgcaaaagccgtacaacaccgcaaacgtgcgcgcggaagcactcattgcacgcatgcaaaaagcgctttccgccattcaagccggcgcaaagaaaatcaaaaacgcgtttttgctgccggacgccgcggggctcatcggctccgtttctccggatttccgcaaatcgctctacatgcccatcctcgacgcctacgcgcacatgcgccgctgcgcggaggccatagaaaacgcgcccgcgtttaccgaaaaaaccgcccgcgcccacgctgtctgcacgcgcaaaacgcggcagattgaagccgaatgtaccaatctccgcgcggagattctgcaaaaattaaaggccgataccggagctgcaattacccgcacaaacgctgtgctctgcacaccgccaagcgctgcaattttcgccgaaaacgccggacatgccccgctttccctcggcacgctgcgcatcgcgctcccctccggcaaaatgtttacagcgccgcttacctgtacaaagctcgaccgcagcgtgctgtttttaacggataacaccgccccgcacgcgctcttttgcagtttggcgctcgatctgcttaaaagcgatcctgccgccgtcgtgcaccttgcagatcccgcccactgcggcaatgcgtacaaggacgttttcgctgcgtttacaccgagcggccgcgcggaaatttggtgcagtgcacaggaatttacccgcggcatagaagccttgtgtcgcgccgccgcagaaaatacgccgaactcgatgcactacgtcttcatcgaaaacatggaacagaatatcccggagcagacgctggaagaccttatccggctcatgcgcgccaacacctgcgtgcgcgtgctcgtttccgtgcgcaaggcgatctccctgccgcacggttttcaacagaaattccccgcgctcgtgcaaaacgccgcgtgctgcaccgcaaaaaacgacggaatttacatctccgaagacatttttaccgtcccgccggaggatctccccacccgccgcgcagcagcgctttccgccgtcaccgcgcaggttaaaaaagccgccgtgctgcccctcaacgcccgtttgccgcatgccgaaggctggcagaaaaagagcagcgaagcgggcattttccttcccatcggccaaagcgatgtcactcgtcagcccgtcacgcttgcgtttacggaagaaaagccgtatgcgctcgtcatcggcgatgtaaactccggcaaaagcgcacttctgcataccgtcgccttgcagattttcgcaaactacacgccggacgaagtaaagctcgccattgccgatttcaaagagggcgcggagttcgcgctttacggcgcatcgcgcctgcccgcagtcgaagccgtcgttgaaaacgatgaccccgattgcgccgcatcctttcttcggtactacgtttcggagctgcaccgccgccaaacctgctttacggcgctttccgccgagaccggccgcctcatccgcaagtacgagacctaccgcgccgtgcagcgcgaaacgggtgcggtgtccgaaattctgccgcgcattttgcttatgatcgacgaataccagtcgctttttgagggcaacacagagaccgccgcgcttttaagcgagcttgtccgcaaagggcgcacctacggcgtacacctcatcatggcgagccagcgcggcgtaagcgaaagcgcgcgcaacacgttcacggccgagctgaaggatcacttttccacacgcctcgttttccgctgcccgcctgccgccgcccgccgccttttcagcgaccgcgcggtcgataccggacgcgaaaacaccggcattgcggctgccgtgctgctgaaaaccggccacgcgcttttaaacgacgaagcgggccaaaccgagcgcgccaccgtctccgtgcactgcttttacgccggggatgacctcatcgggcgcatgtgcagcctgctgccacgcgtaaacggcacgggcgaaaccgcgtggctgcggtataacgccgcctcccgtgctgtaccgagcgcactcccgcacggcgaagtcaccttcggcgactccgtatgcctgcataaggaccgcgccgcttccgatgcggatagcttaaaagacgacagttttgtctcgtttacaccgaacggcacgcacattctgtgcacgggcagcgacctgcgcgtgccggcctctgtgctgtgcagcgccgcgcggtttgcggaacaggaagggctttcgctgcatattttctgcgcagaaagtcacccgctactgcggctttgcccggaaaccgccacggtttataccacacttgccgcacagagagaagcgctttcccgtcagcttcgggaaggtcaaaaccgcgccgtcaacgtgtttttggagatgagcgcggaaaaagaattcacccagccgctcggcacactgcgcccctccgcggacgcggcgcttctcaaaaacgccgtcgcacacagccgcctttccgtcgtgtttgagcgccggtgcaaaatcgtgcgcagcgagctgccccagcttttggcgcttgcgcccatccacattacagccgtcggcgacagcgaaaatctgcgtgccgccctgcccgataccgcccgcattacagcaacagcctttgacgtcctgcaaaaggacagcatccacgcgtattactgtaatcgggatacggaaaaatgggggaagatcgtgctgtttcagccctttttcccttgtcaaggacatcttttcaaatctccttgaggtgtcgcaaaaagcagacacctgccctttaaaacctcgttttccgaaaaaatcttcgaatgttcgattgacaaattgcgaacgtttgtttataatacgagacagcaaagaaacaaacgttcgtaaagcgctgatatgccgcacagaaccgtctgtaccatgcatcaacgcacaagcgaaactcggatgggggtatttttatgattctgtttctctttagtattgccgtttcctgcctgttgatcgcgcttgcacagggtgcggttttcttgatctctcttgtaacgaaatctgcgcaccgcgcgaaaagcacctccgtgcgccgcagcgtgcagaattttacggggctgccgaaccgcgaagaagtgaagaacatatattccctttcagaccagtttgcagaccgcctgcgagaggtcgtgcagtcttgaccgatacagaatttaacgccgtgaaggcgtttttatccgcctaccgctacacggagctcgatctccgtgtacgcagggcggagctcacccggttgacagcgcgcaaagaagcgctgattttggaaggaaataccgatcttctttttcacttagagcacgcgatatgcgcagcaaaagacgccatacgcgtgctttgcacaaggcaggcagaaattgaagccgccatagacacggtggaaagtgccgctttgcgtgagattttgacacagcactacatctgtgcgctcgacctcaaggagattgcagagcgcatgcactactcggaccgccacatgcggcggctgcaccgaaaagcgattgaaagcgtttcgctttccgccgtttcgccttttaaaaagcggggatcctccccgcgcgcacttccccttgtcaaaagaatttgagactgccgcggcaaagtcgtggggtctcttttcttttcctgaatttcggcatctgctccgcacggcagacgccgcccgttttgccgtgccgcaccgcggtgaaaacggagactttgaaaaggagtttatttggaatttatgaaaccgactatgttaaaaaccgcttttaccgtggtgttggcagggctttcctcgtactttggtatgctgacgcagccgcttttggtgttgctttttgccatggtactcgattacctcaccggcatgacaaaagcctatattttctcacagctcagctcgcgcatcggcgtgaagggtattctcaaaaagctttgctatatggccatggtcgccgtaggcgcggcggtggattacctgctgcacggcgcactgaagcaggcaggcatcgacctgcacatcgagcttttctgcggcctgctcgtcaccgtttggctcatcatcaacgagctcatctcggtgctggaaaacttagccgccatcggtgtgccgggctttcctcgcctcaatcgattactttctcgcctgaaaagcaccgtgaacgaaaaggaagacgaacatgacacatgaaatgagattgaaaaactgcaatgcctataatgccgaggcccctttgagccttggcacaaagggcagcaaggtcgaaatccggggcgtaaaagcgtaaggaggagctatggtaccgatcagagaaaatcttgtgccaaaggacaaatatgccattaaatgcccgtatacccgcacaccgacgcgcgtcgtcatccacaacacggcaaacgatgcgcccgccgcaaatgagatctcctacatgcggtataacgaccttgagatctcgtttcactacgcggtggacgatgtaaacattgtgcagggcatcccggaaaaccgcaacgcgtgggcaagcggcgacgggcacggcaagggcaacatggagggcatccatattgaaatttgttattccaaatcgggcggtgaaaagttcgataaggccgagcagaacgcagccgagttcaccgcgagtttgctcaaaaagtacggctggggcatcgataaggtgacaaagcaccgggactatgacggcaagtactgcccgcacaggacgctcgaccgcggctggcagcgctttttgagcatggtgaaacgctatatggagccggcaaaaacgcccgtcgcgagcaagtttatcccatatctcatccgcaaaaattgccgcgatgcgctcaacatccgcaagggtccgagcacgaactacggcattttagggcagatcaaagatacgctgcgctacacaatcgttgaagagcgcagcggccccggctcccataaaggctggggccgtctcaaagccggaggctggatcgcgatggactgggtgaagaaggcttgaacttattacagttacagcgcacaaattatacatttcaaatgtgacgttatgcgctgcaatggcagatttactcgaacgaaagtgggcactcttttcccctctgccgcttatactgaggttaggtaaaaggagggactttatggacagagacgtcaagcagaacatagcggagaacgcgccgattgaaaatccgccggagggcggcgcggggcgcgatcctttgcaggatctctcacccgaggcgtgcacgtttgaggtgtttcaacagctaaattccaaaacgggcacgctgcgcgtgcaggcgtatgcgggacagcggacattccccgtccccggcgcttcggtacttgtgacgcacgactttgcggacggcacgcggcggttttcttccggggtgacggacgagagcggtgttttcggcgacattttgctgcccgcgccgaataacgcgttggcgcagtcgccgacgggcgagatgccgtatgcgctttacgacatacgcgtgagccacccgggatgccgcacggaaatttaccgcgcggtgcctgttttccccggtgtgacatcgatacagccggtgcagtttttggcggtcggtaaggggtgatgctatgccgaacaatatagacacgcccgttgtgccggaatacatcacggtgcaccttggactgccggaccaaccggccgagaatgtgcgcgtaccgtttgtggcgtacattaaaaacgttgcttcgagcgagatctacccgaactggccggaaagcgcgatacatgcgaatattctggcgcagatttcttacgcaatgaaccgcatttacacggagtattaccgcagccgcgggtatgactttgacatcacctcgacaacgcagtacgatcagaagtttattttgaaccgcgatatttttgaaaacatctcgcagatcgtcgataatattttcaacgattacgtcgtaaaacaaggcacggtgcagccgtattttacgcagtactgcaacggcacgacctcgacatgcccggggctttcgcagtggggcacggtgggattagcgcggcaggggcttgtgccgtatgagattttacagcatttctacggcgatgacatcaacattgtgttcaacgcacctgttgggaacaacgaggaatcataccccggtgtggcgttaagactcgggagcatcgtcgaaagtgtgcgcgtgctgcaaagggagctgaaccgcatcggcgacaattacccggcgattccgcgcattccgcagatcagcgtttattacgacctgccgaccgaaaatgcggtgcgagcgttccagaaaattttcaatctaacgcccgacggcgtggttggtaaggcgacatggtacaaaatcaagctcatatacagcggcatcaagcaattaaacgagctgatgagcgagggcatcacgcccgaggatgccgagcgattctacccgccggagctgaaagagggcgacagcgggccggcggtggaacagatgcagaacttactgacgatcattgcgtattttgacaattccattcccctgcccgcgatgaacggcgtatttgacgcacggacgaaaaattcgctcatggccttccaaacgcagtacggactggagccgacgggcgtactcaaccggcaaagcgcgaatatgctgctctccgtttaccgcgacacgcgggcgatggcgacggaaaacgggaaatccgtaagtcgtcttatctaccccgggcgggcaattctcaggggacgcacaggcgcggatgtggaagatttgcaatcgctcatcaaccgcgcagcggcacaaaacgcatttatcccgcaggtcgcggaagacgggatcttcggcgaggcaacggagaatgccgtgaaggccgtgcaggcgcacgaggggttagacgtgaacggcatcgtagggccgctgacatggcaggctttgctgcggcttagcgggctttctccgtagtgacaaaatgaaaaagcacgcaggaatttaggcctgcgtgcttttattttgccctaactattactctttgccgataaagatgtattcgcggatgaggatgaggatgccgcagagggtgagggcggcactgacgatgaacagtgctaagatccaggaatcgaacagcgcggtgccgtagcggccgaggtttgtccgccattccgtgagtgtctgcgcgtaaagacccgcgccgacgagcgttgcactgaacgaggtgatgccgaaaatgagcaggaaccaaccgaaatgcatgcgcatgctttggcgcttcatttgcttttctgcggcgcgctgttccgtttctctgttgttttcggcgggggctgcgctttgcggggcttcgccaatatccaataataaataatcggtcgtgacatggaaaatgcggcttagctgaataaccttttcggtatccggcacggcttcacccatttcccagcgggagaccgcctgacgcgagatgttgagttcgtttgcgagcttttcctgcgacatgccggcgcgtttgcggcaagcggcgattttggctcctatggtcatacggaagacctccttttgctgggctcattttatacgaaaaccgtgggaaaagctaccatgtcaacttggaatttccgcaattttgagttgcggcgggctcctttttatcggtctgcatcaaaaacgatccggaccgttttgttgaagtctgtatgtttttatccgttgtccgtgatcacaaatgatgaagatcaccgatcttcatcatttggaaagtgatcccaaaagttttcaaattctgtgtttgtgatggtgccgctgctgactaaaatttcgtactgctcgccctgccagatgtaacgtacctcggacggggtgtagccgttgcgcaggtagaatgcgcggcgcaggtggcgctggggctcgttttcggcggtagggatgtcgagctccaagtcggcgatgaagcggtttttcgggtacagcgtgtgcatgagctttagcgcttcgctgccgtagccgtgctcgcgatactgctcatcaatggcgaaatacagaatgtgcgtgatgccgccgtaggtgagcaggcttgcaaagccacagaagttttcgtctttgtcgtagaagccgacgaaatcatggccgtcgtgccgcatgagaccgcagatgggcgtacgctcgtttgcggggaacgcgcggacgtagaggctttcggtgcggtgaaaatctttagagtgctccgtgatcttttccatgtggagtgcggacatatcaaggttcctttcggtgtttttcggcagcaagctccatgagctcgcgctcggtttcgatatcggcgaggacgacgggtatgcaatcaaggacagtcagaatgcgggacttgatgaacatggcagcgcctcccctttttctttgattgtagcgggaaaagcacaaaaatgtcaagcaaaaagcgcgtattcttttgctaacgcctgaaatgcttgtcatcaaaagacatacgacaataaagaaatcgtgtgcgaaatgattgcaaagcaaagggatatgaagattccgacagaattgataccgaaatgtcctgtttgtggaaagcctatgacgatgaatttacgctgtgataacagcttcgttcaagatgaaggatggtatgaagcgcatagccgttacgagcgttttatccgtaacaacgcaaacagccgtattttatttttggaactcggcgtcggtgcaaatactcccgttattatcaaatatccgttttggcagatgacgaaagtaaatagtaaggcaacttatgcttgtatcaattacggcgaagcgttctgcccggcagaaatttcagaacagtcgatatgtatcaatgaggatattggaaaagtaatcgccgaactaaagtagtgaaaagtctgcaaatctatttttttaaacaaaacgggagttgatatcgtgttaggtatcagctcccgtttttctttattcaactgtttttgaccaagtggcaagccctgtatttgtgttttctacagtcgaattttaattagatgttcagaacattcttattataatttaggcaaactcaaacagattcaagcctacctcatcattaaattttctcttaactttgccgtcaatcagtgtgattaccatctcgcaagttgcactgacgatggctgtatttagatgcccgccgaacaccttgccttctgcgtctcctgcactcatatgaagatgcgcatagtattcgctatctttggtggtgattgttccagtcagcgaaacgatttcataattgcccttgaattcattcgcataatacttcttttcttctaccttgaaaacaccaactgtaaaatttccgacagcaccgagtgcattcacagtcgctaagccgatattttcttttaaagcaatcaatttcaactgctcctgaatttcttctcctttatcaattcgcgcaataatctgattgtcaaatcttctgtattccatatgtgtttcctcctgcactttttcatgtatgaagctttacttaagtatattatactcatcatcatttacgctttcaagccattcgtttgaataattttcgcctgggacttcaatcgcaagatgtgaaaaccaactgtcggctgttgctccgtgccaatgcttatgtatgcggcatgatatttccattttgggggaaatgaatatagccgtcttcaaccgataggataatggaggcacacttcacaagaaagtgtgcctccaaattcgtttacaggattttcttaaccccggggatcttcttcagaatccacgttaggatgaacgagacaaggaagatgccgagggtcaggccgatcaaaacaaacggactgcctgcgccgtaggggtggagcttcgtgtgctttaaaataccgcgcacaaagatcatgtggatgagataaatgccgaacgaacatttatcaatctccaaaacgaacttgccgaaaacgccgggagatttttcttttcgcggcgcgccggttttgtctgccgcgcagccaaacagcgtgaacacgccgatagactggagaatgacaaaaatggaagaatagccgtagaacacgcctgcggcctttacggtgccgttttctttcagcacggtgaacaggacgaccgccgctgtgccgatgaggagaaacagcaggccaagcccgcgattcacgcgccacacgccctgccgcaatgcgtagccgcagaagaggtagaacgggtaaatggcggaaacgcagatataaaacccgacggagatgccgaacgtttttaaaacgggcacaagcgacaggaagatgacgtagacaatcatgaggtagcgcagctcccctgccgtgctgttcgacgcgattttgtggtagaacggcaaaagaagatagatgccgatcatgaggtagagataccagacgtgcgaccacgaggtgccggagtaaatctcataaaagcccgaaagcagcgtttcggcattgacgggctcgtgattgacgaggatctccaatgcgcggaacagaagacagaacacgacgagcgcgatgagcatgcgcggaatgtactttgtgaggcattttttcaccgtgacgggacgctccgggtttaaaagcagcgcacccgaaaccattaaaaagcacggcaccgcccacatcatgttgttgacgacgatgttggagaggagggcttgcgtggcagatgcttcctccgggaaaagggatacggcacagaacaccgtgtgcagaagcacgatggcaaggcacgccgcagcgcgcagataagagaacgaatggacgcgaaaggtgtttgcggaagtccctgcttccgctctcatgtggcggctcatcagttgaacagcgcgcccgttttcattttattgtacatggggtaaatttcctttccgatttaggatctgatgcaatttatccgtgcaaatttattgcaaaagttatcttctgcggctccaggtgtcggggctgaggaggagcaggagtgggaaaatctcgagtctgccgaggagcatatcgagcgagaggataatcttcgaaagatcgctgtaaatgctgaaattttgtgtggcgccgacaagctcaaagccggggccgatgttgttgaagcaggacgcgacggcggagaaattggtaccgatggaaaagccgtccaccgagatgatggcgaagctgagcacgaggatgacgcagtaaatggcgagataggcgttgacgttgtcgcagacctcctcgctgacggcgcggccgtccatataaacgggctgcacgcggcgcgggtggagcgtcttgcggatggtgcggcgaatgctcttcatcaggagcaaaacacgggagaccttgagaccgccgcccgtgctgcctgcgctggcgccgatgaacataagcgaaagcaggattgctttggaaaacgccggccactgctcgaaatcgaccgtgccgtagcccgttgtggtcatgatgctgacgacctgaaacgccgcgtggtgcacggactcgtagaccgtattgtacatgcggctgatattgatggcgatgagaatgatggagcctgcggcgatgccgaaatacaggcgaagctcctcgtttttgaacaccgctttgaacttgcggagcaagagcatgtaataaaggctgaagttcacgccgaagagaaacatgaacacggtgacgacggtttgcaggaagtagctgtacccgcccatgctgctgtttttaatggcaaagccgccggtgccggccgtgccgaacgcgatgcagaagctgtcgaacacgggcataccgccgagcaaaagacacacaatgcacagcgcggtaagcaaaatgtagattccgtataaaatcatagcggtttggcgcaggtgcggcgttaatttatcgacgctcggtccggggctttccgcacgcatgaggtagatgccggtgccgccgtttttgcgcgcgccgggcacgactgccaagaggaacacgagcacgcccataccgccgagccaatggctgaagctgcgccagaaaaggttgcagcgcgagagcgcttcgacatccgtcaggatagacgcgccggtcgttgtaaagccggagaccatctcaaaaaacgcatcgacgtagctcggaatctggccgcttaaaaagaacggcagtgcgccgaacgcggacatgaaaatccacgaaagacccgttgcggcaaagccctcctgtgcggagaacatgcggttgccgccgcggctgaacagcacaagcgcgccgccgacgagcagaatgagacacagcgactcgatgtaggccagaatattcttcggctcgtgatcgatgacggcgatgagcagcgggaaaagctgaaaaatgcccgtgatgagcaaaatcaagccgacggtgcggctgatacttttaacattcattgtgcagccgctcccttacacaaaaatgtcgttgaactgcaaaaccggctgctcgcgcgtggtaacgacgatgacggtatcgccgagctgatagtacgattcgccgtccggaatgaccgtgttgccgtggtgtgtgatgcaggagatcagaatatttttctttaagcgcaggcgcaggtttttcagcggctcgccgatatacttcgactgcttattgacgatgaactccagcgcttcggcacggccgtctgcaatgcggtgcagcgtgacggcggcacccgtttggtgctgcatggcgcgcacatactgcacgatattcgcgctgcacagctccttcgggctgacgacgctgccgatggggagcgtttccaccatgccggtcgtcatgatgcgattgacctttgtgacaatgtgcggcacgccctttgcgttgccgaccatggaggtgatgatgttctgctcatcgatgccggtgagcgtgacaagagcgtccgtttcgttgaggccctccgcctccagaatttcctggttggcaccgtctgcgcagatgatcgccgcctccggcagcatctgtgcgagctgttcactgcgctgggggttgttttcgatgatcttgacatggacgtccgcgccgatgagcatttgcgcaaggtaatagctgacgcggccgccgccgatgagcatggcgtggcggatctttttctgcgtgatgccgaggcgcttcatgaggtaggaaagcaccgtaaccggcgcggtgacgtagatgtggtcgccgcggcgcagcatggtatcaccggacggaatgagtgcgtggccgtcacggatgacggcgcagacgagcaccttgcagcccagcacgtgcggcaggtgatttaaaatgacgttttcgagcgggctgcgctccaaaacgcgcagctcgacaatctctacacggccttttgcgaatgtttcgcgctttaagaagcccggtaattgcagaagacggaaaatctcctttgccgcctcgcgctccgggttgatgatgagcgaaaggccgaactcgccgcgcatcatgtagagctgttctctgtattcagggctgcgcacacgcgcgatggtgtgcagcgtggggttcatttttcttgctgtaagacagcacagcaggttgatttcatcggcgcttgtggcggcgatgagcacttctgcctgctgtaccttcgcttcgttcagcgtggccatggtggcgcagttgcccaccacggtcatgacgtcgaactgctgcatatcccgttccaaaaccgcccgattggaatcgatggtcacaaggtcgtgaccctcctgtgagagcagacgcgtaagcgcaagacccacttttccgtcaccggcaataatgatcctcatttctttttcctttctcgaaccgctttcggtatatcccgaaccgaaaacttcctaaacacgtaatactccgcccgggacgacacgtttcccctttgtatcgccatgggcatacatgggtagtatacacccaaagcggtatattgtacagtggcattttgtccgtttttgcggggcggctttcggcgagtttgtagaaagtctgtgggaagatgaaatccacgtaaaaacgcagccggtgtgttaaatacacggctgcgctttttactatcggtaatattttttgtccgggcgcgtgagagggtgctcgtaacggtaaaaaagatgcggggcttcgccgcactgcacgacgcgagatgtaccgtcgcgcgtaaagccggcggcttcaaagaattcgcaggcgcggcggtttccggcgggcagccagaccttgcagatcttaaagccgctgatgtagaggatggcgagggcgtcctctacaaaagcgcgaccaataccgctatgctgcgctttcggaaggacacacagcgagaaaatttccgcgcagtagggggtgtcggcatcacggcaggcgtaacggcagcaaaagccgacaacttcgccgttttgctctgcggccatgatgtattcgaatccgatctttttatcttcgagcagtttattcgggtcaaaaagcgccggaatatcttcggtcagcgttgtgcgcgcgatgtgtttgaaggcgggcaggtcttcccaatcggcgggacggagcgtaaagctttgcataaaatcacctcggcttgactacgaacgaggccgacggattttacggcttctcccccataaatctttgcggcagcgcaccgaaatttacggtttgcacggcggcgatgatctcctctttccgtgataaaaggcttgcgtcatctatgcgcacgtcgtttaaatcgtacgggccgttgcggaagtggccgacgaccgcgccgtggaacacgccgtcgatgagaagatattgcagtgagtcacagtcatacggcaaaccctctgtgagggattttgcaagcgattttaacgccggctcgaacgctttatagagcgggtcattgcggtggagcgcatagacgctgtgaaattcgggcgcggtgtaggttttgagcgtttctgcgtcttcttttaggagatatccaccgtcggactcaaccaaaacgtcttcggacacgagcccggctatcgcgagcttgatctctttttcgggcaatttgtaaaacgatttcgccatggcgggcgtgaaccacacaaagcggtgcgcaaaacggcggaggacgattttgagggcttctgttttggtatagcggtcgaggctaaaatcggaaaaaaattcgccgaagcgataccagccgcgatcccactcgccgtcgtactggtcttcgtagatgagaaatgcctcctgcaagcggtgcagggcgggcgtgatctccttgacgagcaggccgctttcctctttcagctgcccgatggtgtacgggccggacatttcgatgcgctctaacagcatttgctgcgtcatcgtcgcgtttttgagcggcttgcggtacagcgctgcgaaaagctcgaggtcttcgggcaagatccaaccgaggttgccgcccgcaaagcgccctttgatgagttcacggcggaactggcggcttttattatagacgaggtcgtcgaaatccgcgcggaacgaaagcgtgggcggttgcccaaagccgttccagtagacgttctgcccgggctgaagatcgcggtacaacgcgtcgtattcggtttcattcgccggggtgaggagatgctggcgctccatgcgcagggcgcgtattttttcatcgtacattacggttttcctttcgtttccgcgcgccatattcggcactgttccacgcgtgcgccgtgcggcgtatcgccctgctcgggatcgcatgtatagctccataacaactcacagggcagttccggacattctccgcagtggtaaaaacctttttcctgacagcactgcgccacagggcaggctccgtggaacgggtgtccgtttgtctctatacagccgccgcacccgcagggctctttatacgtacaggtcgtgcaatgcagtccgcatcttgaatcgatcatgtgtgttcctcctaaactatgatattcagatcgtaacacacagaatatgacagcggggtgtcatgttttatagcgctttttcatttttttgatcgcagaacgcattttctttaccatttcgggcggggctgtcacctgcacgtcgacgccgaagctcaaaagccaacgcagggcgtcctccggggtagaaaatccccattcggtgtagagcttgccgtcttcccgcgtgatgaacgacgcggggccgtattcttccacaaggcggtattttacggcgggctcgtaaacggccgtgacaatgtaatcatccgtcatgctttcggtgcggctgcggttcggctctttttcaggcgggacttcacgcggggtgaaaaattcatcggtcacgtttaaattccacaggcggcggagcttatagaggcggaaatcctcgcgtgcggggcaaaagccgaaaacgtaccagtccccccagcggaacacgacgcgatagggctcgacaagcttatccgcctcccctttggcgtaataatagtgaaacacgatgcggcgcgtctcttttacggcgcggcggatcgtctcgatcttctccgccaagtcgtttttgtagaacgacgcgagatcgatctccatgtcccgcggtatatcggtatctgcgccgagctttgcggcgagcaggtcggatgcaggggctttggaaacgctgtcgagcgagcgcagccctgtgaggacggcggaaagctcctgccgcgtgagcacggcggcatcgagcgaaaagccttccatgatggaaataccgccgcccgcgccctgtttggtaaggagcgggatgccggctttgcagatgtcttcgatatcacggttgatggtgcggcgcgacacgccgaatttttccgcgagatacggcgcggtaacagtgcctttttgctgaatggtcgtaatgatgccgatgaggcggtcggttttcaaattaaagcccccttttctccacagtatagcacacctatgtggaaaacaaaacgaaaaacttgcaatgcaaacgaaaatgtggtatagtaccttagaaatcaacaggaacacgccgtctgccaccgggtaggcggaagaacgtgcccacagaaaaccgataggtctgcgcttttaaagtgctcagcaggttttctgcgggcacgttttgttttggagggactatgcgcaaatatcttcgttttgtttcccagagcgttttgggcatgctggggctttccgtctacattttggcggacacatttttcattgcaaattacatcggtgcggacgggttggcgtctttaaacctcgcgctgccgatctacggtatcatcaacggcacggggctgctcatcggcattggcggcggtgtgcggtacacgctgcggcacacgcgcggcgacgaaaacgcagacagcgtatttacggcaagcttactgatgggcgctgttttgtcgttcatttatgtgctgtgcggcgtgttcggggcggagcatctggcaagattgcttggcgcttccggcacggttttacagccgacaaccgtctatttgaaggtttgctgcctgttttcgccgttttttattttgaataacatcttaacggcgttcacgcgcaacgacgatgcgcccgggcgcgcgatggcggcgatgctgacgggctcttttgcgaatattgtgatggattggtacatggtgtgcgtcttgaacgccggtatgctgggtgcggtgcttgcgaccggcatgtcgccgattttcggcgtagcgatctgcctgacgcgaaagcgcgggtatcacatcggaaaacaccgcatttttgaggaaattccgaaaatttctgcggcgggtttttccgcgttcatcggagagttttcttcgacggtcgttattttgatatttaactatctgctattatcacttgcgggcagcacgggtgttgcggcttacggcatcattgcaaacgtggcacttgtggcaacggcggtgttgaccggcgcggcgcaaggcgtgcagccgctgatcagcattgcgtttgcggagcatgaccgcagaacgcttacaaagcagacgcggcgcggcgttgtgacggcggttttactgggcgcgctgtttaccgtgggcgctttgctcttcccgcagcaggtgacggcggtattcagcaagggcagcgcggagctgacggcgcttgccgtgccgggcctgatgctgtacttcttaaactatcttgtgagcggcgtgaatctgctgcttatcgcgcggtttgcggcggcggagcgcagccgggacgcggctgttttatctcttttgcgcggcgtgatcttagttgtgccgtgtgcggtggtgcttgcaaatatattcgggctgacgggcttgtggcttgccgtgccgacggcggaggcgctttctctgctttgcgggctttatcttttataccgcgaaaagaaaagcgaaaaaacagctttgcaggcggtgtgaaacgcggtataatcttttaaaagacgacgatttgggacaaaaggagaccgacatgcacattccgaaaagcgacacgcagcacaccaaaattctgacatttgaagaagcgcagaagcaccgcgaagaaagcgccgtttacgaccgcgaaaaatggctttatatcccggatttttactccgaataccgttacatactgggtaccgccggcaaaaagccgctcattaccatcggcatcaacccctcgacggcggagccggataacctcgacaacacactgaaatccgtagagcgcattgcgctttttaacgggtttgactcgtttatcatgttcaacgtctacgcgcagcgtgcgacgaaccccgaccacatggataaggcgtttaaccgtgcgctgcacgaggaaaacatgaacgcgttccgctgggtgctttcgcgcagcggcggagagcccggcatttgggcggcatggggcacgattgtggaaaagcgcgattatctcaaaacctgccttgcggacatgacggccatcggcgacgcattccgtgcaaagtggtatcaggcaggcaagccctctaaaaagggacacccgcaccacccgctgtatctgcgaaaggactcgaaattggaggactttgacatggcggcatatttgaaggcgctttaaaaaacttgaaaatttaattttgactataaaaaacgctcctcacggttcgtagatcaggtggaagccgaaaacggcaagcctaaacgaactttgaaggagctttttttatgaaaacttttatcccgcacgtgtatttttccgcacccgaagacaccgtaggcgaccttgtgaaccagatccgccgcgagagcgagatccccggcacggcagaaccgaagccggaaatgaaggacagcggcaagaaatctattatcccgaagacggtggtctctgcgcccgaaaaggacaccgtgggcgacctcatcgagcaactgcacaaggaacctgaggcgatcccggaagagaagcccgaggaaaaaacagaacagccggaaaagaccgagggcaaaaaatccatcattccgaagacggtcgtttccgctgcgaaaagcgagcttgaccgcgtttatgacctgctgacaagcggcgaagacctgcagatgaacccggacggcacgctgagccccgcctctgccccgaaaaagcgcgcaaagcccgcgccgggcagcgaaccgaaagcgccggtgaagacgaaaaaggagatcattccgcacacggtggtctccgcgcccgaaaaggacaccgtgggcgaccttatcgagcagctgcacaaggagcctgagccgcttccggaagaacagcccgagaaaaaggcagaaacgccggagaagaccgacggcaaaaaatccattattccgaagacgatcgtttccgcgcccgtgcagcagtggtacaagacgaacaaggcgctttatgacgcggaggtcgccgccatgcgcaaggaattcaacgacccgaacatgcagccgcattttatgtcggacggccgcatgtactggcttgtgaagacccgcccgaacctcggccgcggctttaacaccatgacatacacaatgaagcttgtctacgaccccgaccacccgaaggtgcgctattcttcctccgtgaagccgtatcttgtttcgccgacgctcggcgaattgcagaaaatcgtcaacatgctgccgcacattccgctggatgcggacggcaaaaaactcatcccgcacacgctgacagacaaccgcggcgagcgctatatttgctccagcgacgtggcggacgtacatgcggaggacacctgcaccacgagcgccgtgacctccttccgctttgcctaccgctggctgatggtgtttgagcttgccatccgcaagccggaagcatggaaggattttcaggcgcatgggaagatttaacggaggctttttttatgaaactcttttcgaccccgccggtgctttccggcaagaaaaacaagaagcgcaaaaagcttttgaaggcgcagcgcaaggcgttaaagcgcgccgaccacccgtttgaatccgacaaagctgccgactgccgcggcgtagtgctttcaaaccgcgcgtatctctctgttctgagtgaggtgtattcccgcgacccgttggagacaggcggcattttcttcggcaacgtgaaaaacggcgtgtggtatgtggcggaagcgagtgaccccggcgtttacacactgcactcgcgcgcccaccacgagatggacaacaactaccacaaccacatttacccggtgctttcgcgcttatatcggcacgggctgtgccttttggggctttggcaccgccaccccggctcgctcgacacgttttcaagcgacgacgaccgcacaaatcacagctttgccgaggtcatcggaaacggtgcggtttcgatgctcgtcaatctcgaccccactgcgcgcctgacgtgctattacctcagtaaaaacggcgaatatcgcaccgtgccggtcatggtcggtgacaaatactttgcgggtaccggctttttggagctgacaacatctgaggcgcttttaaagaacaaagaccgcctgcaagctgaaatttttgaccccgaggaggcttaactgtggaaaaaatcatcatcacacgccgtgcgcttatcagacaaattccggctgatctatccgaacacgacagaaccgtgtcgcttttaaacgcactttccgagcgtctgccggaaaacacggaaaaagaggacgttgacttacagtccggtgactttgacgaggcgtttcgtttgctaaacgcgtttgacccgcgcacgtacggcaccgtgcagctcggcgagagtctgcgcgaggagcagacggatacggcaaaggagcacgtgggcgtgctgggactttccgacacggctttgcccggcaatgattatgtgggtgaagtgaccggcgcgggcagcgcagacaccggctactactaccttttggctaccgatgagacctatgccgatacgttcaaaaatcccgaccacaccacccgcggtttgatcgtatcgggtactgcatacacggcacttttgagtgaaaacgtggtgctgacgggctacgattactttggcacctataaggacggcggctggcttttcaaccgttgcgacgaagcgaaaagcacgctgacggtggacagctttacgctcatccacgaccttttcagtcgcaacacgggtctgtttgaatctgccgagatgctgaaaaagttcgccgtcatcatcggctgcggctctgtaggcgcacgcgccgctttggaactggcccgcgccggtgtaggcagatttcttctcatcgacgacgacattttaaagccgcacaacatctgccgctacacgcacggtatgcgcgacctcggccgctttaaggctgaccttctgcgcgaggatattctgaacattgaccccgcagccgaagtgacggctttccgcggcaagctggaaaacgcgccgctttctctctttgaaaatctcggcaagaacggcattgtctttgcgacggcagatgacagaagcgcgaatgcgcttgcaaatgcgctctccaacacactcggcgtgccgtttattgccgtaggctgctgggcacgcgcccacgcgggcgaggtgttctaccacatcccaaaccgcggcatgaagacctacggcgagaccttctccgtgcttttaaaggacgccccggcgcgcgactcgcacggcgattattttggcgaagcagatgcccgcgaacgcctccattttgagcccggcacctctacggacatcggctttgtgacactggtcggcgtgaaattcgcgcttgaccttttgaaccttgaaagcgaagcctataccccgcgcgttttgaacgactacacgccgtacacgctcatctgcaacacaaaccgcccggaaatcggcggtgaaaacgcgaagatcttcccgtacccgctgtacatcagccgctccattcgcccggcgggtgaagcatgacggacacggacgcgctcacggcttacctgcggcagcttgagcgcataaaggacgactgggacgaccgcaaatacgcggaaatcgaaaaagactgccttttgccgctttggcagctctgccgccgtatgcaggagaccgagcaggacatttacgcgttcatcttcggcacagagcacgaacttgcacacatagacaccgacatttattcttgaaagaaggcatcgttatggcaaacggaagcgttgtggtacacgacattgattcccttgaaaaattcggcatggagcttgcggcgcgcagcgcggagctggaatcgctttataatgcgcttacggtgagctgcgcggcacaggaaacaaactggcacgacccacagtacgacctcttgcacgaacgcgtagagctgtacgccggtgaagcccgcgcacagctgcttgcgctgaacgacgctgtgcagtatatttccgtgctggccgcaaagctgcgcgctttgtgatatgagcgacgtaaacgcattgctctacgcggtggacagcgccatgaatacgcttgcggcctttgaccgcgaccgcgccgatgtgaccgcccgcgtttcgttcgcgctgggctccgtgttggcacgcgtggcgctggaaaccgagcagtgccgccgtgcgcttgcagacgcagaagctacttcctatacggacgaagaaaccggcaatacggcagaaaacccggaggccgcccgcctgcgcgccaaactggacgccttggaggctctgaacgagcgctgcattttagccggcggcgcgctttccgccgcatgggcacaggaaagccgtcaatccgaaacgcacgtaagcgatgctctgcacctctgcggcgtttatctgaaaaagctgaaccgcattgcactttcacccgaccccggcagcataacggtttcaaaccacggtgacgcgcccgttttcgtctgcattgtggacagcgcactgtaccccgaaactgccgagcacatccgcgtggcgcaggacatcggctttccggatatactgacgctggaccgcggcggcgcggcagagcgcagaaaggcctcccttgcgccgatcaaggcgagccgcatctgggaccgcgacgaatacccctgcgcgtgctttaaagagggcggcgcaggggcgcacgtgatgtacgttgcgggcacggataaccgcggcgcaggctcttacatgggctggcagatgcgcggcctgcccgacggcgcaaaagtgcgcgtgcgcgtgatataaggagaaaactatgaccccgaacactaagattttcacagaccttttaagagaaagccgcgcatttattaccgtttcggcggcggaatacggcgcgggccataacgccgcagaagcgtttcgcattctgccggattccatgctcggcatccttgtttgccactgcgaaacggtctcctgtgcgggtggcttgctgcacctttacggcggcgggcagcttcttgcccgcaacacaaaagtcaacaagccgttttctgcgttgcttttcctcggcgaccttgcagacggcggccttttcgccgtctcccgcatcgatactgcgattgcaaagcgcggcgagatgctgtttctctccccgggcgcgctgaactttgagcctatggggattgacacggcggagttcattcgctgggcgctcgaaagccgcgaagagacgctgaaagacgtttggctgacaggagaaattttatcgccccgcgcgctcaaaaagcacatcaccgcaaagcttgaccttttagatcgccttgacatgctgaaaacggagggagacgcatgaaattctttccaaaatccgcagacggctttctttctgccatgatgatggcggaaaacgcgcttctgcgtgatttttcactgagctgccctgcttcgctttttggtgcagagcccatggaaagcgccaaaaaagccgtgaaaagctgcatgacgctttcatcgtttccgtgtgcgcaaatgctgaaaacaaacacgcgctacgtgcacgactttgcaaagcgaacgctgaccgtgactgtcaacgcgcggtacatgagcaccggcaaagaggtgaacgacctgcggtgcattgcggcggatattgcggaaagcataaagcgcggtctgccggaaaac

SEQ ID NO: 858 - DNA, 11150 bp, Unknown
  16S sequences of unknown bacteria
cctgtcgggtgtgcgttctttttggtgatccatcggagattcgaactccggacaccctgattaaaagtcaggtgctctgccagctgagctaatggatcttgtcctcgcaaacactgcttaagtattatacccatcagccctagaaaagtcaagcaaatcacaggaaaatttctcttttttgcgctttgcccaaagggccagtccgcaccctgccgcattttgtcggattctccgccggatggtcaacagggcgcgttgcaaaacacaagattttgcaacgcgcccctgaaaaaccacttgcggcccatgaattgtggctcgcatttcgcgtctacagacacgaaaccatgctttttcccaggccctgcgtatatggccgaactcaacgcccgtatatctcccggagccggcgcactgcttcccgggtgttctcctggctgccgaacgcagtcagccggaagaagccttccccgttgcggccgaaccccgcgccgggcgttcccaccacgttggccttctccagcagctcgtcgaaaaacgcccacgagcccatgccccccgggcatttcagccacacgtaaggcgaattctccccgccggtgaaccagaaccccagttcccgcagcgcctcggtgataacccgcgcgttctcgcggtaatagccgataccctcctgcacctgctcccggccttccggggtgaacaccgccgccgcccccttctgcacgatgtagggcaccccgttgaacttggtcgtctgccggcgcagccacatgtcccgcagccgcaccccgccggactggagctccatgggcaccactgtgtatccgcagcgggtgccggtgaaccccgctgtcttggagaaggagcagaactcgatggcgcaccgtcgcgctccctcgatttcatagatgctgcggggcagatccgccccgctgatgaaggcctcgtacgccgcgtcgaacagaatcaccgcctcgttctccagcgcgtattccacccactgccgcagcccgtcccgcccgtagaccgccccagtgggattgttcggggaacataggtaaatgatatccgctttcaccgccggatcgggcagcggcaggaatccgttgtcctcccccgcctccatatagacgatgggccggcccgccatgaggttggtgtccacatacaccggatagaccggatcgggaatcagtaccgtgttctcccggtcgaacaaatccagaatgttccccaaatcgctcttggccccgtcgctgatgaagatttcgtcgtcctccaccgcgatcccccggtcccggtaatactctcccaccgcgccgcgcaggaacccatatccctgctccggcccgtatccccggaaggtggccgcctcccccatctccgcgaccgcttcccgcatggcggacaccaccgccgggcacagcggccgggtcacatccccgatccccagccggatgaccggcgcgtcgggatgcgcctgctgataggccgccaccttgtgcgcgatggtggaaaataaatagctgtcctgcaaatcccgataatggccgttgagtttcatatcccttctcctttcctgtgctccactagtctccccttgcgtccgcccgcctatgcgggcccccgggaaagaaacagacccgccggaagccggacgaatcccaactcccggcgggccccattgcctcgccgctcttaaatctcgatgatgccctcgtataccgtctcggcgctgccggtcagatacacggcctcgtcggtgtagcggatgaccaattccccgccccgcagcttgacggtgatatcggtgtccttgtcgcagtagccgttctccaccgccgccaccgccgccgcgcaggcgccggtgccgcaggcccaggtctcgccgctgccccgctcccacacccgcattttcagcgtgttccggtcaatgaccttgatgaactcggtgttgagccgctcggggaacttctcgtgatgctcgaacagcggcccgacaacctccagatccaggctgtccgggttgcagaacaccacgccgtgggggttgcccatggacacgcaggtgatccggtactcctctccgcccaccgtgatgggctcgctcacaatccgatccccgccgaacttcgccgggatgctggccggcgacagcagcgccggccccatgtccaccgtggccatctgcacctcgccgttcatcttgaccaggctgaccgtcttgatgccgctcagagtatcgatggtcatggtcattttcttgaccagtcccttgtcatacagatacttggccacgcagcggatggcgttgccgcacatcttcccttcgctgccgtcctggttgaacatccgcatccgggcgtccgccttgtcggacgggcagatgagcaccacgccgtcgccgccgatgctcagatgccggtcagacagccgcacgctcagcccctcggggttgtcaatcttctggttcaggcaattgaagtagatataatcgttgccgcagccctgcatcttgctgaaagccagcttggccttctcggcgcgcatgtcgttgatgtccaccagctcggtgcttcccagggaataccggctgcgcagactgtccgccagcgcgttggccgtgtcgatggaggtcaggcaggggatgctgcgctccaccgccttgcggcggattttcacgcagtcccgggtgggaatccgcccctttgaggaggtggacacgatgtaatccaccatcccgctctccagcagggtgatcgggttgttgtccgactcgtggattttctcgatgaccgtcaccggcatgccgccttcccggatgaccgcggccgtccccttggtggcgtacagcgtaaagcccagctcgtaatacttcttggctgtgtcggcgatttcgttcttgtcggaattgcgcaccgtgaagaacacgccgccgctcttcttcatccggtagcccgcggccaccagccccttgaacagcgcctcgtccagggtgttggcaatgcccagcacctcgccggtggatttcatctccggccccagatgggtgtccacgttggccagcttctcaaaggagaacaccggcaccttcaccgccacatagggggaggtcttgtacagccccgtgccataccccatgtcgctgagcttttcgcccagcatgcagcgggtggccaggtcgaccatgggcacccccgtcaccttgctgatgtaggggatggtgcgggaggaccggggattgacctcgatgacatacagctcgtcgtggtaaatcaggtactggatgttcaccagtcccttggtgttcagctctatcgccaaatcccgggagcagcgcacgatggtctccaccatctcgtcccggatattccacgccggatacaccgcgatagagtcgccggaatgaatgccggtgcgctcgatgtgctccatgatgccggggatgagaatgtcctccccgtcacagatggcgtcgatttccagctccttgcccatcagatacttgtcgatgagcacggggttctcgatgccctgatccaggatgatggccatatactcccgcacgtcttcctcgttgaaggcgatgatcatgttctgcccacccagcacgtaggagggccgcagcagcaccgggtagtgaatcttggccgccgcctcaagcgcttcctccgcggtcatgacggtggttccctggggccggttgatgtgcagcttctccagcagcgcgtcgaaccgctcgcggtcctccgccatgtcgatgctgtccgccgaggtgcccagcacgttgacccccgccgccgacagcgccttggtcagcttgatggccgtctgcccgccgaacgccaccaccacgccgtagggcttctcggtctcgatgacgctcatcacgtcctcaggcgtcagcggttcgaaatacagccggtcggcggtgtcgaagtcggtggacaccgtctccgggttgttgttgacgatgaccacctcgtagcccgcttccttcagcgcccagacgcagtggacggaggcgtagtcgaactcgatgccctggccgatacggatagggccggagccgaagacaatgatcgtcttcttgccgctgttccggcgggcgatgaacgcggccgcctcgttctcctcgtcgaaggaggagtagaaatagggcgtctgcgccgcgaactccgccgcgcaggtgtccaccatcttataagaggcaaaccgcttgttctccgccttgcagccggacagcctctcgatcaccttgtccggataccccattttcttggcccgcagatacagcgcgtcgtccagcttcccggccgccagcgtccggtccatctccaccagcttcatcagcttgtagaggaaccaggtgtcgatcatggtggcttcgtggatctcctccggcgtcaccccccgcgtgagagattcgtatactgcgaacagccgctcgtcgtcctgggcccgcaccttggcgtgcagctcctcgtcggtgagttccttcatgtgcgggctgctcaggctgtccagggaaatttccgccccccgcaccgccttcatgatggcttcctcgaaggtctggccgatggccatcacctcgccggtggccttcatctgggtgcccagggtgcgcttggcgtaaacgaacttgtcaaagggccacttgggcagcttgaccaccacatagtcaatggacggctcgaagcaggcgtaggtggtgccggtcacggcgttcttgatttcgtcaagggtgaagccgatggcgattttcgccgccaccttggcgatgggataccccgttgccttggacgccagcgccgacgaccgggacacccgggggttgacctcgatgaccgcgtattcgaagctgtcgggatgcagcgcgaactggcagttgcatccgccctccacgcccaaggcgttcacgatggccagcgccgcggtgcgcagcatctggtattccttgtccgccagggtcaccgccggggcgacgacgatgctgtcgccggtgtgcacgcccaccggatccaggttctccatgctgcagatggtgatggcgttgcccttgctgtcccgcatcacctcgaactcgatttctttccagccggagatgcacttctccaccagaatctggtggatgggagacagccgcagcccgcccatggcgatttcatgcagctcgtcctcgttctgcgcgatgccgccgccgctgccgcccagcgtgaacgccggccgcacgatgaccggatagccgatgtcggcggcgaaatccatggccgcctgcaggtcggtcaccacctttgaagggatgcagggctggccgatggattccatcgtgtctttgaacatctggcggtcctccgccttgtcgatggtggccgggtcggcgcccagcagctgcacgccgtggctctcgaggaacccttccttggccagctgcatggacagggtcaagccggtctgcccgcccagagtggacagcaggctgtccggcttctccttctcaatgatccgcttgatggtctccaccgtcagcggctcgatgtagatatgatcggccatggcgttgtcggtcatgatggtggccgggttggagttgaccagcaccacctccagcccctcggccttgagggcgcggcaggcctgggtgcccgcgtaatcgaactcggcggcctgcccgatggtgatgggccccgagccgatgaccataatcttatgtatcgtgggattcagcggcatatctattcacattcctttcacagtgctcggggcggggcgggtgcttcccgccgggcccctgttccggtaaaagccagggttatattctatcccgccgcgtttacctggcgttttccttgtccatccgctccatgaactcgtcgaagaggaaagccgtgtccagcgggccggcggcggcttccggatggaactgcaccgagaaggcgggcatgtccttgtacgcgatgccctcacaggtgccgtcgttggcgttgataaagctgaccgccgcgttttccggcaggctgtcgttcaccaccacgtagccatggttctggctggtgatgaacacccgcccggtgcttacctgcaccgcgggctggttggccccccgatggccgtatttcagcttttcggttttcgccccctgagacagggccagcagttgatggcccaggcagatgccaaaggtggggattttcttctcacacaccagccgcagctgctcgacaatgtccagatcctccatgggatcccccggcccgttggacagcatcaggccgtccggcttcaggctgaggatgtgctcggccgtggtgccggcgggcaccgccgtcacttcacagccccggcgcagcagctcccgctcgatgttcttcttggccccgaagttccagagcaccacccggcgcttcgtctccccttcgggctttgtcaccgtctcgggcgcgctgcccacggccttcaccgcgcgttccacccggtaggccttcatctccgccatgtccgcgtcggtgaccggccgggtgaggattttggcgttcatcacgcccgattcccgcacaatccgggtcagcgcccgggtgtccaccccgtataggccgaccacaccatgggcttttaaaaaagtgtcaagatcaccctcacaacgaaagttcgaaggctcttgacaccaatcacggacgatatacgcttttaacaccggggtttcgctctcaaaatcggaagggatcacgccgacattgccgatcagcgggaacgtctgtacgacgatttgcccgtacatgctgggatcggtcaacgtctccaaatagccagtcatggccgtcgtgaaaaccaattccccaacgacctcttttacggctccgaagcagctgccctcgaacaccatgccattttccagaacaagggttgccttttgttccatagcgatcactcttcctttcgcatccccgcgcaaaccagcccgcgcctcgcggtgcgtgcccttttgcgccatttacgtctcgtaagccgccagaatacccgccgcaacctccctgcgggagacccgccggtccatggcctgcttctcgatgtacctgtgagcctgtggctcagttaacccaagatattgtatcagaacacacttggctctgtcaataaggcggatctcctcaattttgtggtgtaaacccgcgttttctgtttttatttccagcagccgccgccgcgcgaccatggccagccgcaccgtccgcaggaacagcgccttgttcagcggcttttgcagcaccagcgccccccgcgcctccagccggtcgatgtctgcctgcgcaaagcccgcccgcgccagcagcagcaccatgctcgccgtgccgtccagcacctcgcgcagcagcgcccctgtctcgggcagcggggtgtccgcgatgatcaacgcgaactcctccccttgaagcagggcgcgggcctgcgcggcgtcggccgcgcccacgcagggccagccgctttccgttatctctcgcgtcaagtcctcccggctcctgtccgagccggaaaccaacagcacccggctcatcccgccgcctccctttgctccccggggatttctctgtttctctttattatacaccgaaacagaataccagtacaagctatttgtttttaaaatatatcacaagttttattaacatatatttacatttataaatattatgatataataataaaaggaagatatggaattcactggtacgaatctgcatttcgccacgaaggagggatttcaagtgaaaaacatccggctcgtccccatcacactggcttttctcttccttataagcgtatgcggctgtcgcggcaagccgcacgcctccagtgttccccgctccgaatccctgccgccccactcggaggcggataccgctgttcagcacgtcgatgccctcaagcagagcctgaagacctatctcctgcaaaacaagctgtgcgcgccgcaggacatcggcaaggtggacacgctgcagaagtacggcgaaagccagggctattccatctgctactggtatggggtgtgggtgatggaggaggaacacctggaaaccatcggcgaatttacctttcacagcaccagcaagcacatgccctttcccctgggactctatatcatcaaggacgatgaggttctatcgcttagggaggcttatgaacagaaaaaaatagcgttagacgatgtcgcgcgtgtcgtccccatgctgctgcattaaaattgggggctatggaccgaaaaacgattacacatcactcggaacaaaaatggaaggagtcaatatcatgtttaaaaggttccttgaaaaagcaaacgatttatgtattttctcattgcatttttagtctgtatcctgtgccctgttctggtagtcgccgaaccaatatgtagaaatattgtagacacaaaattgaattacttacttcttaaagccaaggacgatgagtgtatacctgttgaaatatggcttgatgatatcgatcacacatctattactttacaagcagaaaaaagaacaggaattgctaagagtgaattggatgttaataagccgttagcactgccaattaccaaacaaaaaagcacgtatatcgataaggaaaacatacggatcgctagagaagtggaacgtgaaaaaacggatcgatttataatagagaaaagaactctctctaaatcctcatataaagataaaatctccagctttataaatgctgccggtctatcaaaatatgtaacttggacaagtacgtattctccttcgtttttagcaaatttaaataagaaacaaatttctgctttacagaaaaacagtttagtctgttccatttcctattataagccacaggaatatactcccgaatccaatgtttctttagggactgctcgtggtaattacactagagatactctaggttatacaggttccggagttaaaatcgggatgtatgatagcggttccgttagtgcaagtctcaatccagaactgtccggaagacgaattattaatttggtttcatcggccgctagcgagcatgcatcaaaagtcgcatcttttatagttgggaaaaattggggatacgccccagacgccacactttactgtatgggtggcccaggattaatgatgagatccagtgtggagaccttgctggatcaaggcgtcagtgtcatcaacatgagtatgggaggcggggaatgcaccacatatgacagcgattcaaattggttggatcatgtttcctatcagcatcaggtttccgttgtaaaaagcgcggggaacgatgggaacgatcgatatataacgtctccaggcgccgcgtataacattattacagtaggggctattgattgcaatcatacaatcgctgtccatgacgatactccttattttaggaataatctattatatcctgcgtcctgtaaaccggaagtgtttgcaccaggtcataattatgacacaggcgccagcgtcggcggtacaagcgatgccgctccacaagtaaccggtttaatcgcacagctaattgagcaaagacccgccattgcttcaaaccccatgctgattaaggctttggtactagtaggagggcacgatattaacgcatacgaatcattccaaacggcaggatattcgtcgattgcaccatatcatgccggtgcgatcgatgccaaagttagttgttcttcgtcaagtggtggtaaatattttaccggccaagtcactacagtatatagcaaagaaatcgccgttagcagcagctggtcgtatctgcatttggctttgacttgggatgtcggttcctggatcgttacggatgatcatgaaggaggagcgatgatcccctcttctcttattgatttaggatttagaatttatgctcccggatctgacacacccgttgctgtaggacaaacggctcaaaactcatacgaactaatggaagtgcctgtcaatggccgagggggaacctggcgagtagaagtctccaattactctaataatattccatcttttttcgctgttgcatactattaggctattcattcagaaatatatggcggacaacccttccttgcggaaatcgtatacgagacctatatgcagcagcgagaagccttggaattcaccatagtggataaaaagcttcccgccgaatacgacaaaatgaaaaacgacgcgaagcgtatcaggagttccttggcactgccggaacaggtagaaacggagtgacacgtatgagaagcaaaactagccaagcggggatactcttatccctagtccttgtcctcttattatcagcaggttgtctttccagtgttaaggaaattcaacagggcttttccgacaagctggtgcaaatgctcagcgaggactatgatttggttattcctgaaagcgccgtattggaagaagggcgtttcaacaatacatttccgcctacgcagacatggcttcacggcattgcggatccggattccaaaaagaaggatggttggctggaagcgaccgaggccgacggtgagatgcgggtgcttttcgtcggggatcatccggatgccagaggcattaagtagcgcccctatgcggaagctctgaccgccgcccattctttcattattctcccacccccgcatcccccttgacaaatccctccggatacgctatactctttccaaagcagcaagggcgctgcaggtgtggaacctgcggcgcttttttgcagcccgcaattctactgtgagatgggagacggatgtatgagcggcgtacccgaactgttcggcagcctggtgttcaatgacgcggtgatgaaagagcgcttgcctaaggacacctataacgcgctgaaaaaaaccatgaaagacggcaagagcctggacaggacggtggccaacgtggtggccaacgccatgaaggactgggccctagaaaagggcgccacccactatacgcattggttccagcccatgaccggcgtcaccgccgagaagcatgacagcttcatctcccccaccgacgacagccatgtcatcatggaattctccggcaaggagctgattgtcggcgagccggacgcctccagcttcccctccggcggcctgcgggccaccttcgagg

SEQ ID NO: 859 - DNA, 4777 bp, Unknown
  16S sequences of unknown bacteria
cctttttacaaaaaggtgtttccccggaccccttccccaaaaatctctaaactgatgggtattggtgtgtgttgtcctttcggaagaacgccgtgccaataacgcagacacggtaatttgacgtacaattacagcctcacattataccgtgctcaaatcttgggctcacgttagagaaatgggcaacgcccatttctccgggacacggtaatttgacgtgcagttacagcctaatattataccgtgtccttgtccgcattcacgctgtacgtcttctttccgccgtgcccgccgaagatctgccacgtccccgcgccgagccgcgcgaagatcgcacgccgctcgagggcgcaaagccccggatcggtatcgaccgaggtcatcaggatcggcgcgtaccgattgtactgcgcctgcttctccgtcatatccttcatattcacatacacgtcgccgctgaaaacgatgcggttctcgtaatcgatcagcaccgattccccggtcaggtgaccgccgccgccgcggtacagctcaaaatgaagatcgccgaaatcaaagctgcccgtccgcgtgagcacctcaccgccgttctcctccgtccgagcctctccgcccgtcacgaccttcgccggatcgacgggggtatacgacgtgagtatcttgcatatctgtatgtacggcttgtgaagcggatttttctcgcggtatccgtccccgtccgcatactccatgcgaagacactccgcagtttccgcgctcgcgtagaccgtatcgaaatccgggagcagtccgcagtgatcgacgtccgcatgggtgacgaacacttccttcttcattccgtcgaatcccggtatcagctccgcgaatattcgtctcatctcggcgcggcagtacgcatatcccgtatcgacgaaaagatacctgccgccgctccggattatcgccgtattgctgccgcacggcggctcgatcaggatgatgtccgtattgtcggtgacgcggtgctcggtgatacgcggtgtgaaatccgcaccgcgcgccttcgaaagcagctcgcagaagcggctgatgctgtcgaacgtgcggtacggcgatacccccgattcgtcaagctgctgcatcgcaagattggtattgacgagaagcgcctcgcgcgaatcggcggatatctgcatgagcgacgaaagttgatccgcgaaatgaatgtagaacacgctgttgtcgtagattttgtccgcgcggttgtagtcgatgacgcggaccgtgcacagcttgcccgcctccgcaaggaatgcgtcgagcctctcgctctccccggcgacgatccccatcttgaaatactgatagtccgagccgttctcctgcgagctgatatacgaaatgttgaagctgaattcgcttatcagctcgagcacggcggtgacgcttccgggaacgtcgcgcagtctgaattcaagcagtatcacgctccgcccgctctcgtcgcattgcaggtagccgatctgcgtcagccgccgcgccgcctcgtcgagcttatccgccgttccctccgcgtcgatgaacagcatatgcgaatccaccgccttgttgtagctgacgcgcgttatgttcacgccgatctccgcaaagcatcggcttgcctttaaaaatgcgccgatatgattcggcattaccgtaacaaatgttcttttcacgggactctcccacgctcgttaaaattttctctttccggcagcaggcttttcctgcacctaagcgtcggaatacgggaacgtatccgattcacctaaggcacgccggcaatgcagtttcccgaccgcacggctcgtcaatcgtttgtgatcggtgagacgatcggtttgccgtctctgccgagaagcggcgtcagacctccggaatttccgcatgcgtggtaaagataattcacgccggtttccttgtccacccaaatctccgtaaccgtcattgctccctgcgaatacacgacttcgaatctctttttgtcagccatctttttctccccggaatccgatttttcggtattctcaaacagtatatcacaaaaaggcatcattgtaaaggcgcttgaagtaccccgccgcggtattttttacggaaaatcgaggcggggggatgggcaagacggggaaagctaaacgtgatgggacacacggcgataggctatggagtgcggcggattaacatgaaaaatctccggcgcaagtcggagatttggcggggaggatttatatacccatctgagcaagtgttttactgattttcctttgcggtattcagtgatgaaatcaatatttttttcagttcaacacatttattgagtactttttcatcgccgcaatatccgctctccgttaacagttcaatccaatactctgtttcatagcattctttcaaggcaatttgaagtttcgcaataaaatcagctttaccgtgcgcataaaaagcctcacggatattggcaccgatagatgtgccggaacgcaagaattgacttattaaggcactttcgcactttgcatttctcagttctttacatattcttataacatcaagtgcaaattctttagattttacaatcaaagggctttcgttcatacagacaaacctttcagatctactgtgctctatacggataaaaaaacggacttcttaaaggcacttattcactgtttactcttacctattacctgatcgacaagcttcaaaagtgaagagtgaaaagttaatagtgaataagtaaaatcgacaagcttcaaaagaagcttgtcgattttggcccgccctgggggattcgaaccctcgaccatcggaatcggaatccggtactctatccagctgagctaagagcggttgacggtaagcgggacaccgcttacctttttattttatcacagatcggtgattttgtaaagtcctatttcgtacttacttcgcgccgtattcgcgcttcgcctccgtcagcctttcgtttccttcgcctatcgaaagcttttcccaatcgctttcgcttccggtgtatttcacctttgcgatcgcgtcgcacgagagaaacgccgactgtccgatctccgtcacgccgccgccgagcgttacctcttcgagcgacgtgcagtttgcgaacgcaccgatgccgatcttctttacgctgtccgggatcacgaccgtgtgaagtccggtacagccgtcgaacgagccgtacccgatctcggcaagcacggagcttccgaattcgattccggtaacgtcggttttgccccggaatgcggagacgatgctcttcacgccctcggggatcgtcacgtttccgcccgcgccgccgtactttatcaggattccgtcgccgataacggcgaattcatcggagatcgtgtcgtaccacggggtatcgttgaacgcgaatccgccgacctttttaagtcccgcggtgcctttgatgtcgataagcttcgggcatccgtagaatgcgccgtcgtttatctcggtcacggttgacggaagtgtgatcttttcgagaagctgggacccggtgaacgcgccctcgccgatgaaggtcactccctccgaaacgctgacgctcacgaccgaagtgtgtgcgaacgcgccgccgaaaatttcggtgacgacggtgccgttgaacttgtagggagtggtcacatttttatcggtgccgtagtaggcatagaccgagacctttccgctgtcctcgtatacggcgaatccgtaatccccttcatcgacggtgcggaaaactcctccgcgcgaatcggtatcggtgctgtcggacagcttattctttgaggtgatctcctcgccgaagattccgttcgggtcaacgtcgggtgcgttatccgccgcggatgcgtttccggtatccgacggtgttttatccgaccggcacgccgaaagggacaggcaaagtgaaataagaaggattattgcgattatttttctcatagaagctccgttccgcctgctcggcgattttctcagtatgtgggccaatcgagtctccattcgccggagtcctcaagctttaccttgaaggtctttttctcggcgaactctccgttttcgtatgcatcgacggtcacggcgacgaagtctctgcccttgcgggagatcgcaagagtcgagatatcgtaggtgcggtcgagcttcatggcctcagcggcggatttcacgttgacggtgagaccgtaggtgaggtcctcgatatagcgtgcgtaatttgcgacagcgtctccgtcggagattccctcgaagccgcgcgcctcgagatattcgcagtacgatgcggaatacaccgcgtgcgcaaggttcattatctcctcgcgggtcttgtattttgcgctttcctttacggggagatagaggtagatcttctcttcctcggtcttgcactcggcgagaatctcatcgggcgttttaccttcgtcctcgaattcgagccccttgccgaaaaagatttcgttgacctcgtaggatttttcgataagcgtgccgacctcggcgagaaatgcgccctcgtccgcaatctttacggtgcaggaggaaagcgacacggcggatgttatcaggcagatcgccgcaagcgcggcagaaataatttttttcatacgttatcccgggattaaagttatgaggattaccgggggaaccctttttgacaaaggggagtcccccggagcccccatgcgtgaagggaacgatgcgggacctttttgaaaaaaggtccccgcacccccaaaaacttttg

SEQ ID NO: 860 - DNA, 32759 bp, Unknown
  16S sequences of unknown bacteria
gagggttcttccgggagctggacaaggaatttcacttcaccctggatgcggcggccggcggaagatctccgaaaagtggggcctgtggatctggctgacgggggaataccacaacctttcggctcacggcatccactttgacagtaagctggacaggctggtaaaggcccagtgccagcagcgctttgaggagcttcatgggcacggtcagtggatgcagatcatcgggaaaaattatagggagtgaagaaaaaatgaaagaccaaaagaaaagcatcctggaaatggcccggggagccattctggagagggtggacgaagaggtgaagcgggtgatcgtcaatatcatggacgaagagacgattgccagcgccaagcggaaagtggtggttacggtggaatttaagccggatgcctcccgtcagaatatccgggtatcggccacggccaaaagcaccctggcacccaaaaatgtagagacaaaccttgtggtggaaagtgacttcggcggagaggtgcaggtgctggagatgcagccgcagattccaggtcagacggccatggaagaaagcggcctgagtgtgctgagattggagagggaatatgctgaataaagtgattctgatggggaggctcaccgcagacccggagctgaaacacacccagagcaatatcccggtgacatccttcaccctggcggtggatcggtcctttgggaaggagaagcagaccgactttctggatattgtggcctggcggaacacggcggagtttatttccaagtggttccgcaagggaatgctggtggccgtctccggccggatgcagacccggacctgggaggacaagcagggaaacaagcgcaagacaacagaagtggtggccgacgaggtgttttttgccgaaggcaagaagcaacaggaggaagagggaagcggggcttttgtccttcttccgcctgatgatgatcttctgccgggggatgatatggagatgccgttttagggagggggagaaagatgaaagatgctgatttgatccaggcgctgaagcggatcaaggtgcagaccggcgggctgatctgcctgggatgtgggcatgagcacaactgcagagagcatggctgcgctgtgatccgggaagcggcccagcggctggaggatttgatgtggcgggacgcagatgtggagatccctgcagaagaagatgtggtgcatcttgttaaagtgacaggcaagtataggaacataggtttccagggcgccgtgatgactgcggaatacagccagcaagaaggatggattgtggaacttttcccggaatggaaaaatccaggggtgacgcaatggatgccgatccccatgggggaatgagtatggaaaagaaagaagcaatttggattcttaggcagtgcaagtttagcaatgcacagtgtatgtgccaattctgcgagaaaaagtgcaacaatgggctgaactgcttcgagtgtgagcgggcaggggaagcggtacacagcgtgtatttatgcacggggtttgagggaaatgttgatgagtacatacagaactggaaggcgaaacagcaaataaaagagtgtgaataaccgaaaaggaagcggcccgagagggctgcttcctttttgcttgggtcgttacttttcattagattcctgggattttacctttttatatcgattccgggaataagcattgcgctcttgtctgtgagcggtttcccaagaccgaaaacgggaggacttcaatagagctgcacattccggcgaacaggtaagagcctttccttttcggggaggtgggataaagcttttgccgcagacgacgcaaattttcggggaggcggcatcacggcgggctttcttcttttgcaggggagatatgttttccttattccaggatttggactgctcccggtcgatggctcggatcgcatcaggagcacagtcagggcagtatttttggttccctccattgaccacataaggcttgccgcaaatggggcaaatatctgtgctgcccagctttctcaccgagccagattttttccgccgcttatattggaggcattgctctttttgccgctctgcccggcagtccgggcaataccatgccctgggcccgccggaaaaggttttgccgcaggagcggcaaatgcggggcaaaactgtttgacgcttggattcctcggcgcactgggggcacttgatggcatcgtatggactatcaaaaatccggccgcatacttggcaaatccggcgcatattgtcgccccctacaaaagggactcgatataggcgctgaggctcatgcctttttgcgatgcggcccgcttggccttttccagggagctggcggaaaggctgagggtgacaacggtgcggctatcgtcctcgacgatcttcccgaaagccgcctgatactcgtcagcgtccaggtgttcttcggcccactggcgggcagaatcccaggtgagagggatgatggcttcaccgctgccccagctgccatagccgcactgggtggcgtaccggctgcgggcgccgcctttgccgtggagaaaaaactccccggtgcgcttgcggtacaggctttcggcagcgtaatcaaatgtgccgcccatgttgttgtcccagctgcccacaaggtgggcggtggtggtgtcgtagagcttgccgttgatgatctttttcatggtgttgtcctccttttaccaaatcagattaaacttgtcgtttgcaggatcgcttgtttccacatcataccaatctccatcattccagtgagattccagcgcagattctccaagaagtccctcgggctcaggggaaaagacatagcgaatttcaattccaagctcacgggcggcggccattgtgtggtgccggtcggcctggattgcaaactcctcgccatcgacttttccgatctcatagcaggggatctcaacaaactcatttccagcgatctcatccatcttctgctctacgatgttccagtcaatgtagtgctggctgctgatgaccttcatggtgtttacctcctgagctgtttttgtttggttccctatctgatgatctaagtatagcacagagtttaaataaagtcaagcaaaagaagaaaataaataaaaatatttgtgtttttgagaatgaaaaaacggctggaaaattttttgatatgatgaaaagaaaggaggggagagcatggccagaaaatacaccgaagaagagctgcaggagatgaatgcaatgcagctggagaagctgctgacgcccagggagcgggacttctgcgagcgctatctggccagccgcaatggcaccgaagcggccacccaggccggatacagcaaagggagccgggacggggcagcggtggcggccagccggttgttaaggagagataagattggggcatacctgcgggcgcgcgcgcgggaaatctatgggcagctgcacattagcccggaaacggtggccgctgaccttatccgcatttatcggagggccatgcaggccgagccggtgatggcctgggacccggtggagcggaagatggtggaaaccggggaatgggcctttgacggaaaaaccgccgtgaaggtccaggagctgctgggagattccatcggaatgtttgaaaagggccagaagctggacgcaaagatcgtggtggagatgccgggggacgccgaggagctgggcaaatgatccttcgcctgggaaaaccccagcccaagcagcgggaatttatgttggcaaggagccgcttcgtggcatacggcggcgcccggggcggcgggaaaagctgggccgtgagagccaaggccatattgctggcgctccactatcccggcatcgtggtgctcattctgcgccgcaccttccccgagctgcggcagaatcacattcagccgatgcaatcaacgctgctgggggcggcccggtaccgggagaccgacaagaccttccgcttccaaaacggcagccggattttgttcggatactgcaaaaatgaaagcgatgtgcttcaatatcagggcaatgagtacgatgtgatcttcctggacgaggccacccagtttaccgagtaccagttttccaccctcactggctccctgcgtggcgccaacgacttccccaagcggatgtatctcacctgcaacccgggcggcgtgggccatagctgggtgaagcggctttttgtggacagggatttccgtggagaggaaaagccggaggactatgaatttatcaaagccaccgtctacgacaaccaggtgctcatggaaaaggacccgggctatgtgcagatgctgcgcaacctgcccgaagatctgcgccgggcctggctggaaggagactgggacatttttgtgggccagtatttcggcgaatttagacgagagacccatgtggtggaccatgtgcccctgatgccccactggcggcggtattttgccatggactacggcctggatatgctggccggctactggatcgccgtggacgatgagggccgggcgtgggtgtaccgggaaatctacgagagcggcctggtggtgagcgaagccgcccggaagatcaaggatctgagcggggatgaaatcatcgacagatacctggccccgccggacttgtggaaccggcggcaggagacaggccgcagcatggcggagatctttggggaagaaggaatatggctggaacagaccagcaatgaccgggtggcggggtggctggacctgaaggaatggctgaagccaacagaacacgggccggcgctgaagatccacgccagctgcgtgaacctgatccgctgcctgccccagctgcaatatgatccgaagcggcccaatgatgtggcagacgagccccacgagctgacccacgggccggatgccatccgctgctttgtggccgggcgtcccatgccatacaagcaaaaggggcaggagcctatcgcccaatgggcccacgagcggaagcggagccggggcgatgtgggcagcaagatcaaagtgatataggagggaagcccatggatcagcaaattagcttttttgatgaagatgcagaatatcaagcatttgtggacaaattcaaaccgaaaaaaacgacagatgactgctacacgccgccggagatatatgatgtggtaaaagaatgggcctgcaaagaatacggcatagacccggggaaaattgtgcggccgttttatccgggcggagattatgagcgttattgctatcccaatggcgctgtggtgctggacaatccgcctttttcaattctaaataaaatatgcgagttttaccttgccaaagggattcccttttttctgtttgcgccatctcttacgattctttccgggcgaaaaacatttcagcaaatgaaccacatcgtttgcaacgcagaaatagtgtacgaaaatggcgcagcggtgctaacgggatttgtgacaagctacggcggggatgtggtagcgcaaacagcgccagagcttggagaaaagataaaccaaacatcaaagcagatcaaacatacaaaaaagatgccaaaataccgatatccggatcatgtgctgacagcagccatgctgcaaaaatatagcaagtatggaattagcttgaaaatacggcgagatgattgtgctcaagctggctacatagacagccaaaaaaacatgggaaaaacaatatttggaagcgggcttctgctaagtgaaaaagccgctgcagaaaaagccgctgcagaaaaagccgctgcaaaaatcattgatgaaaatactatcgagtggacattgtctttgcgtgagcgggaaattataaacagtttaggaaataaacggagggaaacccatggagatgatattggcaacggtgaccgtggtgctggccatggcggcgggggcgctgatctaccgggccgggctggcagaaggcaggcacatggagcagggcggggagatcagagcaaatcccctgccggagaggaaaacgcccacagccgagccggaagagctgcggcggatgcggaagctgctgaacaatgtggataactatgatggaagcggaaaaggccagaaggaggtgagataggatgctggatgcggagatggaagagatcagaaccggtgacgaggccaccgagatctggaagaaatatcagcagggcgtaaaccatcacaaccagatcggcctttatgagaaggtgcgcaaagcgtaccgattcttcgagggggaccagtggcatgggctggagagcgatggggaagtgatgccccaatacaacttcatccagccggtggtggagcacaaagcggccagcgtggccatgaacggcatggcaatcaactactcgcccatggagtacggcagcgactatcagacggcggcccgggcctgtgatgtgctcaaccggtacgccgcccgccagtgggagctgctgaagatggataagctggggtgggccatcatcaaagacgcctgcattgcaggggacagctatctctatttctatgaccgcaatctccacgcccagattatagacggccccaatgtttactttgccgacgagacaagccgggacatccagggccaggattggatcatcatcgcagagcggcggtttgtggaggatgtgcgccgggaagcaaaggagaacagactgagccaggaagagatcgacctgatcgggccggacagcgacaccgggcaactgctgggagacgacgctaggcagaacagccagcaggaggacaagcgctgcacctcgctgctttatatgcggaaaaacgaagagggcattgtgaccatcagccgcagcacccagaatgtggtgtaccagccggaagaagtgatgcagggcaaggaaaaagaaagcggcgagcctgccgggaaggggatgcagctttatcctctggccgggctttggtgggtgcccaagaaagaaagcgcccggggcgtgggagaagtgaccccgctgatccccaaccagatcgaggtcaacaagatgctggtgcgccgcctgatgaacgccaagatcacggcctttgggcggatggtatacaacaagcgcacggttgcaaacccggaaagcgtggccgaagtgggcagcgccattgaggtgatggacacgccggcggcacgggtaacagaccatgtggcctatctgcacccatcgcccatgagcgccgacgccaaaaacctgacggatgagatgatttcccagacccgagacctggcgggcgccggtgatgcggctttgggccagatcaacccggagcaggccagtggatcggccatcattgcggtgcgggatcaggcggcgctgcccctgaatgagcagattgccgaatacaagcagttctgtgaagatgtggcggcgatctggtttgatttgtgggtggcgtatcaccctaacgggatggaagtggagctgccgcccgaagagcagccgggccttctggcagggatgatgccccaggggctggacatcgggcaggggatgggccagaccggcggcatggcggcgggtactccacccgctgcacctatgggacagatagggcaaagcgctgcacccatgggacagatgcccggcatgatgatggatgcggagatggagcccaccaaagagatgatcccggcggaagtgctccagcagatgcggccatccatccgcattgatgtgagcccggtgaacccttactccaagtacgcccaggaacagagcctggcgggccttttccaggccggggccatcacctttgaggaatatgtggaggccctggacgaacaagccagcacacccaagcagaagctccaggagatcatcgacaggcgcatggagcgacagcgggaacagatgcaagtgcagcaggccatggcacagatgcaaagccagatccagcagctgcaaggctggcagcagaaggccctgggcgtgatggatcagcagcaagccatgatgggcaccgccgaagcggcccccatggaaacggctgcaccgatggaaggagcagcgatcatgccagaaggcgtgattttgcaataagtgttctacgatatagaacaagggctgcaaaacggcgccggccgaacctcgcccacaaccgagcgaaaggagaacgacaatgaaagtcgaaacaatggctgctaatgccgaaacggaagaaaccctggaccagagcacagaagcacccctggaagcggagatggaagaggcggaagcgccccgggaaaaccaggaggaaggccaggaggaaaccaggacggagcccggtgacgccgccggggaagaggaaaaccacacacaggaagaagcccaggacaacggccaggaggatgtgacccagacccaggcctttgcccaccggctgcgggaaaagatggagccggtagagcgggagcttcaggggctgcgggagacccagagccagcttgaaagcctgcaggaaaagctgaaggagctggggtacaccggaacggcccaggacatgatcgaccagatcgaagcgggccggagagagatcagcgtggagcaggtgcgccgggagcggctggaagaagaagcaaaacagcagcaggctatccaggaggctatcaagaaggatccggaatacatccgcaatcagcaggagctccgggtgctgcgggagcgggagagccggagagtttttgaagaggatatggccacggtgcgcaagctgaacccccaggaaaaagcccagaccgtgcaggagctggggcccgacttcatccggctgcgggccaatggcatcccggccgatgtggcatacaaggccacccacgagatacagccccaggtggagccgcccaaggacacgggcaaagtaaaggggagccagagcgccgccggagcctatttcacccccgagcaggtgcgggccatgagccaggccgaagtcaaccgcaacctggacaaaatcgagcagagcatgaaacactggtaaaaaaagccccaagaggcagaaaggacggaacaaatgagttttaacaattttatccccactgtctggagcgcccagatgctgaaggcgctgaaaaacgacaatgtggcggtgaagctgagcgacgcccgttacaacgagacggccaagtatggcgacagcatcaagatcaacggcgtgggcaaggtgaatgtgcgggactatgtgaagggacagcccatcacccgggacggctgggaagaccagagcaccctgatccagatcaaccagcagaagtatttcaacttcggcgtggacgacatcgacaagcggcaggccaaaggcgagctgatgagcgccttgcaggatgaagccagcacggccctggccgatgtggcagacagctttatttactccctgcacggcgatgccgggagcaagatcaaggtagatcaggtcacatccggcaatgtgctgagcacgatctccagcgccatcaaggccctttacaagaaaaatgtgcccaagaaagcccagctgagcctggaagtcaccccggattttctggagaagatgctgctggccgacatcctctatggacagcccaacgatgacagcctgaaaaacggctatgcaggcagagtgggcaagtggctgaatgtaaaggtatacatgaccaacaacctgccccaggtgggcggcaaggatgtgattttcctgcggaccaagcgagccattgcctatgtggacaacatgaacaaggtggaggcctaccggcccgaggatgccttcgaggacgccatcaagggcctccatgtgtacggcggcaaggtggtgcggcctgatgagctggccgtcattacctgcggctacggcgaagagaccaagatttaaggagggaaagaaccatggcagatatcaacagagtgctgggcgtgcgtgacgccggcagcgaatcctttgaactgagcgatggagccgccgagcagacggcggtggccgggcaggacgagcgctactgcctgctggtggaaaacagcgacaccagcacggcgggcatcctgatcaaggccggggacggcatccgctcttccatcggcgaccttctggtgacggtggcccaggacgaaaaaaagatcatcaacctggacagctcccgctttaagatgctgagcggggacaacgccggaaagtttgtcatccagatcaaagacgaggcgggcacaagcgccttcggcggcacagtgaccaatgtaaagctggcggccatccagctgtaaccccaagggggcggggaaagccctgccccctttgagcattccgccaaagtggcgggaatttgcataaaaggagggaaagacctatgacctgggcggaaatgaagcacatcacgctccagaaaatcgacgaggccacgggcgaagacaacagcgaatatgtgagccagatggcgcccccggccaatgaagccctccagctgctggccggggcgggaaaggaagttatccggtcctatgagatcgtccagaccggcgaggaagtgggccgccagcggtacgacatgaaggaactgacaccggactgggtggagctgcaaagcgtttactttgacaatggcaccacctacggccagagcagcaattacagtttggaaggcaacagcgtgattgtgctggagcccacagctggaacatggcgggtatactaccaggcttatccctacgagattaacggcagcacaccggaggacgagccgctgtctattgatcctgaagtggcggtgattattcctctttacatcgccagtcagatctacaaacacgacaatgtgagccttgccaccatctggcgcaatgagtttgagatcgcccgggaagccctgctgatgaaataccagcagaacaaagtgatgggacaggctggattcgtcagcctgaagggggtgtggtaagtggcaaagtttgcggtgccggatatgcccacagaatatgtgacgagatatcagaaattccgtggggtggacttttccaccgacccggccctggtggatgccagccgctccccctttgcccccaacctgatctcagacgccggcgggatgccggagaagcggcttggctggcggacgctgctggagctgccccaggggggcaaggtgaatgggatgtggtgggggaccatccaggacaaggaggtttttctcgcccactgcggcacggccctctacaaatgggagcagacggtatttggaggaggacagcgcatcccctacggccaagaggggtggacgccggaaggcacagccgaagtgctgaaagagggcatccatgacggcccctcttccgcctttgagatggacgggaagatctacatcctcaccggcggggagtacctggtctatggggaatttgaggaagaaggcagcgagaaagaagagccgccaaaggtggtggagctgcggagcgtcacggatgatgcctatatccccaccacccggatcggggccaagccagacggcggcgagggcgtgacatttgaagaagtgaacctgcttaccggcgccagaaaaaatggctttgtggcagacggcagcgccaaggaatacaccctggacgcccaggagctggacgagggaacggtaacagcggaagtcaacggcacggagatcaccgagggaagcggtttgacggtggacagggagaagggcaaagttaccttcaccacggccccagccaagggggatgtgccgggcaaggacaatgtgaccattaccttttacaaggcaggcaaagactatctccagaaagtgctggggtgcaatgtggcggtgctttacgccgaccgggtttttatcacgggaaacccaaaggaacccagcaccgactggagaagcgccttccaggaccccacctatttcccggatttgggatataccaaggttggaagtgagacccccatcatgggatatgccaagatcggggaatatctggccatcgtcaaagaggacagcagccaggacagcacggtttttctccggctggaggacacgctgaacgggcagacagttttccctgtaaagcagggcgtaaccggtgcgggagcggtggcggcccggtccttcgggcagatcttgggcgagccgctcttcctcagccggaacggcgtgctggggctggtgagcagcagcgtcaccgatgaaaaggcggtgcagaaccggagctattacatcgacagccagctaacaaaagaaagcaatctggaaaatgccattgcggtgagctggaacggcaactatttgctggggctcaacggaaaatgttacatcctggacggcagacaggccaaaagctacaaaagccagagtatgggcgactatctctatgaatgctatcactgggagaatatcccggcggtgtgctggatggagcacaataacgagctttactttggcaccacagacgggcggatctgccggttcaacagcgatatggacaccatggcccggttttccgatgatggacaggccatcacctgcgcctggagcaccaaggccgacgacgacggaaacttcacccagtacaagaacctcttaaagcggggctgcggcgtgatgatcaagccctatctgcgcagcagcgtgaaaatactggtgcgcacccagcgggacttcggcaaccagatccggtattccaccatggatatcttcagctgggaggacatcgacttttcccgttttaccttcaacagcaacgacgccccccaggttgtgccattcaaccgaaaggtgaaaaaatatatcaccttgcagatcaccgtgagaaatgatgccgtgaacgaaggcttcggggtttttggcatcatcaagaagtttaccaaaggcaattcggtgaaatagaaaggaggcaagcagatggctattacagatttgaaaatcaaaagcagcgattataccggcaaggatgtggcgtcggcaccggacaagctgacgggcacggcccaggaaaacaaagcggtgtttgaccagctgatcaaagaccttctggccgggcggtataacagcctggtggatgcgctggcagcgatcaccggagcgggagagatcggcacccagagcggccaaagtgtgcagctggagctggacagcgccatccgctgggggagccaggaggtgaaatacatccggcagaacagcgacaaggtgctggaagtgtccagcgatggccagcgctgggaagccaccggctcttccggccatatcattgtggatcagagcggcagcaccttcccccagcgtgcccggctgcggttcaataacggcactgtcaccgacaacggcagcgagacggttgttaccgccatgaagggagacaagggcgagaagggagacaaaggcgacaccggcgcacaaggcccccagggcgaaaaagggccgaaaggcgcggcctggtacccggccctggacggcctgggcaccttgacctttaccctcagcgacacagagatcccgccgcccagctacaacatccgaggcccccaaggcccccagggtgtgcagggattgcagggcgaagtagggccaagaggcccccaaggcatccagggagcgagaggtacgcagggcatccagggagagcagggggagaccgggccggaaggccccgccggcccaacagggccccaaggcccccagggtatcccgggaatccagggagaacctggacccaaaggggaaaccggggcgcaaggccctcaaggccccactggcccccaaggacagaccggaccaaagggagcagacggcaaggacctgaccatccgggaccgatacgaaagtctgtatgagctggaagcggctcaccccaccggccttgcgggggacgcttacgccgtgggaacggcagaggacaacaccatttatatctggggcgttgataaaggggcctgggtggagattggagatcttcaagggcctattggaccccaggggccagcaggcgccaccggcccccaagggcctcagggagaaactggcccgcaaggccttcaaggcatccaaggacccaagggagaaaccggaccccaaggtccgaaaggagaaaccggcccccaggggccccagggaatccagggggtgcaagggccggaagggccggaaggtccccaaggcccccagggattgcagggcacagcgggagcggacggcaaaagcgcctatcaatccgctgtggagggcggctatatcggaaccgaaagcggcttcaacaaggagttggcgggcattggcaacaaagcagacaaaaaaataccaacagcggcggggaacctggcggccttggacggggcgggaaacctgcaagacagcggggtgaagccgggaaagtttctcccgaccaccggcggcaccatgaccgggccgatcacgctggcagctgaccctgcggcggcgatgcaggcggtgacaaagcagtatgtggacgaaaaagcagggaatctgccgcagggattgggaaaggcggtgctgctgagtgaagtatcgattacgcttccgtcttctgcatattggcgctcagtcacctgcggaaatggtaaatttgtggttgtggcatccagcagcaacaaagcggcatacagcagcgatgggatcaattggacagcaagcacgctaccatcttcgacgaattgggaatccgtaacatatggaaatggtaaatttgtagccgtggcaggtggaaaagacaagacggcatacagcaacgatggaattgtgtggaaagaatcagaattaccgtattatggagcttgggcgtctgttgcttacggaaacgaaaagtttgtgacgatatctgccagtttggggaatgaagcggcatacagtagcgatgggatcaattggacagcaagcacgctaccatcttcgggaaattggaaccttgttggttttggaagtggaaagtttgtggcgatatgtggaagtggaagcggaagcaacaaagcggcatacagcagcaatgggatcaattggacggcaagcacgctaccatcttcggcgatttgggaatccgtaacatatggaaatggtaaatttgtggttgtggcatccagcagcaacaaagcggcatacagcagcgatggaatcacttggacagcagctacgcttccgtcttctgcatattggtattcggtcacttacggaaatggtaaatttgtggctgtggcatccagtagcggcaaagtggcatacagcagcgatggaatcacttggtatgacagcaatttagcgctggtgaacccggcgggggaagatgtgacagcgctggtaaagcaggcgctgggaattgcgtaaaccaccggcgaggaatatgccggttaaatagaaaggagatcattatgagcaaagaaagaaacattttcgtggagtgccgggagaccatcgagcagatcggcaaggccaacggcaaggagggcaaggcggcggccatgctggccgtggagatggcccggcgggtgcaggcgggacttgatatcaaagcatccacccagggcgtacataactttatgatctggtgcgggaatgtggcaaacttcaccgacgcccagctgaccgagcagatggaggaagtgcagtggtgaagcccacctattacaaaaacctgaccattgtgcccatcccgacggagaagatccgccgggtgggcattgtgaacctgggcggcctgaccatgggggaatggtacgcccggcaggaggacaagccggacgccatgatcaacggcagcctgtgggacagcaagggggccatcggcaccatctggaaagacggcaagcttcagagaaacgagggcggcggctttggcatcggagaagtgggaagcggctgggcctttggggaaccctgggagcagaaatgggaaaactacatcaccggcaccccggcgctgatccggggagggaaggctaccggcgaccatatgcccctgaagcgggatgaagtggccagcacccggcggagtgctgtgtgcggcgccggcctgtttctctatctggtgaccggccagggactgaccctcaagcagtttaccgagcagctccaggcctttgggatgtatcaggccctcaacctggacgggggcggctcttcccggctgatggtggacggcaaagccatcaatgcccccacggacaaccggagatgccccaatgcggtggcggtgtggctggtgaaagaatcggacacggaaacagaggacaaaaaggaagaggaaggagagagcaagatgaaaagtatctatctgagccccagcacccaggaaaacaatgtgggtgccggaagctacggcaccgaagagcgccgcatgaacgagatcatggatctcatcgaaaaccagctgcgggggaaatacatcctttaccgcaaccggccggaaatgagcctccagcaggtggtggcagattccaacgccaagaaccccgacctgcactttgccctgcacagcaacgctgggggcggcctggggacggagtgctggatctgcgccagaggcggcaaggcggagaaattcgccaacctgctctataaaaaggtgggcgcactgaccccgaccaaagaccggggcgtgaaggtttccaccagtctgaccgaggtgaacaagacacgcgccccggcggtaattctcgagatcgacttccacgacaacgcccaggcggcccagtggatcgtggacaataaggcggcggtggccgatgcctgcgtccaggccatcatggagtttttcggggacaccgtgccggaacagccggaagaaaagcccatggaaaagtggtatgcaaaggaactccaggaagcggtggccatgggcatcaccgacggcacccggcccgaagatgcctgtacccgggcggaagcggccatcatggtgctgcgggccaagaagggggaaaactgatatgatggaaagggcgaaggaggtcaaagcggtgttttctgggctttttgcggcggccaccgccgtgctggggtggttcggctggctggtggtgatctatgcggccagcatgggcattgattacatcaccggcagcgctttggcagcgaaagaaggagaatggaacagcgccaaggcccgggaaggactgtggcacaagatggggagcatcctggccgtgatcgtggcggccattgcagattttcttttgagagtggtgatcggcaatcttcccatcacgctgccttttacttatacggtgttcatctgcccggtggtgctggtgtggtacaccctcaccgagctggggagcattgtggagaatgtgggaggcatgggcgcaccggtgcccgccttcctcacccggattattgccgctctgcacgacagcgtggaggatgccggggacgcactgaccggagagaaaaaggagtgatctgtacatggcaacagcaatggggaccggggccgggaacccctaccaggatctgatcgacaaacagcagcggcagcagcagacggcccaaagcacccagcctgttgccagccagtatgcccagaatgtgagcggagccacacagcgtgccggcaatacgccggtgacagccagagccacgcctcaggcatctcccaggggaatcctgggaggattgggcggaatcatcggcggaattgttggaggaatcgccagcggcatcaccggagggggaagcaagccttcctcctccgggagcaccggcgggggcacaagcgggacacagcagagcagcccgtcccaaagcgtggggggagcggtggcaagcgtggggaatgccatcacacaaaaccggccgcaaagcacccagaccacatacattgacccaaacaaccagcagcagaccggctatatcataaacggtgtgacctacaaagacccatacgggcaaaaccgggtggatgtgggaagccgggtgcagaccggcggcggatggtatcagctgggggccgatggaaagggtgtggcaatatccaacccctatgcggggatgaccggcaacaccggaggaaccacccaagggacacagaactgggggacccagcaaaagccgctggccatgcaatattatgatgcccagggaaaaccccacattgggtacatgatcaacgggcagatgtgggctgatgaagcaggtactcagagaatcggaatcggaagccgggttcccactggcggcggatggtatcaaatgacggccaacggcggggtgaaaattcccgggtatacccagaccacatatgaagatgcctatggcaacaaacacattggatatatcggacaggacggcctgacctatacaaacccggtgacgggagaaagaatccccgttggtatgatcgtcaccacggcaaatggcaaatatgtgatgacggccaacggcggcgtgcccatcaccgatgcggagatcgaacagcagcgtcaaaacctgatgttccagcagatgcggcaggaagccatggacgccatcgatgcggccacagatgccggggtgctggcttatcagcaaatgctgccggggatcaatagccaatacgacacggcggcaaagcagctttacacaaacttcatgcaggagaatcaggcgatgccggagcagctggccaagatggggctgagcggccaggggatcagcgagagcacagcggccagcctggcaaacagctatcagggaaatctttctgccagcgagctggcccggcgggcggcaatccaggatgtgaacaaccagatcgccaatcttcgggcagaggccgaggcccagaaggcccagacagcctacgacctgagcggcgagcagttcagtgcatggcagtgggcccaggaattgcagaagcagatccagcaattccagcagcagcaggaatggaacaaatacacctgggaaaaggaatttggcatggcgcaaaacgatgccgattatcagcggcagctggcggtggctgaaatgctggcacagtacggtgatttctccggttataaggcgctgggcttcaacgatgctcagattgccgggatggggcaaaaatatctggaagatctggcggcacaatcttacgccgccctttcttccggcagaagttccgggcgatcctccggcggcagaagttccgggagccggaagagcggcagctcttccggaggaaagagccaggattacaccgggctgtttgaagcggccaaggcttccgggcgggctaagagttttattgccaacaattacaaatcctttggattcaccagcagcagcggtctttatgacgattatcaggtctggaacgggcagggcgatattttggacagcgccatcggcgccatcacccaggtgggcaatgcgggaagcaatgccgggtacagctttgccgaggatatggcggccattgaaagcggaaaggtgacctatgcgcagatcaagcgggaaaacctggacgatatctattatgacgcctacgggctggataaatacaagcagctggttcagcgtgccaaagagattgcgggagtataggaggaaatatggcatctgttgttgatctggcaaaaaagaaaaaatacaagtggaaagacgaagaaaatcagcgcaactatgagcgcagccagaaggaaaacctggagaaaaccgggggcgctgcccagcaggtggccaagacagcccaacgggtggccacaaaagcgcaggaaaaaagcagcacggggcaggggacaaccctgccccgtgccataggcaccaaaaagacataccaggggtactatgagaaaaagaccaacagccgggaagcggccaaggccagcgacacactaaaccggctgcgctccatgcgggaataccggcaaaatctgagccagcggatttattcccccaacgactacgaccaaaagcagatcgccgcaaaaggcgtggaagcctggcaaagagatatccagagccagcttgccaccctggacagccgtattctgggcatggagaaggagcagaagcaggcccaggaggaagccaaaaaacagcgggaaaatttcctttcggcgggatacaaaacggccacggggcaaaccgcccggcagcagagccttttgaaagaccagcaggcccggcagcagagtatggagaaagtgcggacggagatccaaaaccggatcaattatcccacacaaaaagacctggaagagatcgaccgggtgggcatggatgcctggaaagcagaaatgcagaaggatctggattacctgacccaggccctggaaaagaacaagcagacccagcaggaggccgggggcggagattatgccgccatccagcgggccaagcggcaggagctggaggatgtgcttctggcaccggatgcccggcagaccattgggcaggccggaacgaagagcgggaacactctgggcagtatcctggacgggacttttgatatgagacgggcggcccggtatctcacagaccctgagtttgccagcaaagcggtgcagggaacagacggaaaagtgggagaagatctggattttctcaccgaggatgaaaaaaacaccctgctttattacgccggaaaaggcgactggcaggcaatgaagcaatattatagcgtgatcgagcgagaccttcagcagcgacgccaggaagaaaccaaccggcagacggcggaatcggccaacaaaaacaaagtgggaggcgttgcggccaacattgcgggcagtttgctttctcctttggcgttgttggaaaccggaggccaggcaatcaaaaacgccatcaccggtgaaaatgaaccggtgaacacggcttcccctttgatggcgggggcacagctgcaacaggccacccaggagggcatcacccgggacatgggagccacgggacaattcctgaccaacaccggcctgagcatcggccaaaacctggtgcggcttccccttggtccggcagcagccctgggaagcatggcggcaagcgccggagggcagacggccctggataccgcagagcggggcggaagcgccggacaggccctgagcctggggcttttgtccggtgcggcggaagcattgaccgaaaaactgcccttggacaatattttccgcctggccaaagaaggggccgggggcggactgaaaaacgccgtgaaggcggtgctccggcaggccgggacggaagccggagaagaaacggtgagcgagattgccaacaccctggcagacaacattattatggccgaccaaagccagatggaggaaaccatccggcagctgatgaaccagcagggaatgagcgaacaggaagccagaagagccgccacgctgcaatatttcgtccaaaacccggcactggcagcggcagggggcgcactgtccggcggcatcttaggcgctggtgcccaggcttacaatgcgctgtctcctacacagagaagctaccggaaactgcaaaaggcggcggaacagctacggaaggtggagcaggaagcccaggaatatgaccagtggaagcaggaatgggccgcacgggatgccgagaccctggcacagcgggaagcggccatggagcagctgggacttgggaaaaaagcggagcaaccccttgcgcttccgggacggcgcttttacgcaagcccggaaggcgagatcacaacttatttgccggaacaggaagcacagccaacggactggggagtgcagactgcggatgaagcggcctatcagcttttgttggcgcagaaagccgtggagcagcaaatggagaagatgcgccctgggctgaacgaaaaaggacaacgcaaccaggcacagagccagctggggatcaatctggaagaacttcagcgaaatctggaaacggcccaatggtttgaagggctgagccaggaagaaaaagcaatcctgaccgggagaaacgagccgacctattccccggtgaattaccgccaggaactgagagcgccggagaagatcccggaaagaagacccaccccactgccggtgcggaaagcagaaccggcagcacaaagaaatgccatggaaagccaagaagcagcatggcaggaagaagagctggtgccttttgactttgaagccccgacacaagcacaggtacagcaaacagcacagaacacacaaagccagcaggtgcagcagctgaacccgctcttttccattgacgagagcggcaggcaggtggtcagcccggaaggggtgcagacgatccaggaactggggcagaagctggggagaagagtaacctggacggaggacgaaaacttcaacggaagctacgatcctcagaccggagaaatcaaaatctccaagtacaccaaaaacccggcgctttttgtgttcaagcacgagctgacccacagcctggaagggacggacgcttaccgggatctgcaaaagcatatcatgcaaagcccggaactgatgacctttgccaagagcctgggaggcaatgtttccatgctggcccgggccaaacagaaaagctaccaggccgcagggcaggagatcgacctggaccaggccatgcgggaagtggtggccgattatgtgggcagcaatctgttcaccgatgaaaagagcatccggcggctggcaagggaaaaacccaacattgcccagcgcatcttggggtggcttcaggacacctaccggaagatcaagggcggaaaggaagagcgctgggtggtgaaggccgagcagctctaccgccgggcgatccagcagagcaagaaggcgccggccaccggggaagccaccgaagaactttccatcggacaagagttttttgacgaatacaaaaccctgctggaacaatacggcccggagctgcggcaggaggacaatgctccagcaagcgagcagccttccccggccatgagcaaaaagggaaagaaattcatggagggcaacgaaaaaaagacggcggaaaagatcgcccaggccatggacattcccaagcaggccaagaaagacaggctgcttccggctattcggaagatgacggaggaaatcggagagaccgggaagatatcccaggagacggcggacgccgcttttgaggaagcatatcggagcggccttgtggtgctggatgatttctacaaaatctacaaagggctgcgggacgagctgcggacaacccggcttcagatctccgaaaaggaccgggcggacatcccggattttgaggacttccgcaaaagcaacatggggcggcttcagatcgtgagcaaagacggcatcccggtggacacgaagtatcaggagctgcggcagcgctaccctgagctgttcccggaggacatctatcatccgggagcacagctggaggccatcgccgatgtgcggaacaagatcgagaaaacagagctgagcctggaccaatactacggcccggatgccgaccggttcaaggcctacgcccgaaatgaatttgacaaggccctggacttcctgaaagaaggagccgggtatgtgaagcggtacgaagatgaccgactggaagccagaagaccggtgaagctggaagaaagcaccctggaagaggtgcgggcagcatacgagcaaaacaaaaaactgcaacgggcggcagaccgtgccacggccaaaaaccttctcaccaactttgacaagcggcaggtaaaccggctgctggccggggacatcatgccggacgagctcccccggggaacaaaccggaagggtgtgatggaggtttacgaagcaaagaaagcccaagaagataacatgaaggtggtgcggcaataccgggcacagctgaaagaaagccggatgcagcggggtctggatctgatcgaaggagccgaccggtggaaggacaaaaatgttggcttcaattactcccgggaaaccgccgagcggaatatgcgggacattatgagccggggagaggcggagaacatgattgccgcttacttccgcccggtgcataaagcccaggcggattccatccactatcaaaacagtctgcgggatcaagtgcgggcgctgaacatcagcacaaagccaaagtatcagatccaataccaggaccccaaccagggggacatgatggtggacgccaaggtttcggaaagcgccctggtgcagctgctgggagaaaagatcatcagcctggaccaggtgaaccaggcgggggccgatggggccaaaatccagaaggccgtgaacaccatgcgaacgatttacaaccagctttttgaggacatcaacaacaccctgatgcgcaacggctacacccctatggaaagccgaaaggactacttcccccacttcacagaccagggcgggggaacctttgtggaaaaggccatgaactttctgggcttggggaaggtggacgagctgcccaccgacattgcaggcatgacccacaccttccgaccggggaaaaagtggtttggcaatatgctgcggcgaaagggcggggccacggattatgacgccatcaaaggctttgaccggtacctgaacggggccgccgatgtgatctatcagacggacaacattcagaatctgcgcacacttgaaaacgccatccgctacaaatacagcgacaagggcacgaaggaagaaattgaagccctgcgggaaagccgggacattggggatgagacaagagaaatgatgatccaggggctgctggagcgggacaaccagcatctgccccagatggtcacatggctgcggaattacaccgacattctggcggggaaaaagcatccttccgaccggtccatggaacatgatttcgggcgaagggcgtataatgtttctaaaaagctggagggaaggatcgccgccaacatggtggccatcagcccgggaagctggctgaccaacttcgtgcccctgacccaggccatggggcaggtgagcaaggtcaatctggttcgggccatgtatgacacggtgcgaagcaatgcggtgagcgacggctttgccgaagcgtccacattcctcacaaaccggcggggcgtggatcccctttacaaaagcaccatcgaaagagcgaccgacatagcatcccgtcccatgtactacatcgacaactttacagcggggacgatcacccgggccaagtattacgacaacctgcagaagggcatgagcgaagaagcggcactggagcaggcagacgaatgggccgccgggttgatgggcgaccggagcaagggcgccgtgcctacacttttcgaaaagaaaaacccaatagccaagagcctgaccatgttccagctggaagtaaacaatcagctttcctttttattcaaggacattcccagagaagagagggaaaagggagcgctgatcctgggggcaaagctgctggagatcttcatcggggcaaagctttttgacgatgccctggagaagatcgccggacggcgggcggcgctggacccgctggagatcatcaacgacctgacgggggacatcaccgggaaaaaggtgaacaatgtgtttgacatcctgggcggggaaggaatcttggaggaaaaagaaccggaggaattttcccaggtggcggcaaacctttggagcaacctggccgaccagacccctttcatcggcggcctgatcggcggcgaaggcggcagattgcctgttgccagcgccttgccggatttcggggaactgggaaagctgctggacggcgatgtgagcggagagaagaagcagcagattctaaaggatgaacttctttggaaaacgggaatgtatcttcttcctccggcaggcggcacgcagttcaagcgggtgagagatgcttataatctgctgacccagcaaggaaattacaagctgaacgacgaaggggaaaaacagctgaggtatctggcaacggacgacacgcccaccagattgcggtctacactgttcggccagtattccaccgaagaaggccaggaatacattgacaaaggcttccccatgctgggcgtaaagaaaacccagatcgtggacgatgcggaaagccagggcattgaccggtatctggccaaagagatcatggacgatgcttccgattttgaaaaatcgtgggatttccggcggtatctgctggcccgggacgatctgacgccggagcaaaagaagtggatcgacaaaaggctttttgacaattccaaggtgtgggaacggattgactactccggggatgaagcactgatggagatgacgggaaaaaacaaggcgaccaatgaaagggtgaaagaagccgttgatgccgacatcgatgccgctatctatcaaagagcctatgaagcccaaaagggtatcaaaagcgataaagacaaatacggcgagaccatccccctgagccgggacgagaagcggaaggaagcggtggaagaggccgtgggtgatgagctgacaccggctgaactgaagaagctgtatgatatcctggatatcagcaaaaaagtgaggtgataaaaacacttttttaaagtcgattgtgaaaaaagcacataatatggtaaaatgtgcttaaaggatggtgatttgatgtgcggaaaaaatgaacaacacaaagatgtggaaccgttggcctctgaaatgtatgctgatctgaagcgacacactttttttctgaagattttggtcgctgtgctgctggccggactgattggaacaaatttatggcacatttaccaatggagccaatttgacacaatcgttgtggacagcggcgatggtgaaggaaatgcaaattatgtgcagggtgacaattcgggaggaatttacaatggcgaaggtagtggtcaggcgccggaagaaaggtaagagcaagggcgtccgggtcaaaaagaagtgaatttgagaaaagaattcacagaaccggagtgtgaatggtttcggaaggtgtgtaattttacaccagacgaaatggcggtttttgatcttcgagtaaaagaccattcaagagtggaaatttcaatggctttgaaaatgtcagaatcttcagtggatcgaagaatcaaaaacattaaacaaaaaatacacaaagttttgtgacagctttttgacagtttaaagatggatttttgaggagtaaccgacaggttactcctctttttttatgcgaatatttaagtgaagaaaacagaaagagcattgctctaaaaaagaaaggatgtgtacacaaatggcagaatttgcgagcagaggacagggaaatctgaacactgtactgggcaccatcggcaccgtgggcgctgttggcggcatgctgggcggctgcaatggcggcatccttggcaacctgtggggcggaaaccggggttgctgcgaaggagatcagctggtaaaccggtatgaatccacgctcatgatgcagaatgcagccaaggacagcgaaaatgcgctgctgcgctcccagatttacacggacggcaagctggtggagatggtgaaggactacaccgcccagatcagcaacctggcggcagaggtgcgggccaataaggacgagcagggccagatcaacctgcagcaggccgtttataacggcaccaacaccgcaaccatcagctgcatccagcagcagatcgccgctctgcagagcctgacaaaactggttgtgcccaacaccagcgtttgccccggttggggtaatgtgaccatcacaccggccggggccaccacgaccccggcggcctgaagcctgatggcggcaagggcatttgaagcagaagcggaaacgcctaagcggaaaagaaaaaaggggaaggcatagcaccttcccctttctttataaaaaaggaggagcttatggtaacaatgcagcaggcccagcaagggcttttgaaatacatcgacatggaaatcatgccccatctgaccgggctgaaaaagataggccttggcgcttatgtggcgctggcggcgaagaacaccaccgggatcgtggaaaaatataaaagccatcctgcggtggaagtgctgggcgtgatcgacaaggaaaacaatgtggatattgataaactgtatcaggcaacagcacccatgttcgccgatgggcaaaaggtcaatataaacattcctttgattggagaactccgcctggacagggaggacatcgaaaaactttacagatacatgagggaggggcaatagaatgcgggaaattaaaatgctggtgaaagacccggagctgggagcatgaaaagatgatggacaccctggcccgggtgaaaatgatgctggaggtttaccggcagcactgagactttgttagtaatttgttagtaacccaaaaaggctttaatgtgttttagtgtgtttttgtttttgaaagcaaccaaaaacacattaaaaaccgttaaaacacattaaaaaagaaatgaaaaaatgatactggtgtttgacgtgcagggggtcaggggttcaagtcccttagcgtccaccataaaaaagacacgctgtatagcgtgtctttttgttttttcgaaaagagaaaatggaataatttcaggaatcttcctttgcagtccttgggctatggcgcccaagggcttttttgatttgttagtaatgcgttagtaacaggggaacaagtttgctttttcacagcggatgtaaaaagaaaaattcgacagttttccccatatttgctatgataggaatatctttaaaaataaaggaggaaatgagatgggcgctttttccggagccacggagtttttcaggatgccgctgtctcagctggcccggcgttataggtatgcagaggataacatctgtattctggagggggatctgcaaaagctgcgggagcagttttcagagacctatgacaatctctgttcctgtacccaccaggctgatcaacgcagccctttgaaatacggccaggacctggtggcctcctggctggtggaggatgtgttccttcgggtgttctgggccgccggtctggacgccagtctggatggggccgaccagggccggaaggtattgagcaatgtgaaaacttcctcttccagcgatttctccattagctgtgaaggatatcgccgaaagctggagctgatgaacgattataccggcttttgggccagaagccacaaaatgcatttacgggacaacaaatatttgaaaatgcagcgggaacaatctctttttttggccgtttccatggctaccagagagtttgctcttttggatttcacagaagagatcccggcccgcctgatccctcatcacattccttatgggaacaaaccggcctatgaactgtccctgccttcctcgctgctgcgtaccgctacttcggccgccatcggtcaggccgtgaaggcgcgcttccatgcttgacagcctgatttgattatgatatgattttgatatcataaagagagagggtgtttttcatggaagaaaagatcctgaaaaattgcagaaaaggaatgcctgtattgcttttggtgctgctgagctatgtggcggccatcggtttgtgtatcctgggggccatttggacggaagaaggggtgctggcgggcggtttggtgctggctctttccattgcgtggctcagcctgggatggatctttctttgcggactgaaggtcattaagccgcaggaagctttggtgctcacattgttcggcaaatatgtgggtaccctccggggagaaggattttactatgtgaaccccttctgcaccggggtgaatccagcagccaaaacccggctgaaacagagcggggatgtggacggccaaagcaacggcgctctggcggcggccgctgtggccgcggccggtgcagaagcagccgggaaaaagatctccctgaagatcatgacgctgaacaacaaccggcagaagatcaacgattgcctgggcaatccggtggaaatcggcatcgccgtcatgtggcgggtcaccgataccgccaaagcggtgttcaatgtggacaactacaaggaatatctgtccctccagtgtgacagcgctctgcggaacatcgtgcggatctatccctatgatgtggcgccgggagtggataccaccggcgacggtgtggccgatgagggcagcctgcggggctccagcgaagtggtggcccagcgcatcaaggaggagatccagagcaaggtgtctgacgctgggctggaggtcatcgaggcccggatcacctatctggcctatgcgccggagatcgccgcagtaatgctccagcgtcagcaggccagcgccatcatcgatgcccggaagatgatcgtggacggcgcggtaggcatggtggaaatggccttggagcggctgggggaaaaccatgtggtgcagctggatgaagaacggaaagctgccatggtttccaaccttctggtagtgctctgcggcaaccgggatgcccagccggtggtcaattccggcagcttgtattaaatcatggccgaagagaaaaagcaggttcccctgcgcctgtcccccaagctctatgccgccattgccgcctgggccgaggaggatttccgctcggtgaacggacagatcgagtatctcctcactgaatgcgtccgccagcggaaaaaggacggcaaatatgtgccggagaagctggatgaacctccaaaactggatttgtaaacaaaggacgggagcacttggcttcccgtcctttttcttgacatcgttttgcaaaatcggtacaataattgatagtgtaaacaccccgttctgaaaagaaaatactggaaaacagaaacgggtggaggacggtgataagatgtatcatattgcggtttgcgacgacaatcaggaagaagcacatcttatcggccgtatgacccaggagatcatggcccagcgggagatcgaagcgcaggtggatctgtttttcgacccggaaagcctgctggacaagctgcagcagacgcagatccaatacgacctttttttgctggatatcctgatggaagaacgcaacggcatccagttggcccaggctttgcggcaaagagggtatcggggcaaactgatttatatcaccgtcagccgggattatgccatcgacggctacaaggtcaaagccgatgactacttgctcaagccggtggaaaaggacacattggatcaggccattggccgggtgctgccccgcctggagaccgttttgctggaaaccaccggaggcatgaagattctccagctgcagcagattctctatgccgagtccacagggcattatgtgctcatccagttgggggacaagggagaacccttgtgtttgcgggccacattgcttcaggtccagcaaaagctgggggcagaaaaatttgtccggtgtcacaaagggtatctggtgaacctggcccaggtgcaggaagtgcgggtgagcaccagccagatcctgctccatgggggcgatgccatcccactggggcggcaatatcgttatgaagtgcagaaagctgttgtgcagtatgtggaacaggccatttcttcttattgagaagaaatggcctgttttttgttatgcttctgcttgagaggggccttcctgaaaatagaggtaagacttcacatggaacagattgtcctgggtttcgatgatgagcacactgttgtattgctcggccacccggcgcatggctttgatgccctggccatggccttcgtggcgccggggagaaaggggatcgccctgttcatcccgctggagatcgccggagaaactgttggtacagctgacgaaaaggccggcattttcgaaaatctccactttcagtcggatgctgcgttcctggggatcgggcagggccgccacagcgtgcagggcgttgtcgatcatattggacaaaagcacggccaggtcggcatcaacaatgccgatgtgttgaggaacctgcaccgaggcctggaaagaagcatccagtttctgggcttggatctggcaataggacaccagggcgttgatgaggggatggtcggtataccgaccgggggcctggcggatctgtccggtgaaatgctccacatattgctgcacccgctggagatccccctcctggcataaggccgacagggcgttcatatggtgaaggatctcatggcgcatggcataggtttcgtccagggaacggcgaaggtaggcagcgtgttccgaggcatagtggttctgcaccgtcagaagctgcaattcgctgttccggcgcaccacgctttgcacaaagtcatacaccgccagcaggaagaaaagaagcagcagaagatggttcaccaaacgggccagatagaaaaagctgcggagcatcgccaaaggcgaggactatgatgaaaccaagggcaatgtggccagcgtggtgggagacagcttgtcggtaacaggggatgtgctgggattggctgccgacagccgtacggccaaagtgcagcatgaacaggatgtccgtgccaagcagaatatgaaaaacctgggcacccagcttcagagcaccattcacggggataccggccgcagcgaagtgcttcaaatggtatgtgaacggctgaaagcagagagattcaacgccaaacggcagaagttcaggatgttggatctgatcgatgcggctctggatggccgccatccctctacgccccgtaccagaaacggagggaatcaggggaaccaggccaaccaggggaaccaggccaaccaggggaaccaggccaaccaggggaatcaggccaaccagtccaaccaggcaaaccagggaaatcagacgagccaaccaaaccagccggcagtggattacgccaaacc

SEQ ID NO: 861 - DNA, 4442 bp, Unknown
  16S sequences of unknown bacteria
aaatgcttgtatctggcaggagtggaatgtgttgataatgcagaagcaccggctggatggacaaaatggataataccaggttatgagtatatagttgttgaaaaccataatggagcgtttgaagataccattaaacaaatgaatgaggaaggtatgtcgctggtcggagcagttcacgactataccgatccagcaacgggaaagggttatatgtattttccgataagagaaatttaataaatttgtatttgtatactgtcatagatgaaaacgagtgatttttacgggaagggtgcccctttccactgcttgctacgggatttttcgcaaaggaacagaaaggaaatgataatctcaaggcagggtcttttctttgatatattgcgcagctaaatggcgttttcagggggacatgtataagcattttaccccatcggttttattgccggtactgtttttatggcaaggtttttgaacttcgaatgcgtaaccataatggtgtacaaagttatcctaaattgcctttgcaggcgtgattgcatccctgtgcctgttctgtatcatcttagctgtagtgttaaaatggtatccaactctacaaaaccaacctatacggcgatgtgagaaggtacaagcggaaatgggaaaacggttgaaaatgcaggcagtttccgcacctcaataaaactcgcaagatgttataagacaatttccgtctatacaatccataaaaaatagccgcaggctgtttttaggctttgcgggacgtccccggcccgcggtcagtaagataagctttttattgcggagcaataaaaaggccgcgggaaagggcccgcggcagaggaaacaaaaagaaacggaggaacggctgtatgatggtgtccaccaaggggcgctatgcgctgcgtgttatgatcgacctggccgagcaccaggcagagggatatatccctctcaaagctattgcccggcgtcaggatatctcggaaaaatatctggagagcattctcaaaagtctggtgcagagccagtttctgacaggcgtgcgcggaaagggcgggggctaccggctgacaaggccgcccgagcagtataccgtgggaagcattctgcggcttacggagggcagcctggcccccgtggcctgcctggaacaggagccggtggaatgtccgcgcagggccgaatgccgcacgctgcccatgtggcggaagctgaacgcgctggtgcaggattatctggacggcgtcacgctggcagatctgacggccgaggcccagtccgccgaccattatgtgatttgacccggctccgttcaggcatagcggtattttcccctttttcgccacagaaaccaggcgctcaccgccagagccagaagttcggccacaacgatggcgagccagatgccgtccgtccccatgagagcgggcagcaccagaaccacggctgtctggaacaccagcgtgcgcaggaacgagataacggcggaaacaaagccgtcgttcagcgctgtaaagaagccggagctgaaaatgttgaagcctgtgagcaggaacgaaagcgaatacaaacgaaagccgcggcaggtcatcgcaagcagcgccgcatcatagcccacgaatatctttgtcagcggaagagccagtgcctcggcagctgcagtcagtgccactccggccgcgcccaccagcagcaggcttttgcggaacaggcttttcagctccatgctgttccccgctccatgatggtatcccaccacgggcgcgctgccgatggaataaccgatgaaaatggcaatgaaaataaagttgacgtacatgatgacgccataggcggcaatgccgtcctcccccgccagctgcatgagctgaaaattgtacagcactgtcaccagtgaagaagagaggttggtcatcagctccgacgagccattggtgcaggctttcagcaatgcacggctgtccagcttcgtttttccaagccgcaaaaggctgcggttgggccgggcaaaatacagcagcggtacgccgccgcccacaaactggctggcggccgtggcaatggcagcgcccgccacgccccagcggaacacggcgatgaacaaaaagtccagtatgatattggtaagccccgcggccacggtaacgcccaggccaaaatggggcttttctgctgtgatgagaaagctctggaacacattttgcagcatgaacatcgtctggcccgccagcaggattccgccgtaaacgacgcagtcctccagcatggcaccctgtgcgcccaaaagcacggcgatggggcgcaggaacagcagccccagcacggaaaaaacgatgcctccgccgatggtcacatagacaagcatggaaaagtaacgctgggcccggccgctgtccccttcaccaagggtacgggccacaagagcgctgccgccggtgccgatcatgaagccaagcgcgcccaggatcatcagcagagggaaaatcaggttcacggccgcaaaagccgttttgcccacaaaattgctcacaaacaggccgtccacaacgccgtaaacggaggtaaagatcatcatgacgatggacggcgccacaaagcgcagcagctttcccgtggtgaagtggtcggataattggatcttcatagtatgctactccttgaaacggttgggataaatgtgccgcgcgcatgtccgcgcggcagaaaaattgcgcccggatttccaaaaccgagcgcactcgtcatcttctccggctgtatggctgcggccatacgccctccgatgggatatggaaatttacaggatgcgtccggcctctgcccgcaggcgggcaagataggcgtgcgtcagacgcagaagggcctgctggtcctcctgcggcatgccggaaaacgcgcgttcctccatggcggccacaggggcggctttttcttccaccagcctgcggccctccggcgtcaggcagatgtgcatgtctctgccccgtccgggctgaagatacagatagccatcctgttccagcctgcggatggaggaattgatggtctgcttgctgatgtaggacagatcgcagatatcccgctgcaggcagccgtcgcccagaagataaagcgcatacagaatgatggaggcgctgtcggaaagcccctgccgcagtgcaagattgtggtaaagatcgtccagctctttgtaaagccggttgaattcccgtattccggggccctgtcccatatgcatgcctcccatatccgatttcggactcaatgcgtttattatagtccgatttcatacttaagtcaaggctctcaagcaaaaagggataaaaacagtcggcgcagctactattttttacgcgcatccgggcactttgtgcccgggcgcctgagatcttaaggccgtgggacggagggcccacatggccgctttttatagcttgctgtgcaaagctataaaaaagcagccggccggaagatccggccggctgttctggcgcagcgggagggattcgaaccctcgtgcgattgctcgcaaactgatttcgagtcagccccgttatgaccacttcgataccgctgcaaatgctgcgctgcaaataaatctgctcacagcccaattattataccaaaaaggccgatggcagtcaatgcttacgcgcggctttgcaacggttgtgtgtcaggcatacgcccggggcagcacatacagcaaaatacacagataatgcagaacactgcccagcagcacgaacaggtgccatacgccgtgcatgtaatgcacacgcccttttttatgccaggcgtagaatacgatgccgcccgtatagcttacgcctcccagcagcagaagccagaatccggcggacggcagtgcgcgtaccacatcccccactgcaaatacaacggcccatcccatggcgatgtacagcagcatggagaacttttcaaaccgctccacactgacggcattgagagtgacgcccagaagggcggcggcccacactacgccgcagatgaccgggcccttccaggtgccgtccaaaaggataagcgtgaacggcgtataactgcccgcaatgagcaggtaaatggatgagtggtcgaacacgcgaaacaggcgtttcacgccctcgaacgggaatgcatggtacagagtgctcatggtatataaaaccaccagtgaaagcccgtatacaaggcagatgagcactgtccgccaattggccaaagcagcggccagcgccacaagcgccccggtgcccccgatggccagcacactgcccgctccgtggctgaccgcattgaagatctcctcgccttttgtgtagaacccggctgggttttgcttttgatgcatcgcgacagctcccctcttgtgtgaatattattatacgctgtttttaatataaaataaagaggttttagaaaatatataatat

SEQ ID NO: 862 - DNA, 32759 bp, Unknown
  16S sequences of unknown bacteria
atcgtgtatattgccgacggcgaggtgctcgccgcgggggcgattggggaacttttggcaaaatacgaagtcgcttgttttgccgaaatgccgaaggagcaagtcgtcggattgaaagaagtcaaaaacggatacgaagggctgatcgccgcgggcgcgccctctgactgcgcggcgcgccgccccgccgatctcgacgcgctgatgatccatctggaaaccgcgcgcaaaaaggagaaagaatgtccgcactcttaaaaaaagaattttcgctcgccctgcaccctgcatccgcgctgttcgtgttttttgcggcgatggtgtttattcccaactatccttatgaagtcatgtttttcttttcggggctttcggcgttcttcatctgcctgacggggcgcgaaaacaaagatctgcctttttcctgcgttttgcccgtcgaaaagcgcgacgtagccgccgcgcgcgtgctcttctgcatgatattgcaattggcgcaaatcgttttgtgcgtgcccttcatcgcgatcaagagcgcgtggatcaatatgccgaatctggcgggcatggaggcgaacgccgcttttctcgggttcgggctcatgatgctcggcggtttcaacctgatctttttcccgctctatttcaaaaacccgaataaagtgggtaagccgttcgcgttcggtgcggtgttcattttcctcgccgtcgccgcagtcaccgtgtgctgccagatcgcgcctctgttcaaggacgtgctcgacacgcgcgacccgttgcatttcggcgcgaaagccgtcgttttcgcgattggcgcggcggtttacgccgccgcttcgttcctctccgtaaaactctcgcaaagaaattttgaaaaggcggacttataatcatagggggatatcgcttgaaaaggcgcggaatttattccgcgccttgttcgtcgtcctttaagatcatcgcgatactctctatttgtttcgccatattccgcaaagtgcgctcgatggcttctttccgttcccgttcgcgtatttctatcggttcccaatgctcgcagacgatattatattttttccgtttgtcccgcgctttcgcgagaggattcgtgcagtgcccgcaaaacaccttagtaaaataagtgttgcttttggcgtaatgctgtaaataatatcggcagttttcgcaattttgttcggttttgttatttttcatgataaaaatctcctgtgtaacaattataaccgtaatttttacggttgtcaagactttcacgtatattttacggtataatgatgccatggatatttttacaacaaaactcaaagatgctcgaaagttaagcgggaaaactcaaaaacaacttgcggaagcaatcggcacaaccgatgatagtatttattcgtgggaaaggggacgaagtcaaccttcaatcgaatatcttcgggcattatgtcgagttcttgaggtaacggcagattatttaatcggcttagaggatgaggacgacacgggaacaaaaatcaatcaatgaaagacgcggctgccgccgcgtctttcattttgccatatttcgggcggggcggaagaagggaaaagcattgacaaaaggggcggtttcgggatataataatgacggtatctatgcgggcgcgtcccgctttcaaaagaaataatcgaaaggggttttacgttatggtcgtgaaagtatgcgtgggcagttcctgccatttgagagggtcttacgacgtgatcgaggaattcaaacgcctcgtcaaaaaatacggcgtggaggacgaagtggatctgcaggcgactttctgcgtcgggaactgcatgaacggcgtcagcgtcatttccgacggcgttttagtgcataatgccaataaggacaacgcggaggaactgtttctgaccgaagtcgtgtcgcgcctcaaaaaataggagaaaaagtatgtacgggtatctcgatttcaaaaacgcgcgctgcaaggactgctacaaatgtctgcgcgaatgccccgtcaaggcgatcaaggtcgtagaccatcaggcaaaaatcatagagagccgctgtatcctttgcgggcgctgtaccgaagtatgcccgcagaacgccaagagcgtgcataccgaacgcgcggaggtcgaagcgctcttaaaaaagggcaaagtcatcgccagcgtggcgccttcctttgtttcttccttcaacttacaggaattttcggtgatgaaactcgcgctcaaaaagttaggctttttcgacgcggaagaaacttccgtcggcgcgcgcgaagtcacgtatcagtataaaaaactgctcgaaggcggcaaattcaaaaactttatcacttcctgctgtcctgcggtcaacagcatgatcgaattgtactatcccgaggcgctttgctatctcgcgcccgtcgattcgcccatggtcgcgcacgcgaaaatgctcaaaaagcgctttcccgatgcggacatcgtctttatagggccgtgcatcgccaaaaagaaagaggcgaaacacagcggcgtggtggacggcgtgcttacgttcgaagatctgaacgctatgttcgaaaccgcggacatagaccttgcgacgctcgcccgtctgcccgaattttgcggcggcggcgccaaccgcgccaaattttatcccatcagccgcggcgtcatcaaatcgttcgagcactatatcgacggctacgaattcgtggctgtggacggcgcgaaaaaatgcgccgaagttctggaaaatatcgagagcctttcgggtatgttcatcgaaatgaattcctgcgaatcggcgtgcgtcaacggtccgtgttcgctggggctgaaagcgggcgcgatcaaagccaacgcggatatccgccgatacgtgcaaaaagatatttccgcgcgcgtttccgaagagttcgtgccctcggatctcgacttcacgcacgtgcatacgaggcggaagagcgaagattttattcccacccagcgggaaattaccgaaattctcgaaaaaacgggcaaattcaagcccgaagatatgctcaactgcggcgcctgcggctacgatacctgttacgaaaaggcgtgggcggtcgccaacggctacgccaatatcgaaatgtgcgtgcccttcatgcgcgaacgcgccgagagcatgtcctacgagatcatacagaccagccccaacggcatcgtgcttttggacaacgatctcaacgtcgtgcagatcaacgccaaggcgaaagaacttttgggcatcagggaatacgacgtcaaggggcagggcatatttcattatttcaaccccaccgatttcgtgctcgcgcagaacgacaacaggaatctctacaacaaaaaagtctatctcgaaaagacggacgcctacatcgaactgaccatcatcgttctcaaagataaacagggcacgtacgcggtaatgaaagatattacggcggaaacgaacgccgcgaaacatctcgacaaggtgaagatggaaacgctgaccaccaccgacgaggtcatcaaaaagcagatgcgcgtggcgcaggagatcgcgtcgctcctcggcgagacgaccgccgagaccaaggtggcgcttttaaaactcaaaaagactttacaggaaaatacggaggaaaagtaatggctctgtgtctggaaacagggtacacttccctcaataaaacgagcgaggaactgtgcggcgaccgcgtggagtgcgccgtctgcggcgactacaccacgctggttctggcggacgggctgggaagcggcgtcaaggcgaatatcctctccacgctcacctccaagatcctgtgcactatggtcagcaacgacgtggagatcgaggactgcgtggagaccatactgcaatctttgcccgtatgcaaggtgcgcggcgtcgcctattccacgttttcggtcattcacgtcaacggcaaaggcgagggggtgctgttcgaattcgacaatccgcaggcgatcctcatccgcggcgaaaagtgttccgatttgccgcgcgaggcgatgaacattctcggcaagaccgtctataaaagcccgctcgcccttcaaaaggacgacgtgatcgtggtgatgagcgacggggtgatccacgcgggcatcggcatgacgctcaatctcggctggcagcgccccgaggtcaaagactttctcgacagaacggtgaaaaagggcatgagcgcgcgcgccgtcgcctgtcttttggcgggcgtgtgcaacgacttgtatctggataagccgggcgacgatacgacggtggctgcggtgcgcattcgcgaggcgctcaacgtgaatatcatggtcggcccgcccgtggacaaggaaaaagacgatttttatatcgcccgctttttgtcgggcgaagggaaaaaggtggtctgcggcggcacgagttcgcagatcgtggcgcgccatttaaagacggaagtgcgcgcgagtttcgattttcccgacaaggacgttccgcccatcggctatatcgagggcatcgacctcaccaccgagggcgttctcactctgcgcaggctcttggaactttcggaaaaatacctgtcggtcagcgatctgacgcccaagaggtattccaaaaaggacggcgcgtcgctcttggcgaacgtgctgttcgaagaggcgacgagcgtgcattttttcgtggggcagagcatcaacgcggcgcatcaggggctgcccatcgacatcaccatgaagttgaaattggtagagtcgctcgccgcaaacctgaaaaaaatgggaaaaaccgtggcggtcgattatgattgaggagttaagaatatgagaattttcgatacgagcgtacaaaaactcaaatatctggttttaaaggcgctcatcaaaaacgaatacgaacattgttacgataacgtctacatagatatccccaaagagatctctccgggacccaaggcggaaatgcgctgttgtatctataaggagcgcgccatcgtgcaggaacgtatcaaactggcgctcggcggcaataaaaacaatcccaacgtggtggaagtcatcgacatcgcctgcgacgaatgtcccatcgggggcgtgttcgtcacgccgtcctgccgcggctgtatcgtacaccgctgtaaggaggcttgcccgaaggacgccattcagatcatcgacagaaaggcggtcatcgacaagagcaagtgcatcgaatgcgggaaatgcacgcaggcgtgcccgtacagcgccatcatcgcgcaaaagcggccgtgcgtcacttcctgcaaggtcaaggcgatcaacgtggacgaaaacaaaaaggcgcgcatcgacaacgacaagtgcatttcctgcggcgcgtgcgtctatcaatgccccttcggcgccatcgtcgataaatccatgatcatggagtccatcgacattctgaaaaaatccgaaaacaaccgaaaatacaacgtgtacgcggtcatcgcgccctccatcgtcagccagttcaaatacgccaaaatagagcaggtcgtcacgggcatccgcaaactcggtttccaccaggtggtcgaagcggcgctcggcgcggacatcacgctgtaccacgaggcgcgggaatggaaggaaaagggcgttctgacgacctcgtgctgtccgtcgttcgtactgttcgtggagaaaaatttccccgatctgaaaaaatacgtatcgagttcggtttcgcccatggtggagaccgccatgctcatcaagcgcaccgacccgacgggaaaagtcatttttatcgggccttgcgccagcaaaaaactcgaatacaaacaggaaaagaccaagggcgcgatcgacagcgttctgtcctttgaggagttgcaggcgtttctggacgcgcgcgacatcgaagtgggcgcgctcgaggagaccgcgctggacaacgcctctttctacggccgtatcttcgccaagagcggcggcattgcgcagggcgtagccgacgttgcggcgggcatgggcgtcgagggcatcaagcccgttgccatgaacggcatcgacgaatgccgcgcgaatctcctgaaactgaaaatgggccgcgcggcggaaaactttttcgagggaatggcgtgcgacggcgggtgcctgaacggcgcgctctgtctcaatcacggtccgaaaaacgtggtggacgtcgataaatacggcgcgtccgccaaggaaaaggatatcgaaaattccgtcaaactgtataaactgagtttgaaggaagaagaaaactgaaatcagcagggggacgccgcaagcgtcccctcgctttacggtgggagtatatgatctctaaatttttcgcgtatttcaaaccgcataaaaaattatttatcatcgatcttgtcagttcgttcctcattgcggtgtgcaatctcttttatccctttgtcacgcgcgtgatcatcaacgatttcgtgccgaacaaacttttaacgctcatgctcgtatggggcggggcgctccttttggtgtacgccgtcaaggcagcgctcacttttatcgtcaattactgggggcacgtcctcggcgtgcgcatccaggcggatatgcgccgtaaacttttccgccacgtggaaacgctgcctttttcctttttcgacgaaaacaggacgggcaccatcatgtcgcgcatcgtcaacgacctgttcgaagtgtcggaactgtgtcaccacggccccgaggatacgctcatgtcggtcatcagcatcgtgggagcgatcgtcatgctggcgctcatcaacggctggctggcgctcatcgtggttgtgttcgtgccgctgatggtgctgttcgccgtcaaaatgcgggggcgcatgctcgacgccttcgaaaagagccgcgaaaagatcgcggaagtcaacgcgagcatcgaatcttccgtttcgggcatccgcgtttccaaagcgtacaccgcgagccgcaaagaggacgaaaagttcgataagagtaacgaggagttcaaagccgcccgtaccgccgcctacaagaacatgggcattttccagagcggtatgagcctgttcaacgatattctataccttgtcgccatcgtgggcggcggcgtgctgttctatttcggcatcgtcgaaaacccgggcgattacgcggctttcattctctacgtcaccatgctcttgacgcccatccgcacgctcgtcaatctgttcgagcagatcaccgacgggctggcgggtttcaagcgctttcaaaacattttagacaaagagcccgaaagcgagcccgagcatcccgtggaagtatctcttctgcgcggcgatatctgtttcgaacacgtggattttgcctataaggacagcgagaaccgcgaaaatcacgtgctggaagatctgtctttcaccatcgatgaaggcaaaacggtggcgctggtcggctcttccggcggcggcaagacgaccatctgccatctcattccccgcttttacgaactggacggcggcagaatcaccgtgggcggcatcgatatccgcgacgtcaggcgcgaaacgctgcgaaagagcatcggcatcgtcgcgcaggacgtgttcctgtacggcggcaccatccgcgacaacatcgcctacggcgatctggacgcgggcgacgaggatatcgtgcgcgcggcgaaactcgccaatatccacgaattcatcgaaacgctgcccgacggctacgatacgcaggtcggggagcgcggcgtcaaactttcgggcgggcagaaacagcgcgtttccatcgcacgcgcctttttgaagaatccgccgattctcatcctcgacgaggcgacgagcgcgctcgacaacgtgacggaaatgcagatacaggattctctggaaaaactttccgaagggagaacgtgcatcgtggtagcgcaccgcctttccaccgtgcaaaacgccgacgagatcatcgtcctttccgaggggaagatccgagagcgcggcacgcacgcgcagcttttggcgcaaggcggggagtacgccgccctgtactataaaacgttccgctcttaaaggagtttgaaaaacgtcggggaaaaatgcgttcttcgtttgcaaattcgcgcggactatgatagaatatacaagatgatatttatttgaggtttgcagatgaaaaagggcttcgacaacgagttatacgtaaaattgcaaagtgagaagattttggaacgcattcagaagttcggaggcaaactctatctggaattcgggggcaaacttttcgacgatctgcacgcttaccgcgtgatgcccggattcgagatggacgcgaagtgcaagatcttattgcagctcaaagaccagtcggagatcattttcgtcatcagcgcggcggatatcgaacgcaacaaaatacgcgccgacttcggcattccttacggggcggacgttttaaggttagtggataagatccgcgcgttggggcttttgatcaacagcatcgtcgtcacccaatacacaaaccagcccgccgcggacaactttatcaacaaactgcaccgccacggcatcaagacgtatatccatcacaagaccaagggctatcccacgcaggtggacgtcatcgtctccgacgagggctacggcgccaacccttatatcgaaaccacgcgcccgctcgtcgtcgtcaccgcgccggggccggggagcggcaaactcgccacctgtctttcgcagttgtatcacgaatacaagcgcggcgtcagggcgggttatgcaaaattcgaaacctttcccgtatggagccttcccttgcgccaccccgtcaacgtggcgtacgaggcggcgacggcggatctcggggatatcaatatgatcgatccctatcatctggaaacgtacggcgtgaccaccgtcaattacaaccgcgacgtggaatgtttccccatcgtgcgctccattctgaccaagatcacgggcgacgaaaatctgtactgttcgccgaccgatatgggcgtcaacatggcgggattcgccgtctgcgacgacgaagtgaccagaagagcggcgcggcaggagatcatccgccgctactacaaggcggcgtgcgactataagagcggcaattccgacgaggccgcgttgcagcgcatccaacttctgatgaacgaaaacaaaatttccgtggacgaacgcaccatcgtgcgggcggctctggaaaaggcggaaaagtgcaattcgcacgcggtcgccattcaactggaagacggcaggatcgtgacgggcaaatcgagcaaactgatgagcgcgtgttcgggcgcggttttaaacgcggtcaaacttttatcagatttgagcgacgatatccttcttctttcgcccatcgtgctcgcgcccatcatcaccctcaaaaaagaagttttgcgcgaggataaaataaaactcaacctttccgacgttttgacggcgctgagcatctgcgcggcgaccaatcccgtcgtggaaaaggcgatggataaactcaaagcgttgaaagactgcgaggcgcacagttcttgcattctgcccgaaggcgatctttcggtcatgcgcaaactcggcgtcaacgtcacctgcgaacccgaattcggcacgaaagatctttacggcttttaaattttgcggggaaatttggttttctcccgtttatgtttttcgggaatggcaatcatttccgacagggaggagtaatcttgaataatatcgattccataactttgatcgtggcggtcgcgctcgcagccgtcgggctccttttggggttcggccgttccttacgtttctttacgaagggcatcttcggcattctcttatccgtctttctcgtatttacgttcggcggcatgataaaaggcattcccgcggtgggcgaactcatcgtgaaaggggacgaatatttcgcggggctttggagttttctcggctatctgcatctgggcaacgtcatttactacgtggcgctctttttcgtggtgcagatcgtgcgcgtcgtcgtcgtgcgctgcgtgggcggcgtattcgaactcgataacgtcgtcatgcgctttttgaaccgccttttaggcgccgtgttcaccgtggcggctgtgcttcttctgctgcttttggtgttcgccgtattcaaacatttcgaaacgagcgaatttatggtagactttctggaaaaaatcaaaaacacctttctgtttacgctgtatcagcacaaccccgtggtcatctgattatgcaaaaacaaaaagccgagcggatttcgctcggctttttttatgttctcgcattcaatttgtttttgatggaggcctcgtaagcgagcacggtggcggctacgcccacgttcaaagaatcgcaactgcccagcatgggaatggcgatcatcttgtattcgccctcgtaccattcgcgcgaaatgccgtagcgctcgctgcccatcaccagcgcgcattttacgccgaacggttcttcgtaataattgcgctccgcgcgcgtgtcggcgagatagacgatcacgcggtgcgctttgagccaggcgcggcactcttccaccgtttcgaattcgaacgtgggaacggacaatatcgcgccctggctgcccttgatgagtttggggtgggtgagccttgccttgcggttgcagataaacacggcgtccagccccgcgccgtccgccatgcgcagcatcgtgcccacgttgccggggatctcgatgccgtccagaacgagtatgaccgcgtttttcgggggcgagaagtcggaaagttcgaaacggggcagcctgcaaagcgccatcagtccgtcgggctggccgcgttcggaaattttttcatacgtcttttccgaaacggtgtacagtccgcccgcgcgcgcggcgagccgttttacgagttcggcggcctccgcggtgcggatatgcgcggggcagagcaccagcgattcgacgggcgcggcgaatttttcgcacatcttcaagatccagatgccctccgccacaaacagtttctgcgggttgggtttggaattggataatattcccttgatttgtttgatcttgggattctgctcgccgacgggcagaaaatttttctcttctaaaaaggcagaaagttccgtattcatgcctttcatagtatcacacgaaggttcggttgtcaaggttcttcgctcggaaattcggctcggtggcaggaaaaacgcgccgcgcatacaatggtatcgagtgaatttaggagcgtagaaaacgagatgaacaaaggaaaattctcccgcacggcgcgcgcttgctatgcgggtatcgtcaatcaggcaatcattaccaacgttacggcgcttttattcgtatcgtttatcgaattatataacttttcatacataaaactcggtatgctgacggcggtcaattttgccgcacagatgtgcgcggactttcttctgatcttcctcatcgacagagtttctttccggaaacttgcggtgttttcctgcacgctgagttttgcgggactgctgttttacggctgcgtgccctttttgttttcggagaaggggctttttacgggcatcgtctgcgcgacgacggtgttcgcctttgcgggcggtatgtccgaagtggtgctctccaatatcgcagacaatataccccgcctcgaaaattcggtctctatctgcctgttaaagacggtgtatgcctgggcgcaggtggggctggtcgccgtgtgcgccgtgtttctgacggtcttcggctcagagagttggaattacctcatgttcgggttcgccctgatcccgctcggcgccgccgttctggtcggaggcgcggccgtcgttaaaaagagcgggatatccaaaccgaaatcttcctttcatctgttttacatattggcgctggtggcgatctttttggggtacggttcggagatcgccgccaatcaatggatatccgtattcgcgaccgccgcgctcggcgtgggcggggagtggagcgagttcgtcggcatggggctgttcgccgtctgcctcggcgtgggcgggctcacatatgtcgcgatctccaaacgaaaggaacatttccctcttcccgtgctcatctttgccgcgctgtccacctgcgcgctgttcttgctctcctccgtgacggaaaacgtgattttcgcgctcgtcacatccgtctgctgcggactgttcgtgggcgtgctctcgccgggcatcatgaccgtggcgagcgaaaatatgccctcggcgggcgcgtggatgatcgcctcgctcgcggtctgcgccgatctgggcgcggcggctctgccctccgccgcgggaagcatcgcggaattgacgggcatacgcacggcttatctcaccatgtccgtcgcgcctttcctgtgtgccgccgtgctctttgtcatgcaccgcatgaacaaaaaaaacgcgtcggtaaactttactgacacgtttttccctgtatgacgttccgcctctcgaattccgcccgtatcgcgttcagcacccgctttttgtccgccgaccaggcgggcgcgacgagcaggcgcctgggcgcgtcgcccgttaaacggtgcaccacgatctcgggcggcagcgcctccaccatgcggcacagaacgccgatatattcatcggccgacagtacggaaaattctccgcgttcatacattttctgcaactctgtgcccgcgagcacgtgcagcagttgcaatttgatgccgcgcgcgccgcttcttcccacgtagcgcacggtttcttccatcatttcggcgctttcgcggggaagccccaaaatgacgtgcgtcaccacctccgcgccgatcccgttcagatctttcaccgctctttcgtacacggaaagcggatagccgcggcggatcagccgcgcgctctcttcatggattgtctgtaagcccagttccacgaacaggggctttttctttcgcagcctttccagcacgtccaatacgtcgccgcccagacagtcggggcgcgtcgccacggagaccgcctcgatttcgggaagatccgccacgggaaagaacagcgcttccagcctctccgcgggcgcgtaagtgttggtataactttgaaaataggcgatgaacttttccgcgtccgtcttcgcgcgtatcctcgccttggcgcgttcgatctgcgtttgcagatcgccgcagtccttttcagaaaattctcccgcgccgcccgcgcagaaaatgcagccgcccgttccgagcgtgccgtcgcggttgggacaagtcatgcccgcgtccagcgccagtttataaacttttccgccgaaacgttctttcatgtacgaattgaaagaatggtaccgctccatcagcgcgctcccgtctgtctgtctgcgtgtcggtcgggcgtgacgagcatggtggaaaaattcgtgtacacgacgaatcccgcccgcgatttcgaaggcttttttacgaatttgcgctcgcaaaagtccacggggatcttatcgcccgccttggcgtcggaaaaatacgcgcatacctcggcggcgaacagtttcacgccgtcgggcacttctttccgcccgctcttgacgatgacgtgcgaactgtggtatttctgggtgtggaaccagagatcttcgggcgcggattctttcaaaaggcggtcgttctgcacgttgttgcgccccgcgaagatcgtaaacccttcgaacgagaaagtgcggaagggcgcctccttggggggcttttttttgcctttttccgctttgatcagcccgtattctttcagttcttcctcgatctccacaaggtcggtgcacgtttccgcgcgggcgagggaggaaagggcgctgaaaatgtaatccagttcgctctccgtttccgcgcgttgcggagccacggctgcgagcgtgcgtttctgtttgttgtatttcttataatatttctgcgcgttctgcgcgggcgagagcgtcttgtcgagcggtattttcacgagcggacagttttcgtcggtgtagtctaaaagttcgcagccctcagcgccttttttcaaagcgtacagattggcggtcagaagttctccgaacacgcggtttttctcgatattggcgcattctctttccctgtcgacgagcaacgccagttttttttcttcctttttgcgccgcgcgttcaaaaggctttccagtttacggcgcttttcggtaaagtcgcgcgccgtttccttgtccgtataaaaggcgtcctgcgcggcgtttacgctgtcaaagggaatcccgcccgcatagcgcgcgtgaaaatcgacgaacgcgccgtcccgcgtttggatcgcgggtgaaacctcttcggaaaagataaaatcgtgtacgtgctgcgcgaacgatttcgcgcccgcgccgtcgaaagggggcgcggggtcggaaatatgcgccgattcgcagatgagcgcggcggtggagtaggcgagcccgcccaccgattcgaacaaaaagcgctcgagatcgcccccgccgaacgcggaaaagagcgcttcgagcgcctgtatatcgcgcgcgtccgctttgtcctgcggttcgggaaagagatatctcgcgccggggaacagggtgcgtttgaaattttcctggaccgaagaaactttcagcgcacccgagatcacgccgttttcggtaaggatcaggttggagtatttgcccatgatctcggcgtacagcacgcgccgcgcgcgggaaaattcgcccgtacagtcaaaggtaaaggcgagaatgcgttcgaaagcgatctgttccacgcttacgagcacgcctcccaaaaggtgctttctgagcagcatgcagaaattgggcgcggcggcgggcgcgcttctggcggcgtcggagagcgcggcgcgggcgtacgaggcgttggtgttgagcaaaagtttttgcgtgcggccgcccgcgtacagaagcatatctatctcgtcgcgcgagggctgaatgattttattgaccttgccgcccgaaagcgcggcgcaaagttcgcgcgcaacgtggcgcagggtataggcgtcctggggcatttcaaaaacctcccgatcccgtcaaaggatctcttcctattataatccaaaacgcaaaatttgtaaatcgtttgaaaaatgcgaaaatatgcggattcagggcaaaaacgcttttcaaacgggaaagattgtgctaaaatgttgtatcgagtaaaaaagtatttttttgtcaggagaaaggttatgaaatacaaagcacaggcttccgaaaaaagcaccgtgaccattaagatcacattcagcaaagaagaatgggagcaggcgaatcagaaagcatatatgcagacgagaggcagatatgccgtcaacggtttcagaaagggcaaagcccccaaacacgtcatcgaactcaattacggtaagggcgttttttacgaagacgcgctcaataacctgtattccgagcattactataacatcctcgacaaggaggcggaaaactttaccgccgtcggccagcccgagttgtccgtggagaagatcgacgaggacggcgccgtgctcgttgcggtcgcgcccgtcaagcccgacgtgaaattgggcgactacaagggtataaagatcgaaaaagttgagtataatgtaaccgatgccgacgtggatgcggaacttaaaaagttacaggaaagaaacgcccgcacggtgaacgtagagggccgcgcggcggaaaacggcgacagcgttatcatcgatttttcgggcagcgtggacggcgtcaaattcgaaggcggcacggcggagcgccatacgctcgttctcggcagccattccttcatcgaaggattcgaagagcaggtcgtgggcatgaatatcggcgaggagaaggatatcaacgtcactttccccgaagattatcaggcggaagaactcaaaggcaaggccgccgtgttcgcggtcaaactgcacgagatcaaaaaagaagaacttcccgaagttaacgacgagttcgtcaaggacgcggcgggcgcggagagcgtcgaggcttataagaaagaaacgcgcgagcgcctggaaaaggaagccaagtctaagggcgacgcggagacggaaaacaacatcgtcaaggcgatcaccgataaggccgaggcggaaattccccaggtcatgatcgaaaaccaggtagacatgatggtgcgcaacgcagaataccgcctttccatgcagtacggcgggctgaaactcgaagattacctcaaatacatgggcaccgatatggaagcgttccgcaagggctacgaggcgcaggctgccgacaccgtaaagagccagttggtcatcgataagatcatccgccaggagaacatcaaggcggacgacgcggaagtggacgcaaaactcgaagagtacgcgaaagcgacgggcaaaacgctcgaagagtacaaaaaggacgtggacgcttcgcagagggaatacattgcgaacgacatcaccatcaataaattgttcgagtttttgaaagcgaacaacgaaatgacgggcaaagcggcgaagaagagcgcggcgaaaaagcccgccgcaaagagcgcggcaggggaagaaaagcccgccgccaagaaacccgccgccaaaaagacggcaaagagcgaagacggcgagaaaaaacccgcggcaaaaaagcccgcggcgaaaaagagcgccgaaagcgataaagaataacccgcaactccggatttacggtacggcgggcaaataaggaggacatatggacgaaagaatgaatttgatccccatggtcgtggagcagtccagccgcggggagcgttcgtacgatatttattcccgccttttggaagataggatcatcttcctttcgggcgagatcaacgacgggatggcgaacaccatcgtggcgcaacttatctatctcgaagcgaaagatctgggcaaggatatcagcctgtacatcaacagtccgggcggcagcgtgtccgcggggcttgcgatctacgacaccatgcagtatatcaaatgcgacgtgagcaccatctgcatcgggctcgcggcgagcatgggggcgtttttgctttccagcggcgccaagggcaagcgtttcgcgctgcccaacagcgagatcatgatccatcagccgctcggcggcgcgcagggacaggcgagcgacattaagatccaggcggagcatattttaaaaattcgcgataagatgaaccgtatcctttccgaaaatacgggcaagaccattcaggagatcgagcgcgacaccgaccgcgataattacctttccgcggacgaagcgcaaaaatacggccttatcgacaaagttttctataaaagataagatccttcgggtttgaatcttgctggaaaagtgaatacaaaaacaaaacttcgctgtgcaataagagaatgtccgttcgaattttgcgcggcgaaatttttaaaatcagtttacggagtaaaaaatgaaagacgaagaacaattttgttccttttgcggcaagccgaaaacactgacaaaatgtttgatatccggtcccaacggcatcaatatctgcgacgagtgcgtagagatctgccgcgaacagttgctcgacgcggaggagaaaccgcaggacgaggtagcgctgaaaaaaccttcggagatcaaagccgaactggataaatacattgtcggacaggataaagcgaaaaaagtgctttcggtggccgtgtacaaccactataaacgcatcaacaatctgaaaaaagaggacgacgtggagatcgaaaagagcaacattctgctgctcgggcccacgggctgcggcaaaacgcttttggcgcgtacgctcgcccgcatcctcaacgttcccttcgccaccacggacgccaccacgcttacggaggcgggctacgtcggcgaggacgtggaaaatatccttctgaaactcattcagaacgccgattacgacatcgaaaaggcgcagcgcggcattatctatatcgacgagatcgacaagatcgcgagaaagagcgaaaacgtttccatcacccgcgatgtatcgggcgagggcgtgcagcaggcgcttttgaagatcatcgagagcacgatcgccagcgtgcccccgcagggcggacgcaaacacccgcagcaggagtgcatgcgcatcgataccaccaacattctcttcatctgcggcggggcgttcgttgggctggataagatcgtgcagcgccgcaaggacgacacctccctcggtttcggttccaacgtgaaaaagagcggcgaggaaatggattatgaacttctggacgacgtcaagccgcaggatctgacgaaattcggcctgatccccgaattcgtcgggcgtatccccatcgtggtgagtttacagcccctcgacgaaggcgcgctcgtcaagatcctcaccgagccgaaaaacgccatcatcaagcaataccagaaactcatcggcatggacggcgtcaaactctccttcgacgaggacgcggtgagcgagatcgccaacaccgccatccgcttaaagacgggcgcgaggggacttcgcaccatcatcgaaaatctgatgaccgacgtcatgtacgacattccctccaacgacagcatcgaggaagtcaagatcacgcgcgactgcgtgctcgggaaatccaagcccgccatcgtgaaaaagagcgcttgacgatacaaacggcaccgaaatatacggcgccgtttttttatggcggcgataagaaaaacttatacgcctttttgtcgaaacgcggcgcgaaacgcttgccttgtccgtaaaaaccatttataatttgtgtgaaacaaagtaccctgtatgaggcataaacgtatgtataagatcattcgaaaaaaagaactcaatccaaccgtcacgctcatggaagtggaggcgccgttcgtcgcgagaaaagccgaaccggggcagttcatcattttgcgcgtggatgaagagggggagcgcatccccctgaccatcgcggactataaccgcgagaaagggacgatcaccattatattccagattgtcggcggcacgaccgagcggctcaaccgcctcggcgagggcgattgcattcaggatttcgtgggacccttgggcaccgcgtcgcacgtggagggacttaaaaaagtcgccgtcatcggcggcggcgtcggctgcgccatcgcctatcccgtggcgaaaaaactgcacgaactgggtgcggtcgtgcacagcatcgtcggtttccgcaatcgggatttagtcattctggaaaaggagttcagatccgtttccgacgtctataagatgatgaccgacgacggctcttacggcgaaaaaggactcgtcaccgacgccttgaaagcgctcatcgaaagcggcgaacagtatgacgaggtcatcgccatcgggcccgtcgtcatgatgaaattcgtttccctgctcaccaaacagtacgatatcaaaacggtcgtcagcatgaaccccatcatgatcgacggcacgggtatgtgcggcggctgccgtctgactgtgggcggcaagaccaaattcgcctgcgtggacggtcccgatttcgacggtcacgaggtggatttcgacgaaatgatgaagcgcgccacggtgtataaagaattcgagttgcacgagcgagaaaaagcctgcaacctcttttccaaggaggtgaaatgatatgcccaatatgtctttgaaaaaaaacgaaatgcccgcgcaggcacccgacgtgcgcaataaaaacttcaaggaagtggcgctcggctacactgccgaaaccgccgtggacgaggccaagcgttgcctgaactgcaaacacaagccttgcgtcggcggctgccccgtcaagatacatattcccgatttcatcgcgaaagtcgcggaaggaaaattcgaagaagcgtatcagatcatccaaaagtccagttctctgcccgccgtgtgcgggcgcgtctgcccgcaggaaacgcagtgtgagcagaaatgcgtgcgcggcgtcaagggcgaacccgtcgccatcgggcggctggaacggttcgtcgccgactggcacaacgaacattcgtgcgatctgcccgtcaaggcgcagccgaacggacataaagtcgccgtcgtcggctcgggccccgcggggctgacctgcgcgggcgatctcgccaaacgcggctacgacgtcaccgtgttcgaggcgctgcacctcgcgggcggcgtgctcgtgtacgggatccccgaattccgtctgcccaaagccatcgtgcagaaagagatcgacaatctgaacgcgctgggcgtcaaagtggagaccaacatggtcatcggcaaggtgctctccgtcgacgaactgatggacgagttcgctttcgaggcggtattcatcggctcgggcgcgggattgccgcgtttcatgaacattcccggcgaaaatctcaaagacgtttattccgcaaacgagtttctgacgcgcgtgaatctgatgaaagcgtataaagaggacgcgagaacgcccatcgcgcacgcgaaaaaggtcgcggtcgtgggcggcggcaacgtcgcgatggacgcggcgcgctgcgcaaagaggctgggcgcggaagaagtgaccatcgtctaccgccgcagcgaggcggaacttcccgcgagaagggaagaggtggagcacgccaaggaagagggcatctcctttaaacttctgaccaatcccgtgcgcatcttagagggcgaaaacggctttgtgggcggcatggaatgcgtggaaatggaattgggcgaacccgacgcatcggggcgcagaagtcccgtcgtcaaggaaaattccgagttcacgatggacgtggactgcgtgatcatggcgatcggaacttctcccaacccgctcatcaaatccacgacgaagggactggaaacgcagcgttggggcgggatcattgccgacgaaaacgggcagacctcgcgcgaaggcgtattcgcgggcggcgacgcggtaacgggcgccgcaacggtcattctcgccatgggcgcgggcaaaaccgccgccgaagcgatcgacgaatatattaaaaataaaaagtaaatagataaagaggctcggagttttcgcgcctcttatttgatttttaaaattttatcggaagatatattcaatacagtgcaaagcgtgaaaaaccgctttaaattcggcaatctgtcctcggtcatataaccttttaaggtcgaaagagaaatatttgtccgtatcgaaatctcttgtaaagtataattgctgtattcgattgtttctctgagcctggactgaatcagtttaaattcaatactgtttttattcatatcgtgatctcctttcaaaaagtataatctaaataattcaaataatattatttcagactttatagtagttacaaattataaaaagcgcgaaaagttcttttcgcgctttcgctttgctatgtacttgtaaaaatcacaaatatgtgttatactatgtatattcgaataatcggggcagtgtccccaaaacgatatgatttttcccgaaagcggaaaaaaggatgaaatatggctaaaacaaagaaaaaaagcgtttatcccatggtcgcgctccgcggcaaggtggttttccccgatacggtttccagtttcgatgtgggcagactcgtctcgctcacggcggtttcgcgcgcctccgaacagcagaacatgacgctcttcgtgtgcgcccagcgcgacatgaccaaggacgatatcaagcccgaggacgtgtataccgtcggcaccgtcgtcaccatccgtcaaatcgcaaaactcgcctccaataatctccgcgtcaacgtggagggtacgttccgcgccaaggcggaagaagtgtatgaagaggacggctgtttctacgcgctcgtttccgaacttcccgccgtccacggcgacgaaatgctcgaagaggcatatttccgcaccgcgcaggacgtgatgaaggacattcagtcgggcgatgcgcgctttcccaaagagggcgtggcgcttctggaaaaaatcaacgatgcggacgtgtatatcaacaacgcaatgacctatctgcacgtaaaaaacgaggtcaaacagcagatattggagatcgtcaacgtagtggaccgcctgaaaacgttcgagcggtgtttaaacgacgagttagagatcgccaaactcgaaaagaagatcagttccatggtgcgccagagcatcgacaagaaccagaaagaatattttctccgcgagcaactcaaagccattcacaccgaattgggggacgacgagaacgaaaaggaagaactgaccaaagcgatcacggacaagcatatgcccgccgagatcgaggaaaaggcgctcaaagagatcgcgcgcatggataaaatgccgccttcgtcgcccgaatttaccgtcatccgcacctatctcgactggctgtgcgaccttccctggacggaagagaccaaggataccgaaagtctgaccgacgccaaaaaaattctcgacgaagaccattacggtctggaaaaagtcaagacgcgcatcaccgaatatcttgccgtgttgcagttgacaaagagcatgaacgcgcccattctttgctttgtggggcctccgggcgtgggcaaaacgtccatcgcgcgctcggtcgcgcgggcgctcggccgaaaattcgtgcgcatgagcctgggcggagtcaaggacgaggcggagatccgcggtcaccgcaggacgtacgtgggcgcgatgccggggcgcatcatctacgcgatgaagtcggtcggcagtatcaatcccgtattccttttggacgagatcgataaaatttccagcgatatgcgcggcgatcccgccagcgcgctgttggaagtcttggatcccgagcagaacgcgacgttccgcgacaggtttttggaagttccctacgacctttccaaagtgcttttcatcaccactgcgaacagcgtggataccattcccgcgccgcttctggacagaatggaattgatcgaactgaacggctacacgctggaagagaaaaaagagattgcaaaacgctatctcgtacccaaaaaacgcaccgaaaacggtttgcacgacggaattttcgagatcgaggacgacgcgatcgtcacgctcatcgaaaattataccatggaggcgggcgtccgcaacctcgaacggcagatcggttccatctgccgtaagatcgcggtcaattacgcggaagaccgcaatatcggcaaacagacgatcacctccgcgagagtggaagaattgttgggcgccaagcgctatttaagcgatctgcgcaaattagacgataacgaagtgggcgccgcgacggggctcgcctggacgagcgtgggcggtacgacgctcaccatcgaagtttccgccatgcccggaaagggcgatatccaactgacgggcaaactgggcgacgtgatgaaagagagcgcccgcgccgcaatcagttatatccgcgcgcacgccgataagtacggcatcgcgcccgacgcgttcagcaccaccgatatacacattcacgtgcccgagggcgccacgcccaaggacgggccgagcgcaggcatcaccatggcgacggcgatcctttcggcgttcaccgccaaacccgtccgcaaggacgtggcgatgacgggcgagatcacgctgcgcggcaaagttctgcccatcggcgggctcaaagaaaaggtgctcgcggcgcaccgcatcggcatacagaacgtcatcattccgcaggaaaacgaaaaggacgtggacgaaatacccgaaagcgtgcgtaaagatatgcactttattcccgctaccgaagtggatacggtattttccagcgcgatcgtgggcctatgatactcataaaagacgcgaaattcgtcgtttccgcggcggataaaaagggatttttaaaacccgataagcccatgatcgccgtatgcggcaaatccaacgtgggcaagagttcgttcatcaacatgctcgcgaacaaaaacaagttggcgcgcacctcgggcgacccggggcgcacgcggctggtgaattattttgatttcggcgagtttttgctggcggatcttcccggatacggctttgcgcgcgtatccaaggcggaaaaggataagtggggcaaaatgctcgacgacttttttgcggaaaaagagaacattgcgcacgtgttcgcgctcgcagacatccgccacgatccgacgcgcgacgatctgaccatgatcgactatctctattacgagcgcataccgttcaccgtcgtcgcgaccaagagcgacaaacttgccaagacgcgcgtgaaagacgccgtgcgcaggatcgccgccgccttcaagacgggcgaaggcaacgtcctgcccgtttccgccgtcacgaaaaagggcaaagacgaagtcttgtccttgatcgaaaaaatttgtaccttggaaacagagacggaagaggaattgtaagattcgatgtgtgagagtatagttgaaaaaaattcggaaataaacgttaattcggatactgcgcattcagagaaaccgaaaaggaacgcggctattgaaatctgccgtatcgtttgcattgttatggtcgttttcaaccatacgtttaaccaattttatcatgcgcccggcaccgctggtatatttgcccgttatgtgaatttgctcaacgtctgcgctgtgggtacattcttcataattacggggttttatctctttcagggccatttcaattataaacagcggttaaaaaaactgttgtttgaaatcttgctccccgcgctttgcgttttaatcgtattgcttacatataagacggtgcgcgggtgtgttcagggtaaaggagcgtttttcgattctttgcgcactgaattttttgcgctgggtaaaaatttactttcttggaaattcagcggagaatacggctatctgtggttcatcttggcatacaccgagatgatcgtgttttatcccgtctactatcttttgtgcaaagatgagaaaatttccaacgcggcgcgccgacttctcatggttttttgtttcatgagaattttattggaagattttacccgtatcgcgcatcttgatttcccgatacgcactttttcattgataggagcgtatcaattgtttctcttattggggtttgaattaaaactattgtacgataagggaaaactttccaaacgtttctgtctcaaatcgggattggttctttattttttcggcgtaattcttgccgccctatatattttgctggagaagcatgtttttcatggttttacggaaaattggtatcatttaaattgccatacttctattctgtctgcggcagggttatttctcgtgtttttggggatcgaagtcaagggctcgcgtttcgtctatttattgggaagatcggtattttatgtttatcttgttcaaactccgatacatattatcctgaaagatctgcaattaaacgctaatttattcccgcatatcggtttgttgagtttcatcgtcatagcactgctctgcattctggttagttttgcgatcggcacggcgatagttgccgtcagaagaatcgctaaatcttaataaaacgcttgtaaaacggcgcgcgttatgctacaatgaaatatcgaatttgttgagaggcacaattttatgtccaatttgttaagcgattcctctgcgccttttttaagccagccttggggacttgctctgtttattatcatcgatatcgccgtgctggtgcttatactggcgctcaattataaatggtgttgcaaacgtatcttagatatcctgttttcctttttgggtctcgccgtgctgtttcctttcttttttgtgttctggatcgttcagttcgtctataacaaaaagacaaaagcgtatccttctcttttcgtgaaaaagtattttatcggcaaaaaggaaaagttttcgtataaaacggaattcgtctgcgaagatgccgacggcaacgtaacgaatctcggaaaggccatgcgcgcctgtaagatcgcctattatccctatcttgcggatattttttgcggcaggctcagttttatcggccccgtgccgatgcgcgccgcagacagccttgccgtgaaaggcgaggcgcgcgtgcggtttgccgtgcgggctgggcttttaagttcgctcgaaaagtacggcggcgaggcgctcacttatgcggatatgttcgaagaggacgccgaatacgtgtcttcccgttcgcttttcaaagatttttcttattttttcctttatctgatcgcgaagatccgcggcgacaggaagaacaggttgggagaatgcgcccaaaaaacttacgtgcggtctttgtcggatgcgggagagatcaccgaggaagaggcgcaggatctcgaaaaacggggcgaggaaaaattgcgccaaacgctgtccttccgcgaagagaaggcgaaatatcagagatgatcgtaagcggaaaccgcgaaagcgcggtttccgctttttcgtatttttcggaaatcttgacaatcttaacaaaaaagcatataataattgcaaacaaaacgaaggtaggatcatatgcgcagagataatcttgatttgttcggcgaagaattcgcggccgcggcgcccgcaagggcggaaaacaggaccgaaaacggtgaggtggaaaacgaaactgccgtgacgaagtgcccctcctgcggcgccaatatggtttacgattccgagaaaaagaaactgcactgtatccactgcggcacggtcagggacatcgacgccaagagcagcgaagagcaggatttcgagcgtttgctcgccgaaaacaatacgtgggggcgcgaaacgcacgtttttcgctgtgaaaactgcggggcgagagaagtgctcgatatcaacgagatcgccaaaacctgtcctttttgcggtacgagcaatatcgtaaagacagacgaactttcgggtttgaaacccaacgccgtcgttccctttcagatcggaaaagatgaggcgggcagccgcgtcaggaaatggatccgcaagcgcgcgttcgcgcccggcaaattccgtaaaagcgcccgtcccgaagaaatcaagggcgtctatacgcccgcgttttctttcgatacggcgacggaatccgaataccgcgccgtactgggaaaatattactatacgacgcgccgtgtgaacgggcgcacggtttcgcaaaggcatatccgatatttcaccgtcagcgggcattattcgatggcgttcgacgacgttttggtgcaggcgtccgcgaatatagaccagcaatcgctcgacaggctgcagcctttcgacaccaacaacagcaaggaatacacaaaagaatacctgagcggttttaccgccacgcaatattccaagagcggcctctcctgttgggacgaggcgaaaggcgtcatccgaaaccgcttgaaatccgctattttagggcaatatacatacgacgtcgtatcctcgttcgacatttccacgcaatgctttcatatcacgtataaatatattctgctgcccgtatacgtggggcactgcaactggcattccaaactctataattttttcgtgagcggctttaacggcaaagtcacgggaaaagcgcctgtttcggcgctcaaagtgagcgggctcgtccttctcggcatcggagtgctcgtggggttgtattttctgtatcgggcgttcggcgggtaacgtggagttttatctatggaacaacagaccttttttatgagtgagaccgatcttcctcttgcggcgcggctgcggccgcgcacgctggaagaattcgcggggcagaagcatcttctcggcgaaggaaaaattttgcgccgcctgatcgagggcgacaagatcggctcgatgatcttctgggggccgcccggcgtgggcaagactacgctcgcgcgcatcatcgccaatcggaccaaggcgaaattcatcgatttttccgcagtcacgagcggcattaaagaaataaaaacggtcatggaacaggcggaaaaaaaccgccgtttcggcgaaaagacgatcttattcgtggacgagatccatagattcaacaaggcgcagcaggacgcgtttctgccctatgtggaaaagggaagcatcatcctcatcggcgctacgacggaaaatccctcctttgaagtcaacggggcgcttttatcgcgatgtaaagtgttcgttttgcaaacgctgaaaaccgaagaactgtgcgaacttctccgcaatgcggtttccgacgaacgaggattcggcagacagaaaatcgaaatttccgacgacgtcatcgaaacgatcgcgaattttgccaacggggatgcgcgcagcgcgctttcaactctggaaatggctgtgttgaacggagagaccgaaggcgataccgtgcgcgtcacgcgggaaacggtggagcaatgcacttcgaaaaagtcgctgttgtacgacaagacgggcgaagaacattacaatctcatatccgcgctgcataaatccatgcgcaattccgatcccgacgccgccgtatactggctggcgcgcatgctggaagcgggggaagacccgttgtacgtcgcccgccgcgtcacgcggttcgcaagcgaggacgtggggcttgccgatcccaaagccctggagatcgccgtggcggcgtttcaggcgtgccataggatcggcatgcccgaatgctgcgtgcatttaacgcaggcggtcgtctatctttccatggcgcccaagtccaacgcgctgtacacggcgtacgagagcgcgaaaaaggacgcgctgaccatgctcgccgaaccagtgccgctcatcatccgcaacgcgcccacgcggctcatgaaagagttgaattacggaaaaggataccgctacgcgcacgattacgaagaaaaactgacggacatgcagtgccttcccgattctttgaaagataaagaatattaccgccccacagaagaggggatggaaagcaaatacaaagcgcgcctcgacgagatcaaagcgtggaagcgtgaaatgcgaaaagagtaaatatgtcataatcatccataattcgacatagaatgtaccatcgctgaattttcgggggtggcagaacttgtgggattatatgattaaacgcgctttgatgagcgcggaatatattctggaaacgggcgcgaccgtgcgcgactgcgccgaacgcttcggaacgagcaaatctacggtgcacaaagacgtgtccgagcggttgcaggagatcgacttcgaactctattgcaaggttcgggaggttttggataaaaacctgcgcgaacggcatatccgcggcggaaacgcgaccaaaaaaaagtacgaaaagaacgatagatcgtaaatgcgactgatctgaaatacggcgaagaggcggagcggtaaaatttaccgctccgcatttctgcatttttgcttgtgcttttgttcattttgtcttgaaatcattgagttttttgtgcgattgtgatataatgtaatatcattaaatcacaaaaaccgtctttcggggcgaaaaggacatattatggcaaaattgatggggatcgacgtcggctccaccaccgtcaaggtggctctgctcggcgaagaccgcgaaatattatatacgagttacgaacgccacttctcgaaagtcaaggagtgcgtgctttcgcgccttgccgccgtgcgggaaaaattcggcggtgacgtcaaagtgagcatcacgggctctgcggggcttgggctcgcgcagaggagcggcgtttctttcgtacaggaagtacaggcggcgtttaccgccatccgcaaatattatcccgatgcggacgcggccgtggaactcggcggcgaggacgcgaagatcatcttcgtcacgggcggtaccgaacagcgcatgaacggcagttgcgcgggcggcacgggcgccttcatcgaccagatggcgacgcttttgaacctcgaagtcggcgaaatggacgagttgtccctgcgcgcggaaaaggtgtaccccatcgcctcgcgctgcggcgtgttcgcgaaatccgacatacagccccttctcaatcagggcgcgaagaaagaggatatcgccgcctccatttttcaggcggtcgtagaccagaccgtatcgggtttggcgcagggcaggcgcatcaagggcaaagttctctttttaggcggcccgctctactttatcaaggggctcagaaaagcctttcagaccacgttgcatctcgacgacgagcacgccgtgtttcccgacaacgcgccctgtttcatgtccgtcggcgcggcgctctattccgaaagcgtggacgcgcaggatatcggaacgatcatccgcaagatcgagagcgtaaagatgagcgacgagatcgtaacgggcgaaccgctgtttgccgaccgcgaagaatacgacgaattcgtcgcgcgccacaagcagagcgatcttcaattctgcgatatcaagacctatacgggcgacgcgtatctcggcatagacagcggttccacgaccacgaaactcatgctgatcacgcccgactgcaaaattttatactcgcattaccagtccaacaacggacagccgctcgacatcgtcctggaacgcttgcgcgagatctacgatctgtcgggcggacatgtgcgcatatgcggctgcgcggtcacgggctacggcgaggatatgatgaaagcggctttaaaggcggatttcggcatcgtggaaacggtggcgcatttcaaggccgccgtgtttttcaatcccgacgtcgatttcatcatcgatatcggcggacaggatatcaaatgtttcaagatcaaaaaccgcgccatcgacggcatcatgctcaacgaggcgtgttcttcgggctgcggttcctttatccagacgttcgccaaagccatgggcatggagatagacgagttttccaaactcggcctgttttccaaaaagcccgtcgaactcggctcgcgctgcacggtgttcatgaacagttcggtcaagcaggcgcagaaagagggcgcgagcgtggaggatatctccgcgggcctttcgatgtccatcgtcaaaaacgccatttataaagtcatccgcgccaaaacgcccgacgaactcgggcaaaacattctggtgcagggcggcactttcttaaacgacgcggtgctccgttcctttgaaaaggaaacgggcaagaacgtcgtgcgccccggcatcgcggggctgatgggcgcgttcggcgcggcgctgtacgcaaaagaaaacgtgacgggcgtgagcacggtcatcaccgaagccgaactcaaaaatttttcttacgtctctaagagccgtatgtgcggcgggtgcacgtccaactgcaacgtgaacgtcatccgtttttccgacggccgcaaattcatttcgggcaacaagtgcgaaaagggcgcggggctcaaaccccattcggacgaactggatatctatcatttcaaatacgagcgcctgcttgcctccgtgacaggcgaagggagcaaaaagcgcggccgcgtggggatcccgctgggactgggcttttacgaacagttgcccctgtgggcgggatttttcgaaacgtgcggattcgaagtggtgctcagcgaaaaatcgtcgcgcgatctgtacttcaaggggcagcacaccgtggcgagcgataccgcctgctatcccgcaaaactcattcacgggcatatagaaagccttctcgacaagaacgtcgattttatcttctatccctgcgagagttacaatctggacgaatacgattcgaccaatcactacaattgccccgtggtggcgtattatcccgaacttttaaaggcgaacaacgagcggctgaacggcgaaaactttgtcatgccctatatcgacccgaacatgagaaagagcacggtcaaaacgctgaaaagcgcgctcaaaaaatataaactgagcaaagcgctcgtttcccgcgggctggacgaagggtttaaacgccttgccgcctattataccgcgatcgaggaaaagggcagcgagatcatctacaaggcgcggcgcgagggcaaagcgctcatcgtgctggcggggcgcccttatcatatcgatcccgagatcaatcacggcatcggaaaactgctgacgtcgctcgatatggcggtgctctccgaggacagcgtgttccagaggggggacctcgtgaaagtgaacgttctgaatcaatggacgtaccacgcccgcctgtaccgcgcggcggaatacgtgaccaagcacgacgatatcaacctcgtgcaactcgtttctttcggctgcggcatcgacgcgatcaccaccgacgaggtgcgctcgatcctcgaaagccgcgggaaactgtacacgcagatcaagatcgacgagatcaacaacctgggtgtggtgaagatacgccttcggagcatgctcgccgcgatcgaagaacaaaaacggaatcaaaatcaatgaaagacgacaaaatgcgggaagcggtggatttcaccgaagacttccccaaattcaacaaaaacatgaagggcacgcacaaaattctcattcccgatatgctgcccgtacatttcggtatcatcgtggagatcctccgcgccgacggctgggatatcgaactattgcgcaacgacacccgcgccgtcatcgacgaggggctcaaacacgtgcataacgacacgtgcta

SEQ ID NO: 863 - DNA, 11379 bp, Unknown
  16S sequences of unknown bacteria
gcggcggagcagagcggcgataggcagcggagggaaaaagccttgccctttttgaaagaggataagagtgagcacgagcgcgctcgatagcaggtgatagctatccaactagtctgcgcgcgacattgcgaactccctctttcaaaaatgggcattaaagggctttttcccgtagtcgccgtgccgccggctttctttggtactttctttcgcttcgaaagaaagtactgccccccttggggcggcagacccaccgtccgcgccggagtcggcgcgtcaatcccctccgcggaaaggggtatgcgccaacgggcgcaccaaagggctttccgctcgccctttggaaaccttcgggcaccgaagctggcgagacacccatgacggcaaggcccaatctgtaccgggtcggtacgtcaggccctcagtcagtgcggcccgcactgccgcgcgctccgcttgttgtttgcctgaacgccttcggttcgccctctgaagttgggtgagccccatagggctgcaagccctgctcccgcaccgcaatcggcgcgtcaatccccaccccctttttccaaaaagaaaggaatccccctctatgcagcatcctcccaaaaaatcctcccgtaaaaaacacccatggctcctgcccaccctgctgaccgctttgctggcggcggcagcagctgtcctcctgctgctgccaggctggaagcagcaggccgtttccagcgccatgccggactcgcccgccgaccggcagaaaaacctttcgcaaacggacgcggccacgctgctctccctccgcgtgcagcaactgaacggcgaggactataccctccaatataaggacggctccctttggctggaggaaaacacccccatcagcgaaagcgtcagcgctgaaatgctggaagccgtcacactgatctccaccaccgatcaggtggccgccgatgtggaggaagtccgcgaacacctgacggacatggggctggagccaccgcagatcaccgtgacggcgacctactccgacggcaggaccgaaacgctggagatcggcggcgaggtgccggagaccacctaccgctacctgcgctggtccggcgaccccggcgtatatatgggcgacatcggcatcggcgaggtcttttccatgacccggaaccggctgatcgccgtcgaacagccggaaatctccacggcgctggtggataccgtccaactggaaaacgccgccggaacggtcagcgttcgctttacggtggatagcgccggctatgcctccgccgccctgaccgccccggaaaattaccccatggacgcagaaaaagcccaaagtctgcaatcggccctgaacaatttccgtttgggaacgccggaagggatgctgaccgacgaaacccgcgcccaatatggtctggagacccccatggccgtgctgacccttcaccagcaggccgggtacgccagccgcaccaacgacgaaggccagctggtctcggaggaaatttcagaacggaactttgttttcaccttcggcgactttggcagcgattatttctactcctgcgcctatgaagggcgtgtgtatcaggtcagccgcctgttgacggaggcgctggtgcagggcagctgggagtcctggtgtgccacccggcccgccgatctggggaccgccgagctgcgctccattcagatcatccggggcagcggcgtgctggaatggcagaagaccaaaaccgagcgggtgctggcgaacaatcagctggaaaccgacaccgacggcaacgtgatctatgacgaggccgtcgccctgaacggagaagccgccgctgcggagcagtgggacacgctcgtcgaccgtctggccgcgctgaccgtgtcgggaaagatccccgcggactactccgccgagggaaaatctcctcgctggcagatcgtgctgaccaccgagggcggcacggtgcgcaccatcgccgcctacccgctggacaccttctccgacgcgctgatggtggacggcgtgattcgctactatgtgcatatcgaagcgctggacagtgtgctgggcgaattcagcggttctctgacggactgaccgattgagccgccgcgtccgcttccagcaccgccttcatcacctgcaggagcaccggccccagcagcagccccagaaagcccgtcagccgatagcccgcatacatggccatcatggtcagcagcggataaagccccaactgacggcctacgatccgcggctcggcgatctgccggatcacgatcacgcccacataggcgcaggccatgaacacccccatgcccgtgctgccgccgataaacgacagcaaactccacgggatcagaaacagccccgcgccgatcaccggcagcgcgtcggccacgccgatcaacacccctgccgccagcccgtagggaatgccgtaaatcacaaaagccagcgtcagcgccgccgtcacgatcagtgacacggtcagttggctttttacttgcccaaataaggccgtcagcaggtttttccgtacgaatccgtaccgctgccgccagctcacgggcagcgtccgacgaaaaaatccccggatgcgctcccggtcggcggaaaaataataggtgcccatcaccgtcagcaccacgcccagcagggcgttaggcagggacattgccgtggaaaacgctccgccagtgaccgccgccgaaaggcttcccgcccagcggagaaggctctgcttcagcgcgtccaacgcggcggcgatgccctgcgaaacgctggatggcaataggcggttcaggtcttcgtaccatcgctgcaaatagggcagggctacgctgtccacccattgaatgaactggggcacattttttacaagcccggtgaactggatagcgagctgccgcagcaggcccgccagcgccgctcccaccacgccgaacagcagcagaatggcgatgggcgcgccgatcttccggcggatatggaatttgcccacgcccctttccagccgaaggagcagcggttccagcagcatggcacacaatagcgctgcggcgaagggccacacatacggcagcgcggcccccagcgccgcgacggccagcagggtgccgcccagcagcgccgcccggcggggcagaccgttccaacggcggttccagtttcgcagtccctccaacgtcttgccctcccgatggtttttgaggcaaaaaagccccggcgggaatcatttttcccgccggggccgaagctatgcttttttagaaatgtccgccgcctccgccgtggctggtgccgctggaagaggtatgcacgccgcttccgccgcctcccccatggctgccggtattttccggcgggtctggcttgcgcacccgggtggtggtggtgcgcagatagttgtcctcctgatcggtcagtttcatggcaccgttatcctgataggaataatgataggtgctgcccttcaggctgtagcgcgaccgaacgcaggccacgtagatcaggcacactgcgaagccaatgaccagcgccagaatgatctcattcttggtgagggccttatgccgggccgtgagccgctggccggtgaccacatcgtagcggtactgtccctcggggatgcccgcccggacgtactgccgcacgatggagatcatctgggacgcgccctgcgcgtaagcgcccgccgccagatagcgggtcacttcgtcgatggcattttcgatccgtgcgtcggtcatgtagtcgatcatcgcgccggtagtggacaggtaatgatagcgatcgtccatgtcgatgtagtacagaatgccgcttttttcctcatccagcccgaagccgccctgctcatagaacgcgtcggcgatctgctgggcgctgcccttgtggctttcgttggacgtgacgatgacgaaatccatgcccgtttcttcctgaaaggcctgaatttcctgttccagctcctgaacctccgaggcggtaaacagttccgcccggtcgaagacccggtcgccgtccgccagcgcgacgcttgcccacaggcaggacagaaccgacagcagggcaaaaatccgttgataaattcttctcatcgttctctgcccccttagaaaagaaaataagccagcacgcagtagagagcggccacgatcagacccgccagcagcccgtgccgccacagacggcccatgtccaccggcagcttgccgcacacctgcccggtacagccgttcatgacatagtaatagggctcgtctttgttcttcttgttgggataggtcagcacccacgtaggcagcagcacgtacttggtcttgatcttcttcaccgccgccgtggtgttggcggagcaggtctgatactggctggctgtgtcccgcagcatggagttcatgtatccctgcaattcctgctcgatctcctgccggtagctgtccgcttccagatcccggcgctcagccagaaagccggaaaggaacgcgccggagaagggctttgcgtcctccagcgggaaggggtgaacgccctcggtcagcttacggttggccttggacagcgcagggcgcagaatatccttgaacacaaatcgtccctcccggcgcacatggtagtgccgggtgttggtgaccacatatttgccctcgtcaaacacgtcggaagtggtggcttcgccgtccagaacgccttccgtctggcattcgctgacgaagtgcgggtagtagacgccgctcatttcctgaatctgcgccttggaaaagaactttttgggaacgaatttccgggtgcggatccattcggaaatttcctcgatggccttctccctgccgatggtaaagggcagcacctcgtccggcttcatgtcggccgtcagcttgccctgcagcaccacggggctgtggcagtagtagcagtgggtagccacggtggtttcatcggtcatgatctcgctgccgcagctggggcagtggtagaccacctgcgcgccggaggactgctccgcctctttatccgcttctttctggaaggcctccgccttgcccttcagctccgtctcggggaaagcggaggaacagaaggggcatttccattgctgactgtccgggtcgaaggtcagataagcgccgcaattggggcatttataggttacacccgccatattttcacctcgttgcatggagcgcttcgggaatacgggaatcccgaaggctgattcgtgcgtacagtatagcatgaattttatggtttgacaaatggaggacgagcgttcctgaaaccggctcattcattttggccatctgccgggcggcctactgcccgactggaaaaagcagggccgcccggcagcagcagagcgaccctatccaaagagggttacggatacgtttgtcattttcaatccgactttttgggggagagggaagtggagcattccggggcagccagcatcccggccagcagcatcggtacgccgtagaaggcgatcagcaggtagcgcataatggccaccggcccgatcaggcaggtgaaccacacggtcaggataaaggtaaatgcggccatgtagcccttctggcggcggtaaacggccagcgccagccccgccatggccagccagatctggaaggccgcgtcgctcaacagccgcacgcccggcagtcccagcagggtaagggtcttgtcgtactggcggtacagctccttcagcgcgggaatgcggctttgctccaccagcgggaaggtctcctccattacgctgacccgggattcggtgtccagatagtagatcatctcggagccgggcagcagatagggcaggttctggatcaggaacgcttccacgtagggcttgagattcaccggcagcatccgcgcccacagggacaggatatcgcccatccgttcctccaccacatcgtaatcgctggcccacttgaccgggtcggccagcaccggagaataatattccgcaaagccgtctgggtacagggtctcgatcagctcccgcgcttcatcgtcgggcagcgcatcggggttctgctgcagggtgcgggccatctgctgcagcgggatggacagcatctccacccggtcgatgttctccgcctccaacgccgctttcaagccggcattcacgccgaagtacagcgccatacaggccagcagcagcgcgcccagccgcagccgcgcccctttggcccacgccacggcaaagggcaagagcagggccagcgcgtacacgccgttattgcgcatcagcagcatcagcacggtaataaccgtcagccgaatcacgcgccatggggagcgcagcgccttgaagccttcctgccacacgtccaccaattccaacagaaacaacaggcccaatccgctgaacagaatgtccttctggcagctgaacgagaaaatggagtaaagcgggaacagggcgaacagcaacgtaacgcaaacgcggctccaaaggggcgcgcggtgcttgcgcagccagcgcagcgcccatgccatcatggcggccagcagcaccatctgcaccatggaatagatcgccacacccagcgtgctgtagccctccgggtccaaatccacgccggtcatgacgcaccagcccagcagcagcgtatgcagcagcgggtgatgggcgctgaaatcctcgttataatactgataaaactgtgtcgcggagtcggccgcgaaaatgcccggccagaaggccagccataccggcagccagcacaccagcagcagggcgaaggcaaaagcccagttgcccaatacccggctaaaaacagactccgctttcgccggggacgcggaaaggcggttcatgccttgaaacagcagcgccagcgccgcgccgtacactgccgtgaagctcgccgccgccagcaccccgtacaggaacggcagccatcggaacgccgaaaagccattattggcccgcacgtcggcacagaccaccgtcactacggcgaacatcccgcccagaaaataggccgtccgattcagccgccggtcggtaatctgaaaggcgtttttcagcagcaggtacagccccgccagcaggataagcgtgatcgcgctgcccgcaaacaggctgtcgttctccgtcagcccgtacccattgggcatccgccaggccgccacggcggcgatcgccaaagcggcggcgttggtttgccgagacgtaagctgtttcatggggattcttcctttcctttgtttgctatgcattcgaattttaccgtcatggaaaagccgttcattcacttctggaaacttcgttcactgccggcgtggaacattcgatatacgccgccgttggcgctcgtgcccatctcgtgttttcttcattgcacaaggcgcttcgagaaaccgaaggccggacgacccacacagtatatcatgattttttccgtttgacaaacctcccaatcagcgggaaacgaagcccgttttcccccgcagcgcatgacctcccgcgttttggcgtacactttttccggtttcgttttgacatcctgcccaaactgcgatacaatcagaatcagaatttgacccccgggtttggggaacgaaaggagacgcgccatggaagcgggagccatgcaaacgctgtacgaacggctgctgccggttttctccaaaaaacagctgatggaaaacgtccccatgagccgttataccacactgcatctgggcggcccggctcagcttctgtgcgagccggacgggccggaacagctgagcgccgcgtttcaggcggcccgggagctgaacgtgccggtcacgctgatcggcaacggctccaacctgctggtgaaggacggcggcatccgtgggctggtcgttcatctgggagagcgtttttccgaggtcagcgaccccgcgcccctgccggacggccgcttcgccatcacagcgcaggcgggcgcgtccctgcagaagctcagcaaggcggcggcggatcacagcctgaccgggttggaatttgccgcgggcattcccggcaccgtgggcggcgcggcctatatgaacgcgggcgcttacggcggtgagctgaaagacgtggtcacgctggtgacagccatggagcagagcggcaagaccgtggcctataccccagccgagctgcaaatgagctaccgccattcccgtttttcggacgaagccgtgcccagcgccattctgtcggtaacggttgccctgcaccccggcgatctggagaccatccgcgccaccattcgggagttcgccgcccgccgccgggaaaagcagcccctgtccgtccccggctgcggcagcaccttcaagcggcccgaaggccagtttgccgggacgctgatcgacaacgccggtctcaagggtctgcggatcggcggggccagcgtctccaccctgcacgcgggctttctggtcaatgacgaaaacggcactgccgccgattatctggccctgatcgccgccgtacagaaggcggtgcaggaggacagcggcgtatggctggagccggaggtccgcattctgggcgaggatgcgccggtttcgcccgcgtaatcacggagaaacaaagcagccaatacaaacgaggtgcagagatatgcagtacttgatcctgaccgggatgagcggcgcgggcaagaccgtcgccatccgttatctggaagaccttggcgcgctgtgtgtggataacctgccgcccatgatgctggtgccctttatggaggcctgtcagaacaccaatctgcacaagcccatgatcgccatcgcggcggacgtgcgctccggcgagtttttcgacgccaaggccgtgacccgcatgatcgacgaggcccggctggtgggtttccacatcgacacgctgtttttcgaggccagcgacgaggtactcatcaaccgttacaaggagacccgccgggagcatcccctgagcggcgagggcctttcgctggaagaagccatccgggaggagcgcagccgcctgcagcccctgaaggaagcggcgaaccatctgtttgacaccagcaatctgcggccccgtgccctgcagaagatgctcaatcagatcgtgctgcacgccggggaggaatctcccctgcgggtggaggtgctcagcttcggcttcaagcggggcattccccgggaaggcgatctggtcttcgacgtgcgcttcctgcccaatcccttctacattcccgagctgggccaccacaccggactggatcaggatgtgaaggactttgtgctggggcaccccgtcacgaaagaatttctggaaaaatgcatggacatgctccgcttcctgctgcccaactacatcaacgagggcaagcatcggctggtgatcgccatcggctgtaccggcggcgcgcaccgcagcgtggccatcgcggagtatgtggccgccgagcttcagaaattgggctatggagtcaacgtcaaccaccgggacattgcgctggagcaggctcactgggccgcccgcagcgagtatcagaagggcgagccgtaacgtttcggtttttcaaccccgtttttccgtccagcttgcggaaaagcggggttttttgatttgcccggtttcttctgtttcgggccaaaaccggcaaaaagtttgtcaaaaaatgtcaaatttatttcgccgcatcaatcgaaacctaccatgaaatagcagattcgttgacaagtcatgacgcgcatgttatacttgcaacagttttcaggcgaaatgaggcggcattttaccggcatttcaagtcctgcaagggcatacggcgtttcaatgttccttaacattttgtaatatatcaatttcatattccgtgcagggaaggggtatattacacgatgaacaggcaatatggaggcgtcggtattggagaagcagcttaaaatcgtatactactacaacagcgggttttcggtgcaggtgggcagcacgctgttcatcttcgactactgggaaggcgaaaatcggagcctttccgcgtcagtccgcatccggccggagttgttgaaggcctacgaacgcatctacgtcttcatcagccacgcccaccccgaccatctggatcccgtggtatacacgtgggccaaggaagggctgcccattacctacatcgtttccagcgatatgcccatcggcaccatcggcaaacggctggctcccctgcaggagaagcagctgacgcaggacatctgggtcaaggcctatcagtccaccgatctgggcgtggcctttctggtggaggcctacgggctgcgcatttttcacgcgggcgacctgaatctctggcactggcggcaggaaagtactctgcgggagatcgaagccgccgaaaaggatttctacgacgcgctggagcccctgaagggcgagcacatcgatgtagccatgttcccggtggatccccggcaggggctgatgtacgacgcgggcgcgaaccacttcatcctgaccgagaagccgcgggtctttattcccatgcactggcaggaccggcccgaagtggccatcgactttgcccgccgggccaagaccgcccagacggaggtgttggccatggtcaagccgggcacggtggcgaacctgaccttcacggacgatctgctggacatccatgtcatcgagccccccaaggatctggaggacctcccccccacccccatgcgccgtcccgccctctacgacctcaacggcgagaccgatccctttcaggacaccgatctccccgtcgacatccaagggggctgagccccctttcggactgcgcgccataggcgcgcaggggcgtagggagacatggagcttggccgaggttttaccgccgctcggcaacgggcctcgcgactcgccggtctggtgtgttttccttgtttgttgaatagaaaagaccgccattcggcgacaggcctcatggctcgcacaaggggcagtgccccttgaccccgaactgcgcgcctttggcgcgcaggggcgtagagcgacatgcggcttggccgggttttaccgccgtggcacgacaggtgccacggctcgccggtctggtgtggtttccctgttcgttgaatagaacaacgggcctcatggctcgctaaaaaggccagcgtggataggaatccatgctgggtttttgcgttgcaaaaatatccactttacaccaaagcattccaagcgacactatttgcgtatggatagtgccagctgcaaagaaaaaatcaatcctgtttttctgtgctgcgaagccagcccagccgcatcgaagcatcccaagcgccgctatttgagtctgcccagcgccacctgcgggggagcagagcggcgataggcagcggagggaaaaaggcccgcccattttgacggcggaaaaagg

SEQ ID NO: 864 - DNA, 32759 bp, Unknown
  16S sequences of unknown bacteria
gacacggtgaagctgttcatcacggcgtacagcacggcaaagctgaggcctgcgcccaggttgaaggcgccggcgttcatgccgggcaggtagccggggttgtccttcggcgagagcacgatgcccaggccgttgagcatgatgttggcggtgccggcataggagatgccgagcacgacggagatgacaacgagggcggcgatgctcgggttgttggccacgaagatgccgaacagcgcgccgacgatggtcaccacgaggcccgcgcgcagcacgacgtggtagccgaacttgctcgcgagcacgccggcgaccgggccaaacgccaggccgagcagcgcatagggggtgagcgtcgcaaacgagacggtggaggcgctcatgccgccccacagcgtcgtgtcctgcgcgatggcggggacgacgccgttcatgatggcgaagacgccggtcatggtgagcagcgtggtgacgagcaggccccaggtgcggcgctgcttcatgtagtgcgtcgagaccatgggcgcggcagcgctgccctcatggcgccagaacaccacgaagaagacggcggcgatgacgatgaacacgacgaccaagatccagttggcgcccgccagtttctcgatctcgttgatggccaggtatgcggcaagaaacgcgatgccgagcgtgatggcaccggcccagtccatcttgggcgtgtcttctgcggtgctctcgcgcacggcgagcgcgacgaagacgacggcgagcgccgcgatgactgccatcatgatgaacacggagcggaagccgaacgtgccggcgagccagccgccgtacgtggtgtcgataccaccgacacggtcgacgccgcccgcgatgccgccgttgacggaggtcagaatcgacatgaggcgcgtgtaacgcttctcctcggtcacgcgctggtgcaagatgatcaggcacatcgggacgacggggcccgcgacgccctggaagatgcggccgatcatgagaacggtcacgttgggcgcgatcgccgagatgagacagccgatgcccgtgagggcgagcatgccggacaggaccttcttgcggcccttgaggtcggcgaggcgcgggaggaacagcgagaacagtgccgcggcggtgaagaacaccgtctgcgtgagcccgatggcatctgccgtcgtgttgagctcgttttgcatcgtgacgagcgcaggcgagagcatcgaggcgttgagctggaaggcgaagatggcgacgagcagggccgccatgagcgcggcgatgctcgccgctccgccgttgtcggtcttttgggtggtgctttcagacatcggtactaaccaatcctttcgatggcatcggtgacgagatcccagaacttgtcaaagtcgagcttgacggcaacctgggtgtggcactgttcggcggagggctccggaccgcgcaggtcggcgacggtcatgcccgtggtgagcgtgccggtgagctcgacgtcgaccgggcagcgacgcgtcgtcatgaccgtggggtcgatgaggtaggcgacggtgcaggggtcgtggaccggcgggtcgacgaagtcctggttgtcctggtaggtcttgcggaagaagtccatgaggccgctcacgaactgcgccaggtcggtgccgacgccctcgatgcgcttttgcaccgcaggcgtgcacagcgcctggtgcgtgaggtcgaggccgaccatggtgacgggccacggttcgttgaagacgacgtgcgctgcctcggggtcgaccttgatgttgaactcggcgacggcgctccagttgccgacgtggtagccaccgcccatgaggacgacttccttgacgcgctcgacgatgcggggctccatgcgcacggccatcgcgatgttggtgagcgggccggtgggcacgagcgtgatggtgccgggctcgttttccatgatggtcttcacgatgaagttgaccgcgtgcatgtcctcgagcgggcgggtcggcacgggcagctcgacgccgtcgaggccggtctggccgtggatggaggcggcgacttcctgcgggcggacgagcgggcggtcgcagccggcgtacaccgggatgtcggtgcggtgcgccttttcgagcacggcgcgggcgttgtaggtgaccttgtcgaggctctggttgccgccgacggtggtgacggcaagcaggtcgatgttggggttcccggcggcaagcaggatggcgacggcgtcgtcgtggcctgggtcgctgtcgaggatgattttcctcgccatgtggttcctctccctagcgggcttgtttgacgaagcggtagtttaacgcagctcgagggggtaatgcacgtcgattgcgctcgagaggcagagtgcgcgagcgcggggagactataatcgttgcaagaacaacgagagcgcctgcctcccgcctgcggcggtgccggcgcgtgcgcaaaaggagggcaggacatgcctgcggatatcggcacactcgaacactattacgggcagcttccggtagagggaggccttgacgcgcgctgcgacatgcagctcgcgaacagcccccgctcccggcgcgtgatcgacctcgggtgtcgtcgcggcaagggcgtctacaagcttgcggagatggtcggccccaaggggcttgccgtgggcgtggactggcgcgcgggctttgtcgaggcggccaaggccggcgtggaacacgcagcgcaaaagggcggggtcgcgcccgatgccatgcagttcgtgctctcgtaccccgagacgctcgcgcaaagcggtctcgagcctgggagcttcgacgtcgtctacgtcaacgccgtgctcaacctgctcttcgaccccaagctcgcgctcaagaacatgagctacctgctcaagcccggtggaattctcgtctacaacggcgtgctcgccacgcgtccgcgcgacgaaggggtgcgcgagcaggcgcgccggatcggcaacgccgtccaaagcgcgcccgagcgcaagcagttcgtgagctggcttgcccaggcgggcttcaacatggtctcgttcgtcaacaacaacgagcagcgcatcgagccgagtgcgggggcagatgagggcgcggcggttcccgtcgtggaaacggacgagcccgtcagctttgtgagcggcgtgttcgaggtttgcaaggacgaccacgtggactaccacacgcaggatttgaagcaggacatcagccagttcaggtgatcgccacgtagaattgggatgcgcacgggggctgccgtttcgggcagcccccgccgcagagggcacgagcgccaaggagctgcacatgaacatcgaccatctcaaggaattcgcccatctggcgaacacgctcaacttctccacgaccgcgcagcatttctacgtctcgacctcggtcatcagcaggcacatcgcgtcgcttgaagacgagctcggcttcaagctgttcgaccgcggcaacggacacgtcaagctcaccaaggcaggggagatgttcgtccaggacgcgcgcgtcatcttgcacgattacgacaacgccatcgagcggctctccgtgctcaactcgggcaccgagtcgattgtgcgcgtgggctacctgcacgaggcggcgcgccccttcatcgcgcgcttcgtgcgctacatcaagtcgcactaccccaagatcgccgtcgtgtttcgcggcatgaagttctcggaactgtacagcgcgctcgacgagcaccgcgtggacctcaacttcatgctcgacatgtacccctatgggcatcacgattaccattccgagctcatctacgaagagcagctgtacgtggtggtcaacaaggaaaacccgcttgccaggcaggcggacggcgtgacgctcaaggacctggtgggccagaacctgctgctgcccaacgatcttgcctaccccgggctcgccgactacatccgcagcgtggtctcgcatgagccggcgctcaagaccgacaagacctacgtcgacctcgagacgctctacctcgaggtggagatcaacaacttcgtggggttctcgtcggggttcaaccggccgatctatggggaccgggtcgcgtttctgctgctcaaggacgtggagacgaagatcgacatctgcgcgttttggcgcgacagcctggagggcagcgtgctcaaggcgtgcgaggaggccatcggcgtctgtcgcaagaacatccacccctgggcaccggggcacatgggagcgacgggcaagacgctcacgcagatgctggacgataaatgatgcacgggcagcgggacgctccgcttgactcgcatcgatatggcgctatactttcagtcaaacatatgaacacatgctcatatgttcagtaagaaggagaatgacatggcagacgccgagagcgcacgatttgacgacgccaaggaggcggccatcgagcagatgcccgacgaggagctgctctacgacctcgccgacctgttcaaggtgttcgccgacaccacgcgcatcaagattctgtacgccttgatggggcaggacctgagcgtgggcgacatcgccgaggtagtgggcgtgtcgcaaagcgctgtctcgcatcagctgcgcagcctgaagcaagcgcacctggtcaagttccagcgcgagggcaagcaggtggtctactccctcagcgacgaccatgtctacacgatgctctcgcagggcctgacccacgtctgcgaatgagacgaggggccgtgggtatcgtgccatctttatgggaacttggaggaccgatgaaacgtatgtacaagctcgaaggcgagctctgcggcaattgcgccgcgaagatccaggacaagatcgcgcggctcgacggcgtgaacagggcgtctgtcaatttcatgaccatgaagttcaccctcgatgccgacgatgacaagtacccggcgctgttcgaggagtccaagcgcgtcttcaacgcgatcgaaccgacctgcgccatcaaggcgtagccccgcctcaaggcgtactgccagctcaaagcaccaaaggagcactatatgtcccagcaccagaagcggacgctcgcgcgcgtcctcgtagcccttgcgctctttttcgccatcatggccgtcgacaagctcgggtttctcgacgttcccggcggcctgtggatcgagttcggcctgtacctgatcccgtacctcatcgccggttacgacgtgctgggccgtgccgtgcacggcatcgcgcacgggcaggtcttcgacgagaacttcctcatgaccatcgccaccgtgggcgcgtttgcgctggtgtttttcccggagagcaacccgcatatggccgaaggcgccgcggtcatgctgttctaccaggtgggcgagtggttccagagctacgccgtgggcaagtcgcgcaagtcgattgcagacatgatggacatcgcgcccgagtacgccaacctccaacgcgacggcaagctcgaggaagtcgatccgtacgacgtggaggtcggcgacacgatcgtcatcaagcccggcgagcgcgttccgctggacggcgtggtgctcgagggctcctcgcagctcgacaccgcggcgctgaccggcgagtccatcccgcgcgtggtcggcgtcggggccaaggtgatcagcggctgcatcaacaagggcggcgtgctgacggtgcgcgtcgagaagccgtatggcgagtcgacggtgcagcgcatcctcgagctggtggaggaagcgtccgagcgcaaggcccgcacggagaacttcatcacgcgctttgcccgctactacacgcccatcgtggtcgggcttgccctggtgctcgcgctggtcccgccgctgctgttcgggcagccgcttgccaagtgcgtcgaaagcgcgctcatcttccttgtcgtgagctgtccgtgcgcgctcgtcatcagcgtgccgctctcgttctttggcggcatcggcgcggcgtcgaagatcggcgtgctcgtcaagggctcgagctatctcgagacgctcggcggcgtgcagaccgtcgtcttcgacaagaccggcacgctcacgaacggcgtcttcacggtcgtggcggtgcatcccggcaagggcgtggatcccgagctcgcgctctcgtacgccgcgcatgccgaggcgtactcgacgcacccgatcgcgctttcgctcagggagagctacagcggggtcatcgaccggagcaagatcgagaacgtggaagagcgcagcggccagggcgtgtccgcggtggtggactcgcataccgtgctcgtgggcaacggcaagctcatggaggcggaacgggtcccgttcgacgactgcgagctcgtcggcacgatcttgcacgtggcaatcgacggcgcctatgcggggcacatcgtcatcgccgacgtggtcaaggaggacgcgaaggagaccatcgcgcgcctgcatgccgtgggtgtcaagaaatgcgtgatgctgacgggggaccgcgaggaggtcgcggcggcggtcgcccgcgagctgggcatcgacgagtaccgtgcgcagtgcctgccggctgacaaggtccacgaggtagagcggctgctcgcagagctcggtgcgaaggacggagccgacgaggcagaggtcaacgcgaagcgccccaagctcgcgtttgtgggcgatggcatcaacgacgcgcccgtgctcatgcgcgccgacatcggcatcgcgatgggcggcatggggtcggatgcggcaatcgaggcggcagacgtcgtgctcatggaagacgagccgtcaaagatcgcgacgaccatcgcgatcgcacgcaagaccatgcgcatcgtctggcagaacatcatcttcgccatcggggtgaaggtgctgatcatgatcttggcgctgccgtttatcgggctcgcgaacatgtggcttgccgtgttcggggacgtgggcgtcgcctgcatcgcgatcttgaacgccatgcgcgcgctccgcgtccgctgacgccgggccccgcgcacgtcgcggtgctagtcgttgagcatgtaggcgatgtccatcacgtgctttgcgatgcgatgagtcgtctgggcggggcctttcacggcaaagtagttgttgtacagcattttcgcgatggggccgacgatgaaggtgttgatgaggaacgcggcggcaaccgagatggggagcgcgtgcgcgaggtacgcgaggtagccgtcggtaccatggagcagcagcgtcacgatcgagctcatgatgggtgccatcacgcacacgttgcacagcgtgatgcccaggcccttcttgaagccggtgaggttcgggatgacgagcttgccgatgagcatgtcggtgaacttgccgacgagctgtgtcttcaccagaaacgcgatgcagaagacgatggggatgagccacacgccgtgcgggtagaagcccaggccgctgtggagcacgccgttgaagttgaccatgaaggtgaccattccgcctaccatgagcagcgtaaacgtcttcttctccacgccgccgcgaggcacaggcgctgtgcccttgagacaatcgagataggtgacgcgtggggattctgtcgtttcgagctcgctcataggttctggtggtctccttctccgaagagtagggtgccaaaaggcgccgcgtctttcggtgtcttaacaagtaaaaagttgaatggggtttgcgtctggatggacgcaacacaagtatacctgctgaattggcgaaaacctcccacgctgcgttgcagaatctgcaacgcatgttgcgcgttggctgcaaagccgtgccgcttgctccgccgaagtttcgactaaacgcgtacggagcggcaagaaagggtactatgttgagccatggcttacgaacgaaacaatcgaagcgctgacggcaggtactcgggtgggagaagctcttcccttcggggcggcttagatgcgcgccgtcatgccggtgacacgcgcgcccgcgctgcctcagcatacagcagggcggtcgagcaatcgaagacctcggttcacgggcacggctcagagcacgcgcacacggcatcatcggaccgtgggacgtaccggggaaggcactacagcgctcgcgctggccgtcacagcgcatcttccaggtacgcgcgcgattcgtacacgagctcccgctccagccatgcgcacgagcacgaacgcgacgagcgcagcggctccaacacgcgccgccatgacgagggtcgacgctttgcgggcgggcgcgggctcaaaccgtatgtggcggcgcttatcgcggtggtcgtcatcgtcgtcatcgtcgtcatcgcgaacccgttcaaggcggcaaacaccatcgccgacaagcagggcactagcatgaacgccacaaacagcgcggcttacgattcttcggcagacgatgcgctgccgacgccgatcatcgccgagagcaacggcgtccagctgcattcggcggttgccgccaacgacctgaccgagatcctcatccacaacgcgtcgtatgcgtatgcggcgccgctcacgaccaagctcactgaggcgacgaacaccgaggtcatggccaatcacggcacagggcgcaacgcggacgagcagccgacgggcgacaagtggatgaccggcgagtttatccgctgcttccgctcgaccaacgcggggcccaagatgagcgccatcgactgcggcggcaaagaggggacgacggtctactcgcccgtgagcggcaaggtcgtgctggtcaagcagtacaagctctatgagaagtacgacgattaccagattcacatccagcccgatgggcatcccgagctcgacgtcgtgctgatccacctgaccgacgtgtccgtgaaggcgggcgaccaggtgacggcgggggagagcaagatggcgaagatccgcgacgtctacgccctgatcggcgaggagatgcagctcaagcagtacacggcggagggcgacaacggcaaccacacccatattcaggtgaaccttgcgaacgacccgagttaccacgggctcgatgacttgaagcagggaacggctgcttcgggagcttcggcaagctagcgtatttgcaggtcaagcgtttgcggagcgcaggccacgccgctgtgaaataaattttgaaatagttcttgcattttcatagtcgggcgcgtaatataactcttcgcgttcgaaagaacgcttgctcacacacattgcggggtggagcagtctggtagctcgccgggctcataacccggaggtcgttggttcaaatccagcccccgcgaccaaattatcagccgcttacgagcggcttttttcttgcaaaaccgcaggtcagccacatgttcagctgacctgttttgatttatcggagtgccctttgcgcagtattttgcccgcaggtccgcccgtatgggacagcacgcggcgacgcctgcaatcgagaggctacaggcacatggccatgtaaagcggcaggtacgtcaggttgccctcatgcgcgaggttcttcgtgtacacgatgaagcgctcgttgatcttgatgtcgtacttctcggtgaagtagtcgaacgacttgtgactcttgtatcccgaggacttcacctctatggggcacagccgcttgccacggacgatcaggaagtcgacctcataggggctttccctcttcgcctcggccggcctatagctgtactcgtggaagtagagcccgtggccgttcgcggcaagggtctgggcgacggcgttctcgacgaccatgccctcgttgatgccgagcctgccggtcacgagcgcccgatacagatcgtcgcccgcttgcgggtcgccgcgcatcacctgactcaccagcagcccagtgtcccccagatacactttgaagttgccccgatcctcgttcaggccgagcgccacctcgggagccgacacgttgtagcacacgttggcaatcatggattcgccgaggaaagcgatcgacccggacaggttccgggcgcgcgcggcggcatcgacggtcgcgaaccggaagcgcgagttatggtgcgacagctggctcggaatcgacttgaagacctcggccgcgcggtcggacatctcgtcgtcgtgctttcccaggtcctcctcgtacaggtcgagtatcgcccgtttggcatggtcgatggcagcgaaatcgtcgcccgccgcgagcctctccaccgcctgcggcatcccgccgacggccatgtaggtgcggaagtcgcgcatgacgcggcggtgggcagcgtcgggcaagggctggcgggattcgaacgcctcgcggatggccggtgcggtgacgtcgtcgcccaaggcccagcagaactcctcgaaatccatcggatgcatcttcacgcgctcctcctcggaggggatgaggatgtccttcacgttcttccttatcgagatgagcgaccccgtctcgatgtagtggtagcgtccgtccttgacaagggcttttatagcctgacgggcgggagggaacagctggacctcgtcgaaaataatcacggcgtcgcccttgggcaggctcttgcccttcaggaggaagaggttgcggaagaatgcgtcggggttgccgatgttggcgaagttctcacgtatgtcgtcgccttccagcgagaagtctatcggcaggtagtcagcgtagttctcctgcgcgaagcgctccgccaccgtgcttttcccaacacgccgcgccccttcgatcagaatcgccgtcctgccgtttgagaccctcttccactcggcgagcctgtcgtatgccttgcgtttgaagaaaccggccatctgcatcctcctgagccgaaaacattgaatgtttgagcctatcatcgcacgaaaacaggaaatgttgctctcatatcaccgaaaccggaaaatgtttttgccccgattcgcacgaaagcgataaattagaggagcttgaggactatagacgcaaatgattggggtcgggggtcgggattgtggcgcctatgacatccattcctaaaaaatgaaagaattccaaaacttaggaatagaagaatcggcgaagcaatgaggggcctcttgaagagtggctccgccgacatcaaggcgacgatcggctcctgttttcagccgacctcctttcatgtttgcgggcgctgccggcgatacatgcaaaactagagcacaaggaacgctacgagcggcatcgtgaacacgcttgccacaagcgtcacctcaaggatgcccgaagcatattcgccctcgttgccgttttgcgttgcgaccatgggaacgacagtcattaccggcaaggccatgattaatacgaacgccgttacgagctcggttggcaatgccgttagcagcaagagctttcctgccaaaacgggtagcaagatcatcttcaccacgatgcctacgtagagctcgggtcgcttgagtacgctcaacgagttggagaatcccgccagcgcgcccaggtaaatcatgcctagtgcgcttgtgggtgccgataccatgttgagcgccgtcagcacggggcccggtagtttgatgccgatgaaaataaagacgaagcttaagagcatggcgatgatattgggcgagagcaccacctgcttgacgaatgcaagactgaacttcctgccacccagtcggtcgcgcgctgtggacagccacacgccaaacgaccagaacacaagctggtcgacgatagaaaacaccatgatgtacatggctccggtttcggggaacagcgctgtgaacagcggaatcgccacgaagaaggtgttcccgaacatgaagctgaacatgaagacgcggtctttgtcctgcggtacgcgcagcagcttcgccagcagggacagcacggctgtgattgccgcgtaaaacgcagcggataggggtatgagcatcagattgtcgatgatcatctgcgctgtggtcgacgacgccatcatggtgaacaccgtaacgggtaggaacaccttggtcacgagcgtcgcgtaatcgccgaggtactccttgcggataaccgatttcttcgccaggaaaagacccagcagaaagattgcgaagaagatgagcatgcgctcgagcgtgatgcagaaaaccatgattctccaatcgatgtgatatcgagtgaattctcgaacaattgctggtatgtttccgaacgttttcgtacgctgtgtacggaaataaaacccgcagtatcctaaacgggcagggttgcggaaagccataggagcttgtatgtcggatatccgaaacgaacggaccgagcaggcgattcggcaggcgatgctggatttgctgaagaagaagccgttcgattgtctgagcgtcactgaagtcgccacggcagcgggtgtcagccgctcgacgttctacgcccatttcgcaaatctgcaggaagtattcgaagcacttgcaagggagtttcacaatacgcttcgcgacctggacgttcagttgcgctgcggtgcagatgctgaagagacgggcatgccgaagcgaccctactgcatggcactgcgcgatgcggggccatacgaggcgctggtgaaggatccgcattatctttcggaattgaaaaacgttctcggcgatgttctgggaccttgggctgagcagaacatctactgcgcgaccggcataggcgccgaccaagcttcagctctgctccttttccagatgacaggatgctacaccgctgcaatgagctgcaacgacgatgtcgcctgggagaaaacgcgcgtttcgatagatgcattcatccgagcgggtctcggagggttgcgtcagcaacagccgatggaataatgcactgccgacctcttttcatgtcttcggacgctgtcagtgatgcctccgaaagcgcctctatgggcaaatcatgggcaaatctgcatgatactggttgatacggcttgatgctggttgcacgaaaatcggcgtttttcagggaaaataagtaaccgttgatactggttgatgactaacgagcggcctcataacccgaaaggtcgttggttcgaatccagaccccgcgaccaagacacctaacctgacctgcataaacggtcaggcttttttgttgaccgacatccgaccgacaatccaaccgacattctaccgacaaaaaatttcggggtcgagcggaaaatcgcggaaaaacgtcttcccatgtgcgctccagcgcaaccaagggttttagcttgctccgtggcgcaaaagtggtaacggcacggggcaaccatcttcgcgctccagcgcaaccttcgacgcgattgcttgcgccatggagcaaccgtattgaactccttctgaataaatgaattcccgaacgtcccgaagcagcatctcaatgccctggttttccacaggcgtcatgtcagccccttcgctgcagcgtgcccgattcggtcccatgcgagccgaatgcgtgtcgactcccccatggaagcacggacacgcattaccgtcatcggcgaagcctcagatgaatgggacgtgggaggacagacatggaagagaatatagtggcgcggtgagcctgggcacgatggaggccgagcagcagcacgtctacggcgctcgcatggactccgtgccgtgcggctggagcgagcgcggcgcagacgcgatggcgagagtcaggagcaggcgggcgtcgctcgcggcatagccgcgaccggatggtagggtgcgacccccatcttcgttacgccgaccttttcacgcatgaagccctccaaggagcgtagggttgttacgtaacgccgcatgttctctgccctgcaagttctctgaaaggaagagagatgaaagctggtttacggtcgttacggagaacgcaggcatcgaggccgctttggagcaaaccggcggcatgatgagcgcctgcgggaccgaggccgccccagagctgcgtcagggcaacggtgaggacgacccgggccttatggaggcgctggtcaccaacaacgatatgggccagggtgagtataacatcggcttctacgacaacgacctagccatgccggaggtctcctggggacgggtgactgtaccggacctggagggcgtcagggagtgtacttcccagaacaggggcaagctggccacaatcgaagctcctgagaaggacaggcccctggaggacctcatgaaggaggccagggagaaagctgccgagaagctcagggagcttgaggacagcagatccgccaagtccaaggaccatgattcaagagagcgatgagagacgaggtgcctaagggccgcattgtgcggaaatcaggcgcctctttgcgtctgagggccgcgcagaaacggagcatgtggatgagcaagaagagaaacaccagcctacggcagtcgctgaccgtatctgtgcgcggcatcgtgctgctggcgtgcctggctgtgattggccggatgctggccccgtacttccaagcggagcacagcatggacgagctccgcgcagctgtcaccgaaagcacagaaggggaggacttcccggtgatcgactgggataagctgcagcggcagaaccccgacatctgcggctggatcgtggttccgggtacgggcatcgactaccccatcgtggcggcaccgaaggacgaccccgactactacctccatcgcgatatcgacggcagcgagagcgtggccggcgtcccgtacctggatgcggcgtgcgagcgcgactggggctctaagctctccgccatctacggccaccacctgatcaacgacggcatgttctccccgctggccaagtactccaacgagtcctttttcaacaagcaccgcacgatctatctgctgacaccccaggagagtatgccgctcaccgtggtggcagccaacgtagtggatgctgacgtagagcagctccgtctcaagttcgctgatggcgacgacttccacacgtattggcgcaaactgctcaagggctccgagatcgtcggcaacgacgtgtacaagacccccgagcaagtcttctgtttcatggcctgcaactatgaaacaaacgacaaccgcacactcgttatgaccactcgctcaattgtctaagctggcacctgcagcagaccctctgtcagcccttgccgaagaacgacttgaggcacacgagggccttgtggagggatcaagctctatgtggagctgacggagggggagtaggtgatgagcttgcgttggttcaggtgacgagagcacttcactgcattagcattgttgaagacatggtccggtgggggcacgtgtgaagaactgctacggcgtcactacttactctgcccaggcaatcttgggattattgatgctagcgctatcgccatcccggagattcaacgtcctttcgcgtggtcgaagacacaagttcgcgatctggttgactctctgtacaggggatatcccaccggttacctcatcacatggaagaaccctgacgtgaaggtgaagggtggtggcactgccgaaggcgagattgtgctcatccgacagactcagccaaacagtcgatgaaggcctctatgtttctgttctcgcgtgacactttccaaagaaccccggtgacggccttgatgtcgatgtcctcgatgggggaaaaggagaagtcgtctgcgaaaaagcgcgcagcgcatccgtaggttagagccacgatatcgttcatttccaggagagggcccatggagccaagccccgtcatctcctcaaccaaggtaacgcccggggcggcctgggaaagccgcgtgctggtttcgcgggccatggtgggataggcggtcgggctcgggacgagcacgcgctctccctcgaggtcagccaacgagaagctgtttctattagcaagtcgatgcttggcgttcgccaagacaccgaactgctcgcgctctaaaattcggaagttcatgttctcgggcaccgcgtccatgagaaatagcgtgatgcctaggtcaatcttgcccgcgcgcaaggcatcgacaaccgcctccgcctccatagggaagatggcgagcttgacgtggggcgagagagccctgaacctctcgcacgcgtccgtgaagaagtggcgtgttgtgtcgggcgtgaacccgatgcttaaagaggaaccgatctcatcctcgagctccgtcacggcgcggcaggcatcgtcgtagcattcgagcacagcttccaccttcttcgcgaagagtctgccggtggcggaaagcctcaccgaatggctgtcacgcacaaaaaggcgcgtgtccagctctcgctcgaggctttgaatgtgcttgctcaaaaccgactgcgatatgaacaaccgcttcgccgtggcggaataactgaggttttgggaaagcaggtgaaactctcgaaggatggacagatccatagactcccacttgaaccctagcctacaaggctgcctactgtcgaaccacactgcagataccatgccagtatatcgatagaaagccgccttcgcaacagggcgaaagcggccttgagctcccggtgtttatcggattgctcccaaggtcacgcccgccggccggacatgatccaacctggcatctggacgaatcagcgaagcttcttgcgcaagacgatccaggtgaccgcgatggagagaatccagcatggaacggggaagatccaagaggccatctggtagccaacggcctgaatgacggaacccatgcccatggaaccgataaacatgcccacgttctgagcgaaagccagggcggcggtggcgccggggatgagcttggagggaacaacctcggtcgtcgcagtccaaagcattgcggtgatgccagtggtgaggacgtttaggatgacgaccaccacgaagccgccgagggagtgaacgctaaagactatcgcagagtaggcaagcatggcgaactggcaaagaaccaggaccttgaagcgggagccgatcttgtcggagatcttgccggcgatggggccccagaacgcgccggcgaagctcatgatggacagcaggattgatcccaccatcaacggcatgttgacctcggttgccacgtaggcgttgaagaagccttgaatgcccatgaacgcgccctcgccgaagaagaaggtgacagccaacgcgatgacggccttgttcgtgaagacggccttgtaatccatcttcgtatcccccgccttctcgtcctcatcgatgtagggatgggagggctcacggtagatggcgaggaacagaaccaacacaacgatgttgaacgcgatgcagaagtaccacacgctcatgaggttgctcgtagcgttgaagatagcggtgaacaggatgggcgcaacagcaagcgcgatggcgacccaggctgcccacaggccgcagggcatgcctcgtttttccttcgggaaccacggagaaatggtgggaacaccggcaacgcccatcaggccgaagccgccgccctcgatgatgcgcgcggtaatgaacgctgggatgcttcctggcatcagggcgccaacgaagttaccaacgagagagcaccccatggcgatgaggatcgtgttcttcgggccgattttcttgatgaaggctgcagcgggaaaagccacgacagctccgagcaagtaaaagacggagatcataaggccgagcattgcctcgccgatgccgtaaacctccatgatgaccgggccgagaaacatggccttacccatgttgaatggcatgcagacgcctacgaggacgaccatgatggcaacaggccatgcacgtcccatgttgctttttgctcctgaacccataacccctccttatgactttctgctcgagggagaacgatgatcttcgcccgccctcgagttcgttgtcagctttgcctagagtacgtacagggcctgcttcggatgatcggcaagcttcttggcaagctcctcaaccggcccgtagctcatgcactttgcctggcagtggtgcacgcaggtgggaagcttccccttcgcggtgcgctctgtgcacagatcgcacagatcggtgggcacgggaacgaaggtgaagagccacttgtcaggcgccgtctcccacgggccgtactgctcgacgcggatgccgaactgaccgatggggatggcgtgctcgaccgagcatgccatctcgcaggaatggcagcccgtgcaccagtcgtagtcaatgagcaggccgtatgcggtatcagccatgtttactcacctcccttcacgcggtagaccttcacgagagacgacttgtagttggcgccaaatccactcggacccggcttaaacgggaccaggttgttgatggccaggtcgaacacgtcgtagagcttctcggggtcaccctcggggtgccaccaggcgtggtctgccgagacgatgccctcgggcatctcgtaagtttcgttcaccatgcacttcgatctgcccatgaagttctccacccaaatccaatcgtcctgcctcacgccgtacttgcgagcgtctgcggggttgatgtcgagcactggttcgggatgcatggcgcgcaaacgcgggatctgcctgtgctcggaatggaacgagctccagcggcgggcgccagtagtgagcacgagcgggaactcctcgagcatctcgggcgtcgagccgggaccgggctcgggctctttgaagtagggcagtggatcgaggctgaaggtgctgtagatggagcaccacagctcgatgcggccagtcggggtgttgaatccgacctgtccgtcggggcgcaagaggcccttctcgtgacggtggtactcgaacggcacgtagacgggagagaccgggcgaagctcctcataggtgtagccggagtcggcgagtacctcggtgaacatgtcctgaacactctcccacggccaacactcggggttaaagcgcctgccgagcagaagattgatctccatgtcggacttcgtgtcgcccgggtcgagcacttggttcatcgcgcccgcctgctgaatgccacagatgagggagaggccgtcgcgctcggggaaggtgcaaacggggagaaacacgtcggctaggcccatggcagtcggcgtcatgaagagatcgaccacgacgatgaactcgagtttcttcattccctcgtatacgcgcttcggatcggcggacatgcatgccagcggattgtgggcctgcagccacgcaccacgcagcttgtaaggctcgtcagtttcgagacacctgaccacctcgtcgtcggagcaggacgtcatagccgtcttcatgagcgggtggttgcctacgatgcgcttgtcgtccatgccctcggggaggaactctcgtccccactggccgcccatgacgtcgagaatctgtgtgttggcaatcagcccacccggaacctcgatgtttccggtgatctcgaagatggcggtaaccgcctggcctgtacccatggcctcgcgtgtctggtctatagccacgccccactgaagggtggccggacgtgcgtttgcgatcatgcgggctgcggcgacgatcttctcctcggggacccagcagatttcggcgaccttgctaggcgggaagtcagccgcacgttcggcgagctgctcgaagccgtaggtccacttctccacgaactcgtgatcgtagaggtcctcggagatgatcacgttgatcatggcgagtgccaaggctgcgtcggtgcccgggcggacacgcagatgaagctctgcgcgggcggaaagccacgtgacacgcggatcgattacgataagcttcatgccgcgcttcatcaggtcgactacccaatggccgaagaagccgtcggcgttggcgatgatggggttgtttccccacacagccatgacctcgggcaccttgtaatcggggttgtcgtaacggtcgaaccatgcctgcgagcagtcagcgatgtagagggaaccagcggtgcaggacatgccggcgatgcgcggcacgtagcaggaaaggcctgagaacagacccgtcatgttgggcgagccgtaagcgtacataaggcgatccgcatactgcatgacgtcgcggccagtgccgtgagtgaagaagaaggtctccgcgccgtacttttccttgatggccatcatgttgtcataaacgtagtcgagcgcctcgtcccaggacacttcgcaccacttgtccttgccacggtcttcgcgcttgcggatcatggggtggaggacacgcttgtcgctgtaaaccacttctttgatgtcaaggcagcgagcgcacaggcggccctggttataggggctctcctcgtcgccttcgatcttgacgagctcgccgtccttgttcgtgtagagcttgatgtcgcagccgatatgacagcccggagcggtccacgccttgcttcgagtgacggtgagaccgtcctcctcgtactgccacggcttcgagtgatcgagctcgcggtatccactgtttgccatatggatttcctcactctcagatactcggcaacgttcgttgcccttctggagcgattgtatgaacctgtcctcttgcgtggcgttgctgcttctgactatgctattccccaaaggaatcaccagaccgggaacgcttccctctcctcaaaccccttggcagcccttacttgaacacaagaaaaaatgggggctacaatagtgcttgggatttcgagggtggttcaagggagggttcttgcgcgtccagcacatgagagagttcgttcgccttgcgcaaacgctgagcttcacgcaaaccgcaagcgagttctccgttactcagcccgtgctaagcaagcatgtagccaacctggaacaggccctgggagcccagctgatagttcgcagccagcagggcctcagcctcaccaaagcaggcgaggtcttcgcagaggaggcgaagggcatcgtcgcggaattcgatgaggctatggacagggtgcagcagtcgaggactcgcaaggatgaaaccctcaccattggctacctggcaggagcgagcaagctcatactgctccccgccgtagaggccttcatgcgaagccacccagacgtggctctcagattcatctcgcttgagattgacgagatcctcgaggccctcgaagcggataggatagacttgggtatcaccacctccttcaacgaggagccgcccgaccccgagaagttcgcctggtcaagcctctaccccgacagctttgcgctcctcgtacccgagggccatcggctctcaggcctcgaatccgtcagcatctccgagctcgaaggagagtccctgctcctttcggccccttcgttcatggccaacgacccgcgtgcgcagaggatcctcgaaccagtgcgagaacatgccacggttcactccaacgcctacgacgtcgacgctacacttatcctcatgcaaacggggaactacgtggcactctcactcgggcatttcaagaacctcctcgacgaggggttctgctacataccgatcgcagaagccgtcgcatccatgaacataggggcgatgtggcggagagatcgcagctatgcttccctgacgactctcgtcgccgagcttcgcaaacaggcggaacgcgtctcatcagcatccgaagacgcggccgagtgccgctgatgattaggatctacgaagggcggccgacatgagaatccagcacttgcgagagtgcatcaggctctcccaaaccctcaatttcacgcagacggcgcgggagttcttcataacccagcccgttttgagtaagcacatctccgccctggaggagaacatcggcatcacaatcttcgctcgagatcagcacggggttgcgattacaaaggagggcgagaccttcatcagggatgcggcaagcatcgtcgaaagatgcgatgctgctgaaagaagggtgtcggaggcaaattcaggtactcgggaggcgctgactctgggctacctcgcgggcccgagcggaagcttccttccccgagctgttgctgccttctcggaatcacggccggacgttaccctcaacctcgtgagccttgagttcgatgagatcatcgagtctatcgacaccggccgaatcgacatgggacttaccacctcgttcaacaacaacgccgctgtcctctcggagcagtatggttggagacccctgttctcagacgagattgttctggtgacgaagaggaatcacccccttgcctccagggagtccgtttgcgtcgacgatctggcgggcgagaccttcatctgtcctgcgcctcagttcatgaggagagaccacgaaaggatcgtccagatcctcgaccctatccggggcaaggtgcggttccatcgcgtgttgcacgacctcgagagcatcccgctcgtcatggccacgggcgattacgtgcagctaggcttcaagcacttcgagtgcaagttcggtccccgcttcgcctacattccgctgagggactgcccgaacttgcgctcgcagatcggcttagcttggaaaaaggagagggagtcgaaggccatcctctccttcgcgaaggtcctcgcggaagctttcgaaactgttaggcctcctcttcaggcgtaaagccgctcaccttcgcggcgatgcgctgggaaaggggcagaaacaggacgatcgccacgatgccggagctcgccgcgcagggccagagcgacacgactgccatcgcgacgcccgcgattccagcgtctttcacgagtacgatgaacatgcatatgctcaagattgcggtgatgttcaccaagccgagcacggtgctgattgtcacatggcgcagcaagcctctcgcccttatcttgcgcgctgccagctgcgcaagttgcatgctcggaagaaagtcgccgacggcgtagcccacgagcatgctcatcaccagggattgggaaaacgatcgcgtgatatcacaaagcggcatcgcagaaacatcggacgtaagaaccaagagcacgattcccaaaacaatgccgatgaacacgttcatcatgaggcttgttatccgagcatagccaatgggacctttattgggcattcctccccctctcaacaaggcggaggccccacagggaggcctccgccatcataatcctcaagccgctgcctcctgcggaggcgcgcacggcgagcagctaagctccaaactggcctgccgcctcttcctggagaatcttgcggtcgctctttacgaacaggatgatgagtacggtgcagatggccagggggatgccgagaaacatcagggcggcgttgaagaagccgacctttgcgatgagcatgccgaacaggccgtttccgaagaaggtgaggttggtcacgaaggccatgattcccaggacgtagtccatcttcttcggctcagtgacgaggaacgggatgtacatgcggatggcaacgggtactacgccggccagaaggccgatgccgaaggtatagagccatgcgttgatttgggggttgccgtagtcgttgaaggccaggatgaccataccgccgaacaggatcaggccgcccgcagagcagatcttgcggatgggggtcttctcaaggacggcgccgagagcaacgccgacgaggacgacgatgatctgggcgatagtagccgggttgttggactcaacaacacccataccgagggactgcaggaaggtgggatagaagccctggcacaggccgtagatccaacagtaaccgaagaagcagaaggagcagacgatgccggctctgacgtagttgcggctgatggcgctgccctgctgctccttcgcagcctgagcgttgagcacgttctcgtcgacagcgcacagcctgaaggcaagacagtgaacgacgagggccgccacgatgaggccgatgcccaggtaggtgacggttgcagtgttggccgtagctgcgaagaggcgggagccggcgaagatggccacgagcaggccggttaccgtccactgggaccaaacgcccatggcaaggcccatcttctgcagcgggaagaggcggggcacgatgttgggaccggccgccgcgagcatgcccatgcccgtaccctcgatgacgcgggccacgaggaacaggttggccgaatcgacgtacaggctcatgatggaaccgaccagcgtgatggccatggcgagagcgagcgtgaacttaacgccgatgttgcgcatgatccatacagctgggaagcatacaatgcagcccatgaacagggcgaggccggagatgttgccgatggaggacatgtccatcccgtactcggcgccgatgatggcaaggatcgggttccacttcatcacgatgtagaccacggcgatgccggtgatcatcatggagatgagcgaaatccatctctgggtcatagtgagctgggtatctgcaacgccccaggccttgatgcccgtgggcttttcgattgcgttcgacatggttttccctttcggcggctgcgcgccgcttgacgtctacgagatgcccttctcggaagaggcactcttgcatttgcacaagactggctgggggaagcgtccccagccagctgattcgctacacgaacaaggcgtacttgcctgcctcacccatcttggcgacaagctcagcagcaggaccgaactccatacagcccgcttggcagtgctgcacgcacatcggctgcttgccggccccaacgcgacttgcgcagcggtcgcagcggtcggtcggcacgggcacaaactcgtactgccatttgcgctcctcgatctggtcggggccgatctgcgtaagcttgatgccgtacttaccgggcttgagacctaggtgcttctgacatgccacctcgcaggtgtggcatcccgtgcagtactggtagtcgatgagaattgcgttcctcatgctccctccctacctgttaatcttcgtaatcttgcagagcacggacttatacgagttgccgagacccgtcgaacccggacgcatgggaatgcagttgttgatgttcgactcgaaggtgccgaagaagtcctcttcgcggcccctctcggggaaccaccagccgtggtcagccgagacgacaccctgcttcaggcggatatcgaccttcgccttctggatgcatgatccgtactggttctcgatcttcacccagtcgccgtcttcaacgccgcacctctcagcgtcgacggggttgatggtcacctccggctcggggtggatggcgcgcagatgcgggatttggcgtccctccgagtggaagtacccccactgcctggcgcccgtggtgagtacgagcgggtactcttcggctaggtctggcctgctgatggggctttccggcggctcttcgtagaatgcaagcggtctcatgcccatctggtggagaatgaggctgtagaactcgtagcggcccgtgggggtgttaaacccgggctgcccgtcatcgcggatttcgccggtcttgtagcggtagtacttcatctcggggtaagcccaggttcgagtcttgaggtcgttccaggtgaacccggtgttgcggaggaggtaactgtagaagctctcctcgtcccattcgtcgccctcgccccaggggaacacgtcctctcccttgaagatgcgcccgatttcggtgacgatctgcgggtcgcttcggcactcgcccacgcgatcgatggccttgttgattaggccggtgcggtagggctgatgccccgtgaggccataacgctcggggaaggtggtgacgggcaggaacacgtcggcgcatgccatggccgtcggagtcatccaaaggtcgaccaccaagttgaaatcgtcgttcatgaggccttcggcgatgcgcttcggctgagcgcccatgttcgacaggcaattattggtttgcaagatgcaagccttcacagggtaatcgtaattcccattcaacgcttcgagcgtcgcatcgggacttggcattccaatcattttgagcgccgggtagtcgccatggagatgctcgtagtcgtcgcgcttcgtgggaatccaatcggtgtcgctgccgatccaagttacgggcaatccaaatgccggcatgccgcaaaccattcccccaggcttgtcgaactgaccggtaagagcgacgaggtcgtagcacgatgcacccgagtagaagccctcggccgtgtggtcgagcgcaacgccccactgaagagcccagccctctgcgttgccgatagctcggcccgttgcccatatgagatcctcatcgatctcgcagattcccgcaacgcgctcaggcgtccactccttgacgttctcggcatactgttcaaaaccatacgtccacaaatcaacgaactcgtggtcgtagatatcttccttcacaatcacatgaccgagcgccaacgcaagggcgctgtcggtaccggggcgaacctgcagccaatactccgaatgggcagcacaccaggtaagcttcgggtctatggtgataagcttggtcccgcgcttcatgcattcgacgatccaatggccaagcgtaccatcggaattggctaaaacgggattatttccccacacgagaacgtaatcggggcgaacccagttcggattatcgtagcgatcaatccagttctgagaataatctcccgtatagagattgcccattttcatggtggtgcagaacatgcgcggcacgtagcacccttgcccggaaagaaagcccatgccctggttgggcgtgtcgagaatgttcgcgagcatgggatggtacccgacgatgtcgcgacccgttccgcagaaaacctggatcgcctgaggcccgtaggtttcctggaccttcttgagctcgtgctcgataatctcgtaggcctcgtcccaggtgatgcgctcccatttgtccttgccgcgatcggctcggtcgcgcttcatggggtagatctgtctgtcctcgtgatagatgtagtcgggcagcgtcaagcagcgcaggcacagacgaccctggttgtatgggtcttccggatcgccttcaacgtggtcgagtttgccgtccttgtcgatgtacataaggatgccgcagttgtcgtggcagccgggggcggtgcgggcgtttcctcgcacgacggtgaactcgccttcctgccaggtattctttcgctccgttgcggtttcatcgagctgcattggaatgatcttggtgctgccgctcatgccaagggtcgcgttttggccagtgttctctacttccgccattcctccctctcctctcattccgagcgcgcttggcacagctgcaatgcgcgcccgcattcgatcagttctcggagggttcgcccttgtcgcacaggcaggaggcgccttcctgctgcgtgcggctcggttttccgggcagaagagggagtgcgaaaccgcacagtgtgcaagttgatgagcctatttcgaagcgctcaccacaggaaggacacgtcgttcccatgatctgcaaatcgtcgtgttttccgcacctgttgcacagagtgcacgggtagcaagccacaggagccctcttcttccagacgaacctctctctgcgctccattattcagggcatgacaagcgaggggaaattgctaagcgagcgagtccacaacgaaaaagaataaccacgcctgcagttggtggccgcagcggcggctatcacctggggtatctggattagagggaaccctgttccacgagaataacgcttgttagaatcaccgttgacgcgactgtgttatcgcagggcttcatggctaaaggaatcatctatgtgatgacaacagtggtgccgggtcttgtgaagatcggcaagactcagactgagcagcttgagaagcggatgtacaacctagagcacaacggctatgccaatgtggccggcctcaaacgccgctttgccatcgaagtggaggactacgacgagaaggagcgaatgctcgatgacgtcttctcaaagtctcgcgttcccaatacagaactcttcgcagcggatatcgatcttgtggtgaaactactctcgtctcttgaaggcaggcgggtattccctgaagctgtctccaaggaagagtcattcaaagctgccaccgccgtgtacagagatcatattgaagcgtccatggttcccgacggtacctactacatggaacgcaaatccaagaaagacggcagcactcctttgaaggcatccgtcgatgtatatgagggcagctatatcatccgtaagggacagcgtgtcagcctagtggaaggcggtggtctttcccctgccgtctgtgaagcgcgtcaggccagtaccgacaagaacggtgttgtgcttgacgacgtcgagctcgattcgccgtctgccgcagctgccttcgtcattggcggggcatgcaacggctggtctgcttggaagaccaaagacggcaaaacgattgacgtcttcagaaggaatagcgagtaacagagagggcttgggagggagcgcaatccgatgtccttcatcaaccgcctgaagggcgaggagcccggcttcctcgcgaaggcagcccacgccctgcaggggacggggcactacggggagtacctggccgactacgccctggatgttgatgaacatagcgaatcctagcggactatccgcgtttttcgcggcttaccgccattccccgttgcctgtaaaaccctgtcattgaagcgacgcggccgcattcggctatggcggtgcgtccgaacgcagacgacaggaggtatatcgatgcagatgcaagcaaccgcggggtacgcaggagggcagatccccaacccctacatggcctacggggcgcccgacgggttcgcccccctcaccgacgagacgggcgtctacctgcccacgaggcctggcgacgcgggatgcgcggatgccgaccgtccgctgccggctcttcgccgtgtcgtcactgtcttccttgcgctaataacggaagttaataacaattcaattccgtaagagcaaacggaatcgcaccgaacgttgaggagctgcgatgtggccgggcatcacatacgaggcatgcgcttgggaacgggaccccgacgagctggcgctcatccccaagagccgaaggcgcaagatcctgccgacatacgaggcggcggtccccgccagcatcgcctcgctccccgtggagattccctcgccgctagcgcagcgcctcgccgaggtagaggtctccctcgcgcgcttcgataccgcgcaggaggcacgcggctactcccttcccgcgctcctgctccgcagcgagtcttcgtcgagctcgcagatcgaacggctcacctcgagcgtgcgcaacgtcgcactcgccgagctcagcggcaaggcgccggccaacgcgctgcccatcgcgggcaacgttgccgcgatgcgagaagcgcttgggcagagcggcgagatcgacatagagtcgatctgcgccatccatgacgtgctcatgaaggggacacgagaggcgaagggcctgcgcgacgagcaggtctggataggcggttccccctacagccctcacggggccacgttcgtgcccccgcatgcaagccgcgtaaggccgtgcctggaggatctcgtggcattcggcatgcgcgaggacatcccgcccattgcgaaggccgccgtattccacgcgcagttcgagaccatccaccccttcacggacggcaacgggcgcacgggccgcgcgctgctgcatcgcatgctcgcccgcgacgaggtgctcctgcacacgatgctgccggtgtcgtccgggctcctgcacgacgtcgacaggtatatggacgcgcttgaggcttatcacgcaggcgcaatcgagccgataatcgagtgcctcgcggacgcgctcgagctcgccgcggtcatcgggtcgcgcatcgcgtccgacgtgaaagaggtcctcgacaactgggctgctgccaacacggaccgcgcgggctccgcgtcgcaccggcttcccgcgctcctcgtcgagcagccggtcgtcgacgtcgcctacgtggcatcgcatctcggcatcaccgaccgggcagcccgcaatctggtcgaggtctcctgcgagcggggcatcctcgcgaagatgggcaacgcgaagcgcggcgccttctaccaggcttccgacctgatcgtggtactcgaggaggcctcgagccttgagggcatccgcaggaccgccgcgcgttagccgaaagataaccgaggcgtgatgcgacacgactcataaccattagggtcgtaggttcgaatccggctcccgcgaccaaaacacctagcctgacctgcgaaagcgggccaggctttttgtgaccaccagctgaccaccttcgcgagcaccatttgaccgccaaaagctattctcgcaagtcgaaaagcgcgcgaaaaccggagttggtgtcgtcctccagtggcctctacttttcaatgatcgccacagcgggagcgtaggttttgacgtggcgggaaaaggcgttccctggccggcgtgacgcgcaaaacgctatcatggcgcaacagatacgcctcgttaaggtgcgttgtggcgcgatggccgcatatgcgcttgccaacgctttgaactgcgacgctgctgagcagatgggaataggaggaatcgtggagacacaggcgaatgcgcaggggttgcgtgatgcgctcgtgcgaggcgctaggacagcaggtgctctgtcaaaaggcgccgaggcaggcagacgggcatctgcgcatgcccacgctttggcagactcgccgtgcggcgcggaggagataggcgtcaccgcgctcggcgagctgctcgtcgatttcaccgatgcgggcgaaacctccgacgggaggcggctgttcgaacgaaacccgggtggagctccggcgaatgtggctgtgggagctgcgcggctcggcgtgcgcgctgccttcgtcggtaaggtaggcgccgacgtcaacgggcggtttctgcgcggcgtgctcgagcgcgaggacgttgactgcaccggtcttatcgccgatgcggcctgtgccacgacgctgtcgttcgtggaagtgtcgcccgacggcgagcgcagcttctcgttcgcgcgcaagccgggggccgacacgcagatcacgccgtcggaggttgcggcaccggctgttgccggcctcatcgcgcgcagtcgcgtgctccacgtgggcactctgtcgctcaccgacgagcccgcgcgcacggcgacgcttgaggcgctcgcgatcgcccgagactcaggatgcctcgtctcgttcgatcccaactaccgtgccgaactgtgggatggcgatggggaggcgcgtgcgcagatcgcgtcggttctggaattcgcgcagctcgtgaagctctcggatgcggaatgcgcacttgcctgcggcacgtccgacccgaagcgcgcggcagccaagctcgtttcggcgggggtgccgctcgttgcggtgacgctcggcgcgcagggcgcgtacgtgcgctgcgagaagggaggttgcctggtcgaggccgtgccgggtgtggatgtcgtcgacacaaccggagcgggcgatgcgttctgggcgggctttcttgcggcgtttctcgaaagcggccggacgcctgcggatgcgggaatcgacgacgcgcgcaggttcgcgcgcgctggaaacgagaatgccgcgcgctgcatcacgcatcgcggcgcgatgtgagcgcagacgagcagtctgtctgattcgcgcgctgccccaaacgcgtcgagccaaggaatgtctgcccgacgcactcgccgtttcgcgcgcctgcgagcgcgcggcgtgacggttttgggagcaacgttgatcacgtgcgtctgacgcatgtaattctagaatcgcaatagggcaaatacgaaaaaactccacagttcagatttcgctgtcacggtgacgacggaatcgcgcaaggttgccatttgaagcggggcggcgagtgcgccggccagccagaccgtccccacccccaacgtcgtggcgaacaggacgagcttctcgaacgagtagccgaaggcgagctcggcatgctcctagcgcttgcacttcgcgccgatgtaggtttcggcgcccaggatcacggggctcgaaagcccgtatttctcccggtcgaggatgcggaaggtgatgggcaccccgaaggggttggcgtcgctggcgatgaagcgttccagctcggcgatcgtttcgggcgcgatcggctggtcggtgaaggtgcgcacgctcttgcgcgcttcgatggtggcggtgttcataggttcgatccttcgtgtgagagggcggtgcgggtagcgtttccgcggggctagtcggcgtggatggagaggagcgtcttgccctgcgaatggccggtgcgcacggcttcgagcgcttcgttgacctggacgagctcgaaggtacggtcgatcgacaccgcgaggggccgttctgcggggaagaggcgggcgacctgcgcgagttgcgcgccgtcttcgtgcacgaagacgaagtcataggtttgacccttgcgcgccgccatcttgtcgaacttgcgtccagcgatgccgaacagggcgcgctttatggccggaaggtcggcgcgctgggcgaaacggtcattaggcagaccgcgcagcgagaccaggcggccgccctctttcaggatgcggaactctttgggcagctcggcctcgcccagggtgtcgagcacgcagtcgacgtcgtggagaacctcggcgtagtcctgcgttttgtagtcgacgaagacctgggcgcccagcttgcggacgcgtccttcgtttcgggcactgccgctggtggccaccgtga

SEQ ID NO: 865 - DNA, 3744 bp, Unknown
  16S sequences of unknown bacteria
tgacccgtacgggaatcgaacccatgttacagccgtgaaagggccgtgtcttaaccgcttgaccaacgggccaaaatgtggtagcggcagtgagacttgaacttacgacctaccgggtatgaaccggttgctctagccaactgagctatgccgccacatttacacacatctttcgtgcaggagttattttactataagctcggtaaattgtcaagcatttttttaaaaattttttaatattcctaaaattcccacatttccgcctttttatacagggttttttgtggatttactgcaaaaagcgtcgaattttctcctgatttcctccaaggtgttgccgcaaaaggtatgcggttagttccctctgcggagggtttacaccctccgacttttaaagaaagagggtggtgttgtatgcttacgacagaaagtttgatttctattatcagctttgccgtagctatgttcagttttggatatatgttcggcagcaacagtaaaaacataaaaaaataaccgcccacactcccaagtaaagacggttacttttatttaactatttctcgggagctgaccgtttgccggtagcaccttctatgtttttattatactctgtttttgtaaaaatatcaatcaaccgggtaaaacctatttgtaaccgcccctttggggctgttattttttaaaaatatatgttatcatattatcactattcacagtgaggtaaaagattatgagaatgcgcagaaaaccctgggctcgcccggaacttgacgcaagtttggtatatattaaaaatcctgccgattacatcggcaaatggcagtcggcctttgcaaaggaacagccctttgttgtggaacttggctgcggaaagggcagttttatcgcccaaaaggcctacgcccacccggaaaacaactatctggcctttgacattaaaagtgatgttttgggaaccgcaaaaagaaatatcgaggccgtttacggcacaaccgattgcccgaatgtgagaataaccgcctttgacattgagagaataaatcttattctcagcccggaggactccgtacaggagatttacattaacttttgtaacccatggcctaaggcaaagcacaaaaaacgccgccttacatatccccgccagttggaaagctacaaaacattccttaaaaagggcggcaaggtattttttaagacagatgacgatgagcttttcgccgacagcatcgaatattttaaatgttgcggctttgacattgagtttatcacctatgatatggcggaaaaatccctgccggaaaatatagttacggaacacgaaaaaatgttcaccgagcagggcataaaaataaatggattaattgccgtaaacaacggcgagcctttatcggaaaaacagcttaaagaaatttgcgataaattcagagagcgaaacgagccggaaaacgccgatgaaataaatcggcacaaaatagaaaagtttaaaaatgtgtaacggagaaagccatggtaaacataggtaacgattgggacgatgtgttgaaaggggaattcgacaaggaatactaccttaaacttcgccggtttttaaaagaagaatacaaaagccacaccatttaccctgatatgtacgatatttttaacgccttgaaatacaccccttacaaagatgtaaaggttgtcattttagggcaagacccatatcacgagcccggccaggcacacggtttgtccttttctgtgcaaaagggcattacaccgccgccctcccttgtaaacatatacaaagagataagcgacgaatacggcataacaatgccgaaaaattacggctgccttacccggtgggcaaaacaaggggttttgcttttaaacacaacccttaccgtacgcgcccatatggcaaacagccacagcaatgcaggctggcagatttttaccgacgatgtaataaaaaaattaaaccggcgagaaaagcccatggtgtttatactttggggcaaaaatgccataaacaagcgcagtttaattgatgagagccgtcattttgtgctgacaagcccacacccaagcccactttccgcttacagaggttttttcggttgcggtcactttaaaaaggcaaatgaatttttggttaaaaccggtcaagaacctataaattggcggattgaggaacaataatctacaatatttgaatttttgtgatttaaaaggtaacacttttgtatatgtgttacctttttccttggcaaaacagaactttacgccttaatcggctgttgttttatgtcaaggcatcgccgcgataaagagatgacctttcataagaaaaatcggctaaaccgatacaaaatataatttcgggcaaaataaaaggtgacatattcggtaaaatgtcaccttttgtttatgcaaatttaagttatcagaaaacttttaaaacatcgtcttctgttttgcgctttacatttgtaggttctgttgccggatagcctatcgctataaccgaaacaataacctcattttccggcacattcaaaagttctgccaatttatccgcatctctgatacccataatcaatgtggcaagacccatatctgcggccttcattactatgttttggtttgcaagccctaaatcgtacaagccccaaccgtcggcaagttcatttgccggctggccgttgccgtatcccgattgcccctttacataacttgtaaccagcagcgaccgtccggcgctgtttttttgattgaataccggcaggcactctctgactttctcaatcatatcatccgaaagaacgccgtaataccttgcggtttcggtgtttttccaagagggagcctgtattcccgcccgaacaatctcttttaattggtcttcggttatttttttgctctcgtcatatttgcgtatgcttcttcttgtctgtaaaagtttttcaaattccatatagaacacctttccttttgattttatattcttctgccacgcagaatgtcaacaatcataaccgccacaaaagtcaatccgccaaagattaccgccataaccatatctgccgttttatttaccggcgcggtaggcataacatacacagcctctttgccgctttcgcttaccgtggcagtggcgtttaccgctgtaagcagggtttcgcccatatacaggcttgcggtcatctgtgcggtttgcaggtcgccggacagctgtggccgggaaaattccacggttataccgcttgcatcattccgatttgtcaaaagtacccttgtgccgtcacaggtgatatcccgcttttttacaatcaggtttccatcccccagggaaatttcttccggggcggacagagctataaactcgccgcttacatccaccggtgtgtagttgtcaaaggcccagtttaaaagtttttcggtatcctcccacttatcctttttgttttgtgacttcataacaacacatataagccttacgccgtttctctcggcgcaagttaccattgtgtgcaaagcctcatctgtccagccggttttgctcataacaagtccatcgtattttaaagccccgtttaaaaaccagtttgcggagttaaactcccttgcctcgtggagatttgtccggccgaggctgtatttttctgtgctgaaaattttgttaaaatcatcgtaccgcacccgccgccttgttatcatagccatatcataggcggtggtgtagtgattttcgct

SEQ ID NO: 866 - DNA, 15768 bp, Unknown
  16S sequences of unknown bacteria
tttatcgcgggaatgttcccgcagtacgataaggcgctctatctcgactgcgatacggtcatcctcggcgacatcagcgcgctctattcttacgatctcggcgacaatctcatcggcggcgcgccctgcgaaggcgtcaacagcttcgaagtgtataagaaatacgtggaggaagtggacggactcaatcccgaaatgtttttcaacgcgggcgtgattctcatgaatctgaaaagttttcgcgaggagaacttctacgaacgctttgccgatcttttaaagaaatataaattcaccgtcattcaggacgaggactatctcaacgttctttgtcaggacagagtgttgcagctgccgcgttcctggaataaatttcccgtgtccaaggataagctttccagagaggatctgaggatcgtgcattacggcatgacgtggaagccctggcattattcggacatcccctatcaggaatatttctgggaatacgcggaaaaaacggaattttatcccgtcatcaagaatatttacgataacttttcgctcgccgatatggagcgggataaatcctgcgagtcgggtttgcaggcgcttgcccgtcaggaaacggaacggacggacggctatttcaaggtgtacggcaagcagtacggcagaacggagaaagaagcggaataattttggggcgaaagcgaagaggagtgtacaatggagccggatttgacgaaagtatcccccggaagacgggaggtgctggaaaaaatagccctgtacgagagcgagcggcgctttgacgaggacgtggaaaacgatcctcccaccaagccgctcctgcccgatcaggtggattatctcaataaaaaactcggcagcagaatcaaaactgcgattgccaataccattggggaccattattttaccaaactcatcaaaaaagggattattcagatagagggcgtggaggggaaggaaaacctctccgcgcttcaacacggcgccgtcgtcacctgcaaccatttttcggcgtacgacaactatattctcttcgaggggatacggaacgaactgccgagaaagtatttgtataaggtgattcgggagggaaattacacctcttttccgggactgtacggcttcctctttaagcactgcaacacgctgcccttgtcgagcaaccgacgcacgatgatgaatatgctttccgccgtcaatacccttttgacgcgcggggaaagcatccttatctatcccgaacaggggatgtggtggaattacagaaagccccgccccttaaagatcggcggtttcaggatggcttatcgcgcgggtgtgcccgtcgtccccatgctgatcaccatgcggcacggcgacgagctcgacggggacggctatcctctgcaaatttatacccttcatatcctccctcccgtttaccccgataagtcgctgggcgaaaaattgggagccgaacagatgaaagaaaagaattacgagctttggaaagaaaaatacgaagaagtttacaaagtgccgctcgattacggaccggcagcaaaagagaaagctgcgggagaagcgggcgactttgacggagcggaagcatgattttatattgcacgattatagccgtgtgcgtctgccttctgacagcggcgaatatgatttttgccgcacccgttttcgggttcggcttttggttcgttttaagggcggtgctgctgagcgtcgtcgccgtgattgccgtggacgggcttttcgctttcctgatccgccgcctgcccgccaaatggttcgcgcacgataggaaatttttttcggtatcgcagaaagaaaagaagttttacgaaaaactcaaaatccgaaaatggaaggataaggtccccgagctcggacaatttaccgattttcataaaaacaaggtggcggaaccgttcaataacgactatctgacgagatatatgttggaggccgcttacggcgaagtcatccatctggcgctgtgcgtggtcgggtttgtcatcatcttcttctatccgttaaaatattggctctgtttcgggtttcccatcgccgtcatcaacgcgctgctcaatctgccttcctgctgtattctgcgctacaatttctataaactgaaaattttgtacgcgtctaacgaacgcaaagcgaaacgggcgcaggcggcgcgggaaaaagacgacgcggacgcaaacgggaaccgggaagacaatccggggcgggcaaagaacgccgaaaagaaagaagagaacgccgctcaaaaaaattctttttcgcttcgggaagaaagcgccttttcgaaatgcgcggcgaagcgggagtatccgcgatttgtaaacgcgggaacgggggagcgggaagacagtccgttctccgaaaatatcccggaagaagattccgaggcggagccttccctatgaagataaaatatttgggaaccgcggcttacgagggaattccctccctgttctgccgctgcgaaacgtgcgagaaatcgcgcagagagggcggccgcaatctgcgttcccgctcgcaggcgctcgtggacgacgaactgctcctcgatttccccgcggacaccgtctggcattttcatcgtttcggcatggattgggaaaggatccgcgactgcctgatcacgcacagccattgcgaccatctgtatacggaagacatagaaatggcacgcgaaggatacgcgcaggattgtccccgcactctgcactatcacgccgccgcggacgggtatcgaagaatcaaggcggtgacggacttgaaggggatgacggggcgtgcggacgtcgttgaagtcaagccttacgaggagttccgggccggcgaataccgcgttttgcccttaaaagccaatcacgatccgctttcttcgcccgtcgtctatcggatcgaaaaggacggaaagagctttttatacggtcacgatacgggctggccgcccgaaaaatcgtgggaaaagctgaaagaggcaggacggctgaatctcgtgtccctcgactgtacaggcgggcttaaaaagggctggcgggacggtcacttatgcctcgaaacggctgtcgaggtattcgcacgcatggaagaggaaaagattatcgacggaaacaccgtcaaggtaatcaatcatttttctcacaacggaaacgccgcttacgaagacctcgtcgccgccgcgcgcccttacgggatcgtcgtttcttacgacgggctggaaattaaattttgacatttaaaaaaaataaagtgaaaactgtgtgaaaaacagactttcggcttgacaaatggaaaaagcgtgttataataataacgcaaatatgtgccgacgcgggtattttggcgttctatatcgcatattagcttgtctatgttatcataaatacgcccaaaagacgagagaacgaaacaaaaacgacaaccgccgattcggttgaccgagggaatatctcggggtatatcaatcgggcggttttttcgtgcggtagaggggcgggagaaaagcagccaaaaataccgttgagatttctcataaagagcgttcggaacggcgcgtgaggcgatttttgcaggaaaaagagttcgggactatgggagggaggcaatcctgtcacaaaaaagaatccgggacggcgcgcagggggcctctgcgacaaaagtagttcgggattgtgtatgcgggataatcctgcggcaaaaaaggtttttggaggcggtgtttaggaatcgatctttcgccgcacgaagatttaaaatcgggcgcgaatccgctgcggcgagtgtaaaagagcgcttggagtgtttgtcttagatacgctcttgggattttttccttattatttgtgccgtaacgtcaaaggcattgcagcgagaagttctataaaaaacgaatcgggatttgcggaaaaacccgaaaaaatcgataaattcaaaaaagttttcggagggaaagaacatgaaaacggatgtagtcatcgtaggcgcggggcctgcgggtatcttcacggcgatcgagatgctgaggaaggacagcaagaaaaaaatcgtcatcgtcgagaaggggaagtcggtggaaaatcgtcattgtccgaaagtcaagacgcaaaaatgtatgaattgcaagccctattgccatatcacgacgggcttttcgggcgcgggcgcgttctcggacggaaaactgtctttgagctgcgaggtcgggggagatcttcctcagctgatcggggaaacgctggcgcaggataccatcgactatacggatcaaatctatctcgaattcggcgccgacgaacatatcgaaggattgaacgtcagcgaagaggtgaaggagatccgcaagcgcgccattcaggcggggctcaaattggtggattgtcccattcgccatatgggcacggaaaaggcgcagagcatttatctttccattgaaaaatatctcctcgaccatggcgtggagatccttttcgactacgaatgcaactctctcgtcatcgaggacggcgcctgcaagggcgtttgcgtcaccaaggcggacggcagcaaaacgctggaaattttcgcggaaaacaccgtggtcgccacagggcgccgcggcgcggactggctggaaaagatctgcgaaaagtacggcgtggagcacgtccccagcaccgtcgacatcggcgtgcgcgtggaggtgagaaacgaggtcatggaaacggtgaacaaggtcctgtacgagtccaagctcatcggatatcccaagcccttcaagaataaggtgcgcacgttctgccaaaatcccggcggcttcgtgtcgcaggagaattacgacaacaatctcgccgtcgtcaacggtcacagttataaggaactgaaaacgaacaacaccaatgtgtccattctctgttcccataacttttcctatcccttcaatcaacccatcgcatacgcacagaagatcggggaactcaccaatatgctgggcgcggggcatatcctcgtgcagcgtttcggggatattctcgacggcaagcgcacgtgggataaggagcttacacgctcgaatatccgtcctaccttgaaggacgcggtggcgggggacatcacggcggcgatgccgtacagaacgatgatcaatatcatcaatttcattcagtcggtggattacgtggtgcccggctttgcctctacggaaacgctgctctattcgcccgaattgaaattttacagcaaccgcatcaagatggacaccgatttcaatacgaacatccagggactgcattgcctcggcgattccagcggatggactcgcggactgatgatggcgtcggtgatgggcgtcctgatgggacgcagattggcataacggcttggaggcgggcgccgcaaatcggaaaacgacttaaaaagctcttttccgtttgaatttcgtaaaaagaaaagcttttcgcaaaaaaattatttcataaaaaacagcgctccgttcttccgacttttcggaaaaggggcgctgcgtattttttatcgtgaagtaagccgcaaaaaatataagaaaagatataaaaaacgagaggaaaacgaaaaagataggtcttttattttccgtgggaattgtgtcgtgagcgatattaggggaacaaagcgccaaaaacatggctcttttcctgttttacggattttttttgagagttgccgaaaacaaagcgttaaggaggagggggtaccgcgttaggcttgacgaaagattatcgggaaagggagaattttttttaatgttaactcccctttattttcgcggactgcgtgcgctctccttcggcattccctccgacggcttactttaaagcgagcaaagtgtcgtaaacggtatccgtcagcccttccacgtgttcgtccgtttcggaaatatcgacgcaatacgtcctatctcccgaggtgaggtagtaaaaggtgcgcagatttatcaatccgaataagtcgattttataataaattttcgtgatcttcgttgcgcctttgctcttttgttccacggagcattcttcaaagttgatgccgagtgcttcttccattggcgcgcgatacgcctcggtcgtgagattctcgtatttcccggtctttgccgtatacatcgccgcaataaaattgttcttttcaacgtccgtgaatttcgccacggcgacggtcagttcttcgttttcgagcgcatacagctcgctgtccgcctcgctgctcccagaggaagggtaggcgaaggagatatattcgtcctcgaattttgcgtacccttcgggaatgacggcggatggagaaggagtggaactgtctgaaaaacttttcgaagaggaatccgaagaattgcccccgcaggaagcgaagaaaacagaggaagcgaatacggcggcggcagcgagaacaactaaaagtttctttttcatgggaatctccgaaaaaagtttcgttccaaggaaggattacgaggaaaataaggtaaaataagccatacttttaataaagacgtctgacgcaaacgagaggacaaggtagcgccgtgcgctttgcgggaagaaaaattgccgccaaaagaggcgaaagcggcgttgaggcgccaatttttagcgcttgtgcagaaatcttttaaagaatgtgtataatataacatgaaaagcggggaatgtcaagtcctttttggaaaagaaaaattttttttcgctgtttttcgtccaaaaaagagggaaagaagagaaaaaaatcgtatatattaatgataaattgccgtctaagctgaaacgggcggaattcatcccggataaggaggcaagaaatggcgggaaaaaaagccgtttccgtaaaggaacggacctatgaaatcgaatcgcgttttctctcaccctatgcccaaaaatcggcggaaacaaagggcagggcgagaacggaagctccatgcgaatttcgcacggattttcagcgggacagagatcgcgtcatttacagcaactccttcaaacgcctgaaaaataaaacgcaggtctttttcgctcccgaaggcgatcattatatcacccgcctgacccatacgctggacgtggcgcaaatctcccgttccatcgcccgcgcgctgtctttaaacgaggatctcgccgaagcgatcgcgctggggcacgacttggggcatacgcctttcgggcacgtgggggaaagggttttggacaagctctgcccgttcggtttcgagcataacgtgcagtccctccgcgtcgtcgattatatcgaaaaggacgggcgcggactcaacctcacgcaggaagtgcgggacggaattttgcagcacaagagcacgggacatcccgcgacgctggaaggcgtcgccgtatctctggcggacagaatcgcctatatcaaccacgatatcgaagacgccattcgcgcggggattctccaagagtccgacctgcctcaaagggcggtggaaacgctggggcacgccacgcgggaacgcatcaacaccgccatcaccgatatctatacgcattccgtcggcacggacggcgtgcggatgtccgatgaagtggcgaaggcgacgtttgaattgaggacgtttatgtttaaaaatatctacgcgctcacgaacaagtcgatgcaggaccgcgcggagcggatgctgacggcgatgtacgaatatttcctgatgcacacggacagactgccgaaacagtacctgaaactcggcgagagcgcgccgaaggaacagatcgtctgcgattatctttcgggcatgacggacaggtatgcgatcaacgtatttgaaagcctgttcattcccgaaacgttttctttgggaggtgttacggtatgagcggaggcgggagaggaatcgacccccgttttatgcaggagctgaaacaaaagaataatatcgtggaggtcatcggcagctacgtcgcgctcgatcgcaagggcggaaattattgggcgtgctgcccttttcatcacgaaaagaccccctcgttcgccgtcaacgaagcggaacagttctatcattgtttcggctgcggcgtgtcgggcgacgtcgtcatgttcgtgcaggagatcgagtccaccgattttatgggcgcggtgcggattttggcggcaagggcgaagattcccgtgcccgaaagcaatttcgattcggaaaaggcgatcgcgctgaaaaaaaagcgggacaacctgatcaagatccttttggacagcgcgagattttatctttccaatctctacggcggcagcgcggacgcgcatctcgattatatttcccgtcgcaagcttgcgccgacgacggtcaaaaaattcggactcggcgcttccctcgatttttactccctccccgattatctcgcgggcaagggatataaacgggaggatctcgtcgacagcggcgcgctcgccgaggcgaaaaacggcaggctcatcgattctcagggcgggcggctgatctttcccatcatcaacgccttcgacgaagtggtgggattcggcggcagactgctcgaaaaatccgattttgcaaaatataagaacaccaaggaaacgatggtgttcaacaagagcaagactctctataatatcaaccttttgaaaaaactcaaacgctctcagaccatcaaagaggtgatcgtggtcgagggatacatggataccatttccctgtatcaggcgggatttttaaacgtcgtcgcttccatgggtacttctcttaccaaggatcaggcgcggctcgtcaagcgctactcggaaaacgtgctcatcagttacgacggagatttcgcagggcagaaagcggatttaaggggactggaaatactcaaagacgaaaatatcaacgtgcgggtggtgccccttcccgagggacaggaccccgacgacgtagccaagcagggcgcaaacgcctatcaggcgtgcctggacgcggcgatgccgctcatcgattacaagatacactccctcgaacaaaaatacgatctgacaaaatccgaggaaaagcgcacgttcttgtcggaagctttgaaagtggtgcgcacggcggagagcgagagcgaaaaggaagacctcttgaaaaagctcagggacaagacgggtatcagctatcagtcgttggagcgcgaccttcacaatctccccgaagagagccggcagatagagattgcggtgccgccgccctcggaagcgggaacggacaagtataaaaaggcggcgagatttatattggcggcgaagcttttttcggcaccttatgcgggaaattgcagtcttgaaggtattgaatttgacgataatgtgcataaaatcatagcggaatatatcatcaactgcgaaaaaaacggcgaaagggtgcgtccgtccgagctttttgagattttggacgagaattgcacggaattcaacgagattctcgatttgaattacggggacaagctctcgggcgaagtggcggaaaaatttttctcggacagcgtccgcacgatggaaaaggaacgcctgaacgaaaagatcaaaatgtatacccggctcttttccgaggagcaggatacggagaagcgaaaagagatcgcgcgcaagatatacgaatatacaaaacgtttgaaataggggcgcacgcttcttagattaaaacgcgcccgcttttgaaaagatacggcttttaggcggggaaagagaaaacagaataaaacaggcgactgtttcggttattaaacggaggataaaaacagtgatatccgagcaaaaactcaacgaaattttaggcggcatcatcaacaattataagatgaaggggagtatttccaccaatgcgctctgcgacatcatggaaaaatacgacaccaatcccaatcagatagactatgtgtataagtcgatcggagaggcgggaattcagattgtggatgaggacgagcgggacagagagctgttcgaacaggctctttccgacatcgggctggacgatcccgtcaaaatgtatttaaaggacatcggcagggtgcccctgctttccgccgacgaggaaatcgagcttgccaaacatatgcaggacggggacgaagcggcgaaaaagaggctttccgaagccaatcttcgcctcgtcgtgtccatcgccaagcgttacgtggggcgcgggatgctctttctcgacctcattcaggaaggaaatctggggctgatgaaggcggtggaaaagttcgactatcagaagggctttaaattttcgacgtatgccacctggtggatccgtcagtcgatcacccgcgcgatcgccgatcaggcgcgcaccatccgtattcccgtgcatatggtggaaaccatcaacaaactcacccgcgtttcgagaattctcttgcaggaactcggacgggagccgacgccgcgcgagatcgcggaaaagatgggggtgtccgaagagcgcgtctgcgagatacaaaagatcgcgcaggatcccgtttccctcgaaacgccgatcggcgaggaagaagacagccatttgggggattttatcgaggacgaaaagacgacgacgcccagcgattccgtggcgtttacgatgctcaaagaacagcttttgagcgtgctcgacacgcttaccccgcgcgaggaaaaggtgctgcggctgcgctacggcatcgacgacggcaagccccgcacgctcgaagaagtgggcaaggaattcaacgtcacgagggagcgcatccgtcagatagaagccaaagcgcttcgaaaactcagacatccttcgagaagcaagaaactcaaagactttctcgaataagcgtatggggtacggcaagcgcatcgacacgctgtgttcgctcctgctgcccgcgaaaacgtttgcggacgtgggctgcgaccacggctattgctcggaatatatgttgaaaaattccctgtgcgaaaaggcgattctctccgacatcagcaaagggagcctcaaaaaagcggaaactctccttttccgttacatagaagagggcagagccgaggcagtgctcggcgacgggttttgcggcgttccgaaaaccacggacgaagtgctcatcgcggggatgggcgggcacgagatcgtcgacatcctctcggacgaaaagtacggttttctgcccgaacgcttcgtctttcagcccatgcacgacgcggaaatgctcaggcgctacttgatcggggcgggggcttttctcgaaagggatttcaccttcaaggacggcaaattttacgacgtgatcgcgggacgcaaacgcggggaaggagagcgggcgcaggaatattcggatgcggagtacgaatttggcagagaaaatctccaaacccgccccgccgcgtttttggaacggacggaaagacagctgaaaaatctttcgcggtatttgtccgatcccgcgctccgcaaagagagccgcgaagagcttttaaagagaaaacgcagtctggaaggagcgtggaagaatgactttaaatgacgtatataaaatcgcggacgaaatcgctccgaaagcgctgagcgacgcgctctgttccaagtacggaatgtacgacaacagcggcgtcctcgtggatacggggaaaagcgtggacgggattctctttgccctcgatttctccctcggcgcgattgccgcggcgatcaaggcgaaacgtcggctcatcgtcactcaccatcccgcgatttacggaaagataggcaatcttgtcggcggcgaaagcagtcacggcgtgcgggacgtgctcgggacgggcggaaaactcatccaagcgatcgaaaacggcatctccgtgctgtccatgcatctaaatctcgactgcgcggacggcggcatcgacgagagcctcatgcgcggcgcgatgctttccgcggcgcgggcgaacggacgggcggcgggcgaagatactttcgcggacgcgaaggaagaaaagcgtatgctgacggtggaaacgaacggcgtttcgggcggatacggaagaatatacgacgtggaaaactgcgggcttttcgctttttgcgaggaactgaaaaaaactttttcggcaaggcaggtatgcgtttacggaaacaggaacgctaaggtttcccgcgtggcgagcttctgcggcgcgggcgcggacgaggaggcgctggcgttcgcctgcggatacggcgcggataccgtcatttcctccgattttaagcaccacgtcgtcgcggcggcgcgggaaaagaacaagtcggtgatcattctcacccactacgcgtcggaaaattacggctttgaaaaatattatcaaaaaatccggaagcggtcggaagttccgtgcgagttttacacggacgaagagctgctttgacgggaggagtatatcatgtcacagttacaggcaattttgaactatcaggaaatcgacaaaaggctgtacgccttggaacgggaactggcgggctgcgaagagcgcaaggaatacgtcaaggcaaagaagtttttggaaacggcggcggataaactggacgcatacgacgcaaaagccgcgcagctgaaaaacgaggcggtggaactgacgaaaaaatacctcaaaacggaggacacgctcaaagatttttctcacctcgacgagctggtggagggcggcgcggacatcgcgttctataaaaagaacgccctttccatttccgatcagctgaaaaagatccgttcggagctgaacgcgctgacggcgaacatcaacgccacgcacgacgagtatcagaagctcaaaaagcaggtcatcgccatgcagaagcagtataaggaggcctatgaaaagtacaatgcggtgaaggcttccaaggaaggggagcgcaaggccatcgaaatggaactcgtcgccgcgcagaaggggattcccgccgaggcgatggaacgctataaaataaaacgcaaggagcgcatcttccccgtcgtggggaggctgaaagacaatcgctgtcccttctgcggcatggagccgccgctcgcggacaggagcaagctgacgggaggcgccgtgatcgagtgcgacaattgcaggcggatcatttacagcgaatgatcctcccgtaagggatcgccgaagagcgagcgcagagaggcttggagattcgcggtatttttgcggagcgtcccctttcgttttcccgttcaaaaatgcggctgttacctcagggcatccgcggcggaaagtttttgcgcaaagcctgcaaaggacgcgcgctttttcgggaacttgccgcatatccgccgcatataatgatatgtgcaaaaagtaatcgcgaaaatcaatctcaaagcaatcgaatacaatgccgccgccttcaaggcgctgtccaagacaaagctttgcgcggtggtgaaagccgacgcctacgggcacggggcggaagcggtcgcgtgcgcgctgagcgccgtcgcggatatgttcgccgtcgcccttctcgacgaggcgaagtccattcgcgtcgcggcgtgcggaaagcccgttctcgtgcttaccccgcccgcggacgaaacgcaggcggcggaacttatcctgggcggatttatcgcctccgtgcccgatttgaagacggcgcggctggtggcggaaacggcggagaagttcggcaggcgctttaagattcatctcaaagtgaacacggggatgaaccgttacggcatgaacgcttctctgctgggaaaggtgtgtctgtttttaaaggcgcatcccgaagtggaggtggagggactgtattcccatctctacacccattcccgcgaggaatcggaaagacagcgcctcttgtttttaaggatgaaaggggtgtgcgagaaatactatccctccgtgctctgtcatctgtccgctacatacggcgcccttttgggcgaggcgttctccttcgatatggtgcgcgtggggctggggctttacggctatctgcccgagggaatcgaccccgctctgcgggagcggatctccctgcgtcccgccatggcggtgtacgcgcaggcggtgcagagcaggaagtattccttcggcggcgcggggtacggggtactttgcgaagaggcgaaaacgcacctttcctatctcaccgtctggcgggtaggctatgcggacggcttcggatggaaaaaggacaacggcatgaacggcggggaaaagaacctttccaatctctgtatggacgtgtgcgtccgcaaagggcggcgcgttcgcggctcttttacgccggtcatgacggacgcggcggaaacggcggaaaaatcgggcaccatctgttatgagattttgtgcgcggctacccgtcgggcggagtttgtatatgaatatcgataaactgcatatcgtggaaagcggcgcgctttccgtttcggaaagaaaagcgtccctgcgttcgtatatgaaaaaacgtcggggcgaaaacgaaaaccgcgacgtcaaggaagcgctgctgctcgaaaattttttgaaatcgggcgctgcggagcgggaaagctttttcgtctatatgagcttttcttccgaagcgccgacggacaagctcatcgcgtatctgcttgctcaaaacaagagggtgtactgtccaaggacggagggcggggagatcgtgcccgtagagtacggagaagatttttccctctcgccctacggcatccgcgagccgctcggaaaggcatacgagggaaagatagacgcggcggtgcttccccttctcgcggtggacgaaagaggctcgcgcctcgggtacggcagaggatattacgacagatttttgaaacggcaccccgaaacgaaacgcatcgcctattgtttcgattttcagctggtgcgggaggtccctcgcgaggaatgggatatacccgcggaggagatcgttacggacaagcgtcggctgcttgcgaaaaagcgggatggggagttttgaaagacgttgccctcccgccgcgccggggcaaggcggaaaatgcggtttggaataaaaattcttaaaagtgcgtatcgctcgccgtcggaattttcgctcttctccgcttcgcgcctcgccccaagagaagagccgcttcaaaatccgtgcccccttgcgtccgctctgaaaaattcaactaaagaagaaatcaaaatcggaggaagatatgtctaatttcaagacgaaatggaaggtgttttggaggatcgtcggcgaatgtttcatgcgttcgctgacgccttccgtaatgttttttgtcgccggattggtgctgctgatgctgcaatccaaaaatttcggactttcggcgcagatggcatgggcggcgctgtgcgcggtcgtcgcgctggcgtataacggctttctgatgtggatctgcggcggaaatcattacgagatgctcgtttcgggaaatctgaaacgccgttccgcgatgcagtccggcagcgagctcaacatggcgagctacaaatttcagaaagagtaccgcccgtggaagggctttgccatcggcgccttcgtttccctgctgctgatcgtcggcagcatcgtgctcggctgcaatcagacggctatcgtcgaggccgccacgaacgaagaagtgacgctcacgacggggctcgccgcggtttctctcatcttctattgcctcgcgggctgggtgctgctgcccattctcgaactgaatatcgcgggcacggcggtcagctttttcgtgggctgcgcttttgcgctgctgcccgtctgcgtttcgggcggcttctatatcggcggcgcttacggccgccgccaca

SEQ ID NO: 867 - DNA, 3837 bp, Unknown
  16S sequences of unknown bacteria
ggtcgcgctggcggggctcgcgctctcggcggggacgcgctccgcagcggcggcgctggggctgcagcttctgcccctggccgtggggctgttgctgccggcgcgggctgcgggcgcggggcgctgggtctgcctggcgctgggccttgcgctgctggcgccggtgggctttgcgctcctcgggcagatggcgggcgcgcgggacggggcgctggcggcgctgaacgcggcctttttccgccgcgcgcggatggaaaacgtctcggcctgcctgctccttggcgcggggctcttcctgcgggcggcgctgcccgggggcgaaaaacgcgcttgacaggcgcggggcgttggtggtatactgcacccaacttcttcttacggaagggagagcttcggatgaggatcgcgcttcgcatttacgcctatgcgtacctgtattgcttttgcaatgcgggctgtttgcgctgcgcgtaaagagagaatcctcttgatccgaaacgaaaacgcgcaagaccaggcggcccgccgaaacttctcggacgggccgcctttttgcattccctggccgcaggcgggagcacattcgcagtatgggaggacggaaacatgatcatcattctcaagcaggaagcgccggaacaaaaggtgcgcgcgctcatcgaagaggtccagggcctgggcatgagcgtgaactacagcgcgggcgccgaggccacgatcctgggcctgatcggcgacacctcgcgcgtggacgaggacaagctgcgcgcaaacgaggtcgtcgcggacgtgcggcgcatcaccgagccctacaagaaggcgaaccggcgcttccaccccctggacacgcacgtcgccgtcgccggcaggaccatcggcgaggggttcttccacgtcatggccggcccctgctcggtggagagcgaggcgcagctgtgcaccgtggccgaagccgtgaagaagagcggcgcgaccttcctgcgcgggggcgcgttcaagccgcgcacctctccctactccttccagggcctggaggagagcgggctggacctcctgcgcgaggcgcggcggctgacagggctgccgatcgtgacggagatcatgggcgaggagcagatcccggagttcgaggacgtggacatcctgcaggtgggcgcgcgcaacatgcagaacttccgcctgctcaaggccctgggccggacgaagaagccggtgctgctcaagcgcggcctctcggcgacgatcgaggaatggctcatgagcgcggagtacatcctcgccggcggcaacgagaacgtcatcctctgcgagcgcggcatccgcactttcgagacgatgatccgcaacaacctggacatctcggccatcccgctgctcaagcggcagtcgcacctgccggtgatcgtggacccctcgcacgcggcgggcacggcctggatggtggagcccctggcgcgcgcggccatcgccgccggcgcggacggtctgatcgtcgaggtccacaacaaccccaaggccgcgctctgcgacggcgcgcagtcgctcaacccggagcagttcgacgccctgatgggcgaggtgcgccggcgggccgccttcgagggcaagcagatgcagtagaacggaagcacagagaaagcgcgccggggcaaaatgccccggcgcgctttgcctgcccatggtcagaggacgcacaggtcgctgccgatgctgcgcaggtggttctggtagtcgcgcgtgccatagagggcgtcgcgcaggttgcacagctcgatgttgttgtcgagaatccagtcgtgcaggcgctgggagcagagggcctccacgtcgtaggcgcggctgagcgtgaccagcggcgccatggggccgtagtcgcccaggtgcgcgacgtaatagtccacgtatccggggtggaacccgtgcatcagggccgcgccctcgggcagctcgtggatcttcatcgtgtccgcgaggagccagtcgatggcgtcgtactccgcgtccaggccgcggaaggtctcgggcaggggcttgccgcccaggttccagttgtccgccaggaacacgcggtcctggaagcggggatcgaccgggccgcgggtgatctccccggtctgcgggtcgcggtgcaggcggctgccgtagttgacggccatgccgtattccttggagacggcggtcaccgcggcagcgaagggcgtcttgtcgcccatgtccacgccgacgtccggcgcgcggcccaggacctggacgcagcggtcgacctgcgcgcggcactcgagaagaatctcgtcgtagtcgacgtctgcggcggagcgcaggtcgtggcggaagcggtcggtcccggggatgagcaggctgcgcacgcgcgcagggtccgagacggcgctgccccagaagtgcgtgtgccagccgacgctgagccaggggtagttgcgcaggcgctgcagcgcgtccaccgtgcccggcgtgtcgagcatgatgtccgcggaggtgccaaagccgcggtcgtacgtctcgaaggtgccgatgttgcagacgtttgtgtaacccacgtcgtcggtgcggatgatgagcttctgcatgtgaagtcctcccttgcaaaaagatcttatggtaccagtatatcagaaaatccgggcggatgtaagcgatttttgccgggcgggggcgttgatttgcgcgcggcgcgggcgtacaatggaggggagtttttttgcaccgcaaggaggagagaagatgatcagctttcgctgtgactatgaggacggggcctgccccgaggtgatggaggcgctgctgcgcacaaacggcgagacgacgcccggctacggcgaggacgcgcacagcgccgccgccgcggcgcgcatccggcagtgggcggactgcccggaggccgaggtgttcttcaccctgggcggcacgccgaccaacgcgatgaccatcgcgcacctgctccggccctacgaggcggcgattgccgcggagacgggccacatcaacacccacgagaccggcgcggtcgaggccacgggccacaaggtcgtgaccgtgcccagcgcggacggcaaggtcctgccggaggacgtgtgcgcggcctgcgcggtccacacggaccaccacatggtgcgcccggcgctgctctacctctcccagcccacggagctgggcacgctctacagcctggaggagctcgccgcgctgcgccgcgtctgcgacgaggagggcctgctgctctactgcgacggggcgcggctggcctcggcgctggcggcccgcggcaacgacgtgcaggtgtccgaccttgcgcgcctgtgcgacgccttctacatcggcggaaccaagtgcggcgcgctcttcggcgaggcgctggtcttccccaagcccgcccttgcgcagggctttgcctacgcgcgcaagcagcgcggcgggctgctggccaaggggcgcatgctgggcgtgcagttcgaggccctgctcgcgccgggcgtctacgagcgcatcggcgcgcacgagaacgcgctggccgaccggctgcggcagggcatcgccgcggcgggctacggctttgtgtgtcagacgcgcacgaatcagctcttccccgtgttcccggacgcgctggtggagcgcctggaggcggatttcggcttccaccgctggggcgcggcgggggaggggcgcaccgccgtgcgcctggtgacctcctggtccacgcaggaggcggacgtggaggccttcctgcgggcgctggcataggcgcgcaaaaaaagaagtgagcgaattgaacagcaccccatttgttagacagtatggtatactgaataacaagtggggtgt

SEQ ID NO: 868 - DNA, 7342 bp, Unknown
  16S sequences of unknown bacteria
tgggaactgcttaccattgtgagatcaaccgtgtaagccgtaccatgctgaccaaagtaccggaggaattgactgattatcgtcaggcagcattctgtgcgctgggaggtattgctctggaaggaatccatcaggcagaagtggttccgggagagaccgtggcagtcatcggtatgggactggtggggcagatcgtatgtcggatcctgaatgcttacggatgcgatgtgatcggttacgatgtggtagataagaccatgccgggtactaggctgaaggcatttatcaattctggtgatgacaatgcagcggatatgacgaaagcattgaccagaggccggggtgtagacaaggtgattattaccgcagcgaccaacagtaatgcaccgatggatctggctgcagcgattgccagagatcgtggcattatctgtatgattggtgtgactcagatgaatattgacagacgtccgtactatgagagggagctgtcctttagaattgcccgttcctatggagcaggccgttatgattctacctatgagcagaagggtattgattacccgattggctatgtacgttttactgaggggcgcaacattgaagagtttgtgcgtctgctggcacagggcagaatcagccttgcagatattattacccatgagatcccatttgaaaaagcggcagaagcttatgagatgattaccaagaatccgaatcatgagcgctatatcggtgttcttctgaaatatgatgaaaatgatacgaaatggcagagccggatcgagaatccgaaggcgaagagagcggcttctggtgagaagatccgcctgggactgatcggagctggaaactttgtacgcagtaccatgctgccaatcatgaaggagacagggctctttgaattccgcggactggcaaccactggcggagtgggtggtgcacaggccaatgatggcacaccgtttggttataccaccaataattatcaggaactgctgagtgatccggagattgatctgatcgccgtatccacccagcacaacagccacgctaagtttgtaatcgaagcactgaaggcaggaaagaatgtctactgcgagaagccgctgtgtctgactctggatgaactgacagcaatcaaggaagcgtatgagcagtctgaaggtgaactgtttgtgggactgaaccggagacatgcaccgctgatccagcagatcaagagagagatgaagacggatcagattccggcagtctatgattttatcggaaatgccggatttattccgaaggatcactgggtacatgatgaagcagcaggtggcggcaggattcttggcgaggcatgtcattttgtggatctgatccagtatctggacggaagtcatctggaggatctgacagtaactgctgcatccaataatgcttatccgatgaatgataacgtactgattactcttcggtttgcatcaggtgccattggaaatattgtctactcttccatgggctccaagaaatatccgaaggaacagcttcgtgtgctgtccaatggttcggtctatgagatggacaactttatccggttgaagaaatacggcagtaccaagtccgtaaaagaaaagctcaagcaggataagggtatccatgcagagtatgaatatatctgtaaagtgctccgcgggcaggagaagaatacggtgattgctgatgcattccgtggacaggaactgttgatcaaagccatgcagaaggtaaaagagtcatgaggatcctgatctatgatgtggccgcatccagcggaggagcactgactgtactgaacagcttctatgaggagttctgtaaggatacgaagaatgagtatatcttcgtgctcagtgtctgtgaactgaaggaacagcctcatatcaaggtgctgaacttcccgtggatcaagaagagcccgcttcatcggatgtattttgatcaggtgctggcgcataagttggtgaaaaaatatcatgcggacaaggtgttgtccttacagaatatcgaacttcctcatgcaggagtgccgcagatggtctatgaacataatgcccttccattctctgaatataagttcaggccgcaggaggcatttcgtccatggtacagtcagcagatccttggacggatgatgaagagatctatccgcagagcagagcaggtgctggtgcagaccaactggatgaaggaagagatcgtccggcaatgtaagatcccagcagaacgggtacaagtgaagttcccacctgtggagatgctgaagacggatccatggcagatggaagaagaacatgcggtgtttttcttccctgcaggaccgcctgcctataagaatcaccgcacatttctgaaagcctgtgagcttctgaaaaagcggggatgcactgactgggaagcagtatggactctgaacggggacgagaacgacggtattcgagcattgaaaaaagaagcggaagagaagacgctgccgattcgattcgtgggaatgatgtcaagggaaaacttgtttgcacaatatgccagatcggtactggtatttccgtcttatattgaaaccattggtctgccgcttctggaagccagatctgtaggagcaccaattctggcagcagactgcctttatgccagagatggagtaggagattatgaaaaggcagagttttttgagacatttgatgcgaaaaaattgagtgaaatgatggagaggttttgtcactagatgaagtggaacagagaacaaactgagaaatattttgtattatttggaaaaatcatgttagtggcagcgattgcttttaatgcatggctgactcataaatgttattttaattttctactttcagatgacgcatcagagctggtgtattccaggatgcttgcacaagaagggagtattatctcttccaactggtatggatcaacagagcttgaaatcttaaatacacaattgatttattctctgttgttccattttacatcaaactttcaggtggtccggatcgtgggacaggtaatcctgacacttatctttcttgccagctatctgttctgtctgcgtggaattgatccgggaaaagcaggtgaacgtttctggaagacagcatttttgctggtgattcctatcagtgatgcatggatcttcctgattatgaaagcgtattatataccggctgtggcagtgagctttgtggggctggggctggcgtgcaggatcagaaaagaagaagtttcaaagaaaagaaaacttgtacttttggtaacgggctgtatctttgcttttgtggcatgtctggaaggtctccggcatatacagctgacgtatctgccgcttgtcttaagctttgtatggatctggtggaacctgcaggaagagaatggatggaccgggaaaaaactgttgctgccaagaggggcaatcgcaagcgtctgctggcttgtctctggcatggcaggttatctggtaaatgttctgttacttagcaagatttatcaatatgatacgcatcaggatgcagcttttcaggatcagcttcccatggagagtattcagaatacgttcaatgcattgctgcaggtgacaggatattctggctggaaggaactggtttccggaggtggtatctgtaatgcccttgctatcatatttgcagttgtgattattgtcggcctattgcgtattgcagtaagaatacggacaagaaaaaccggcgaacagttagtatctgcatttgtgattctgtcatttctgcttagtatgtttatctatatttcggtggatgatgtacaggccagatgggttatggcaggtgtggcaccgatggtactgttccttgttttactggaacggcttccggcattgaagcagtatgtactgttgtttgtatgctatggaacgattatgattctgggagcgcatgagtataaggctatctataccaatgatcataatgaggaattgaagccggtatacgatcttctgatggatagtgattatacctttggttatgcgaccttccgggcaggcaatctgatgacagaactgaccgatgggaaagttgacatgcggatcgtacaggcatattcaaccaatcataaattaaagaacaggcattggctgacaccgatcgagtttgaatatcatgaaggggcatttcctctgattctggagaagaaacggacagaagatacatttgatcctcaggatgactggaaactgattctggatacggaagcatactgggtctatgagattccggatcagagagcatttcaggaatatctggataaagtggaattgtaagaaatatcagacaaaaacttgaaaaataaacagaaatagtatatattatgagcagtatgtttacatgatctattaaagaagtaaaggatggataaacgatatggcattattaaaagaatggcagaaagtcgcatatgatgagacgaaagacagaggaactcttcagagattctgggcaaattattttaatctggaaaagggagtatatgagaagcttctggaagagccggatgtagaagtaaaaggaactgtcaaagagctggctgaaaaatacggcttaagcgttatggagatgaccggattcctggatggtattaatgagagccttgtggaagctaacccgatcgaagagatggaagaggatacggttgtcagcctgaaattcgataaagagaaactctacaagaacatggtagatgcaaaagctgactggctgtatgagcttccgcagtgggacaagatcttcgataaagagaagaaacatgaactgtatctggagcagaagaagtctggcaccatcgtaaaaggaccgaagatcggacgtaacgatccgtgtccgtgtggcagtggcaagaaatacaaacagtgctgcggaaagaaacatgcttaaaagccttgacactattttcttacatgttataataagagccaattgaagaccaataaaaccatgacaggaacagtaagctgatgaaaatatgcagagagaagtgcgtaaggtgcgagcgctttatatggacatcagatgaacaccaccctggagcgactttaatacagtccggccgacaccgttatcgtcaaatgagaggtgtaagcacaagaagggtggaaccgcggtaaagagtctatcgtccctgaacagttttgatatgaagctgttcagggactttttattttatgatcaggaggaagaatgagatgaagattacattaaaagatggatcagtcaaagaatatgcacaggcaatgtctgtaatcgatattgcaaaagatctgagcgagggtctggcacgtgtagcctgtgccggagaggtaaatggagaggtcgttgacctgagaaccgttctggagcaggattgtgagttgaatatcctgactgcaaaggatgagagaggtctggcagcacttcgccataccgcaagccatgtgatggcacaggctgtaaaacgtctctatccgaacaccaagctggcaatcggaccgtctatcgcagatggtttctattatgatatggagtttgaggctccgttgaccagtgatgatttcggcaagatcgaagctgagatgaaaaagatcattaaagaggatctggagattgagcgtttcacaaaatccagagaagatgcgattgctttcatgaaagaaaaaggagagccgtacaaagtagaactgattgaggatctgccagaaggtgaagaaatcagcttttacagccagggagagtttgttgacctgtgtgcaggaccgcatctgatgagcaccaagggtgttggcaaggcatttaagatcatgagtcttgcaggtgcttactggagaggcgatgagcacaacaagatgctgacccgtctctatgcaactgcatttggcaagaaagaagagctggaagcttacatcaccatgatggaagaggctaagaaacgtgaccacagaaagcttggaaaagagctgggtcttttcatgatgcatgaggcaggaccgggattcccgttcttccttccgaagggaatggttctgaaaaatacactgcttgattactggagacagatccataagaaagcaggctatgtagaggtatccactccgatcatcctcaacagaagtctctgggagacttccggacactgggatcactacaaaaacaatatgtatacaacggtaattgatggtgaagattatgcgatcaaaccgatgaactgcccaggtggtgttctggtatatgcttctgagccgcgttcttatcgtgatctgccgcttcgtgtaggtgagctggggctggttcaccgtcatgagaaatctggtcagcttcatggactgatgagagttcgctgcttcacccaggatgatgctcatatcttcatgacaccggatcagatcaaagacgagatcaaaggtgttgttgccttgatcaatgaggtatattctctgtttggatttgagtatcatgtagagctgtctaccagaccggaagattccatgggaagcgacgaagactgggagatggcaacagagggactgagaagtgctctggatgagattggacttccgtatgtagtaaacgagggagatggcgcattctatggcccgaagatcgacttccatctggtagactgcatcggcagaacctggcagtgtggtacgatccagcttgatttccagcttccgcagagatttgaactggaatacatcggagcagacggagagaaacatcgtccgatcatgatccatcgtgttgtatttggttccattgagagatttatcggtattctgatcgagcattttgcaggagcattcccgacctggctggctccggtacaggtaaaagtactgccgatctctgaaaaatatatggattacgcagagaacgtaaagaaaaagctggatgaggcaggcattcgtgtagagctggataccagatccgagaagatcggatacaagatccgcgaggctcagcaggcaaagattccgtatatgctggttgtaggccagaaagaggaagaagacggaactgtcgcagtcagaagccgtgctgctggtgatgagggaactaagagcctggatgcatttatcactgatattcagaaagagattgaagcgaaagtaaatcgtgtcaaagaggtttctgaagaaaaataaaaaaagttgtaaaaagttgttgacaactggaagatcttttggtaagataacggagtcggttgcaagacaccgactcacatggcgagatagctcagttggctagagcacacggttcatacccgtggtgtcgagggttcgaatccccctctcgctactaca

SEQ ID NO: 869 - DNA, 3774 bp, Unknown
  16S sequences of unknown bacteria
gctatgcgcggtcgggcttctcattcttctcttttaatcgcatatcatttcttcaatcgtcattccaaacaacgacgccaatttatatgcctgatatacggaaggaatattctttcccgtttcatacctcgaaagcgtttgattagggatccctgtcaattcactcactttttgcagcgtccacccctcctgttttctcgccaatcttaaattctgtccaaaacttttcctttccgattccatctccatttcctttcttttctgccattccatttgtttgctcctcaaaaacattcttctttatttcgagcgcttctttgagcaccgtcggaaaaggtcgcctccgttctcttctgtatttcttaaaaaactcggaaaaacgtcctttctcacgtctattataatcgatcttttctaaaaaagtttccgaccgttcggaaactctctgctttttttaatcttttcaaaaaaatttctttatccgactccctctaaaaattatttcttaaacgacatataaaaaacccgtttttttctttcttttactctcgtccgcccccaatcccgcaaaaaaagaaagaaaccttcgcgtaaaacattgacttaacgcgggaaaacattgtataataaggaaagaaacaaaacgactcggcaaaataagccgaatcggtcaaggagatacggatatggcagaaaaaagagcggttacaatggaaaaactcgtttccctttgcaaaaatcgcgggtttatcttccccggcagcgaaatttacggcggactcgccaatacatgggactacggtcctctcggcgtagagctgaaaaacaacgtcaagaaagcttggtggaaaaaatttgtgcaggaaaatccccacaatacgggggtggactgcgccatcctcatgaacacccgcacctggaaagcgtccgggcacctcggcggattttccgatcccctgatggactgcaaatcctgcaaagcccgccaccgcgcggacgatttggtggaaaactatgtcgaaaagcataagctttccgtcagcgtcgaaagcatggacaacgacgcgctggaagcgttcgtcgcggagcacaaaatcgcctgccccgtctgcggcaattccgatttcacccccatccgcaaattcaatctgatgtttaagaccttccaaggcgtcaccgaggattccgcgaacacggtgtatcttcgtcccgaaacggcgcaggggattttcgtcaatttccaaaacgtacagcgctctacccgtatgcgcgtgcccttcggaatcggacagatcggaaaatccttccgcaacgagatcacgccgggcaacttcaccttccgcacccgcgaattcgagcaaatggaactggaatttttctgcaaacccggcacagacctcgaatggttccattattggaaagagttttgccgcgactggcttttgtcgctgggcatgaaggaggaaaacctcaaactccgcgaccattctcccgaggagctttgcttctattctaaggcgaccaccgattttgaatacaactttgccttcggctggggcgaactttggggcgtggcggacaggacggattacgatttatcgcagcacgcaaaggaaagcggcaagcccatcacctacaccgaccccgtaacgaacgaaacgtacgttccttacgtcatcgagccgtcgctcggcgccgaccgcgtggtgctggcgttcttgacggacgcatacgacgaggaagtggtggacgcggaaaagaacgacgtgcgcgtagtgctgcatttgcatcccgcgctcgcgccctataaatgcgcggtgcttcccttgcagaaaaatctcaccgaaaaagcggaggaagtgtatgcgcaggtgcgtaagaagttttcttccacgttcgacgtgacgggctccatcggcaagcgctatcgccgtcaggacgaaatcggaacgccctactgtatcaccgtcgattttactacgctggaaacgggcatggtgacggtgcgcgaccgcgacaccatgaaacagatcagtttaagcgtcgaagacgccgtcaaatatatcgaagaaaaaatcgaattttgaggatacgtcctcgtccctcgcattttaacgcccgcttcttacaaaaagaagcgggcgttttatataaaaccactttttctccgcgcgttattcagtcccccctttatgcccgtcgccgatataaaaatttctgctttcctcgcgccctttaaagcatttcatctcaaccctgtcccccttcaacgagatttatagatgccgtttaaatcgacgatcagcaagttttccgcctcgtcgaacacggcgggaaaacggattccgcccgcgggcgggcgcctgttcagaagacggcgtagttctccccgcaaggtgacggaggaaatcatcgcccgatttttctttttcccgaccgccgcaaaattataaacgccctccccgctctcttcgtcggcagccttgatcgccatgcgcttgcccgcgcggtcgatccccacatacacccgcttagggtagcgcaaaagttccagacaccgcccgttgaaactcagcccgctcgacagccatgccacgtaaggactttgcgtttttcctatcgtaaaatcaaatccgttcatattttgcctccccattgtatattatatcccagaatcgtgctgttgacaagtttttttagcactcttctgggataataatgtagaaagggtggtaaatatttatggaaaacgcatccgctttcggggaaaggctcacggagcttatggtgataaacaatatcgatacggcgcatttggcggcagccgtcggggtgcacgcaacgacggtgcagcggtggcgacggggcaccaagtatctttttttatcacagctcgtaaagttagccgattatttcgactgttctctggattttctcacgggaagaacggataccgttttagactattcgcccaagccgtgcccgcccttttatgcgcgtttccgcgaggtgatggcggagagggggattacgcgctaccgcatgagcaaggaaacgaaaattaaggattcttactttaccgagtggagcaagggaaccgatccgcacctgttttccctgatcgaggtcgccgactacctcaacgtttcggtggattatctcgtgggcagggagcaatgacccgcgcgaaggagaaaacttcacatccgcgttattttgcgtaaagaaggagctgccatgaaaatgccgaaagaaggcataaaaacggatctattcgccccctgcggaatgaattgcggggtatgttacaggcactgtctgcatccgaagccctgcggcggctgtcttgcagacgagggcgaaaagcccgcgcattgtcgaaaatgcgctattaaaagctgcgtccgagaaaaattcgtttcctattgttacgaatgtcctcggtatccctgtaagcagatcgacgctctggaaaaaagctaccgtcttcattacgaaacaagcctgcgggaaaatagtctgttcgtgcaaaagcgggggctttcgaaattcatggaagaccagtgccaaaaatacgcctgtccgatttgcggaggcgttatttcactgcatgacaaagtgtgcagcgaatgcggcaagaaatgcgaatgaccgtttttcgagccgtcctcaaatcatagccccctttttaatttttccttttccgccgcgacaaaaaaattttactacgtgaaaggacgggcaaaaatgccagatcggaagagcgtcgtgtag

SEQ ID NO: 870 - DNA, 20895 bp, Unknown
  16S sequences of unknown bacteria
gaacggtgcaggtttgttcttttattaaaatccccgagaaaaaagtgaagaacctttttttatactgctttgttttaattcatgtataccatactttgaatatattatcaaggactcgccaacagagagatttgctgccgtcctccgactgtctaattgaattatctgcttctcgtgcgagcagtcccatatgcctagaaaattgagagcggttcacgctttttgacgcaaaaacgaaattcagcgtgaatgcaaattgacgtttgggtgggattctaattttgaatctccggattagcactgtcgattcacgctaaaaagccgatttacttcaaacggcgtgaacatttttcgaacagaatttttgaaagcaagaatctgcatgacggaatcggataaaatgggaaattcattcacgctgatttgcaggaattgcgaatttagcgtgaagtcgtctcgaaattctaggcatattaaatttgcatcatcgcaaaaactctaattgttggccgtgagagttcagaaccaacaaaaggagctctgccgagtgggcagagctccttttgtctaaatgtttaaatcgtcttagtccaagaatcgtttctcgaagtttccaatcactcgtgcgttttccacgatgattacgaacgcatgagggtccagctcggcgatgatgctctgaagaatcggctcctcatacttggaaagaaccgtcaccagaatgtgggaatcctccttcgtatagccgccggcaccttcccacagggtgacaccgcggtgcatccgctgggtcaccgcatccaccatgccttccttcttggtgaaaatcatggcctgcatctggatgttctggatgtgaactcggttgatgcagaggccggtaactaccgagaatacgatggaatacagtacggtctggatatcatagatgaacaggcagactgcgtagatgcagaagctgatgatgattcccaccgtgcccaccttgaagtccggtcgcgtcttggccatgcagacgccgatcaggtcctgtccgccctgagagcttccggcacgaagcaccattccggcgcccacaccggcgcccagaccgcccacaatagcagccagcatcggatcgctgacaatcggcttggccggaatcggaatgatggccagcagtgccgaagccatcgcgatggatatcagcgtttccagacagaacttcttgcccattaccttgtaagccagcaggaagaacggaatgttgatggcgaagtagatgatgcccatgtaatccagccccggaatttccggaaggtgcagcacgttcagcagaaacagacggatcagctgagcaatgccggtaaaaccgctactgtagaagtgtaccgggttgatggccaggtttacgcccatcgcgtaaatcacattgcccaccacaacaagcccgaccttgcgggataatctcttatacgttgactcgttcatattatttagttttcctctttcttataatctcgtatgctcgatatgcagcactaagaaacacaaccgcgagattaaaccagcacatctcccttcatctccgacggaaccggaagtcccatcagcgtcagaaatgtcggggtgacgtctgccagctttccctcgttcactgcaaaagcctgcggctcattgcagatgtggcagcatggaactcgggaaagggaatgcttggtgaccacactgtctttgtcgtccagcatgtaatccgcatttccgtgatccgcaatcaggagaatctgaccgtccttcgccaggatggcgtccaccacctgttccaccaagccgtccagcacctcaatggcctgaaccgtcgcctgaaaattcccggtatgtcccaccatatccgggttggcgtagttctggataatcacatcgtatcgatccgatgcgatggcctccagcacgcggcgggtcacctccggagcactcatctccggctgcaggtcgtaggtagcgaccttcggggaaggcaccaaaatccgggcctctccttcttccggcgcttctttgccgccgttgaagaagaaggtgacatgggcgtacttttctgtctcggcaattcgcagctgccgcagtccgtgggcggcgatgacgcttcccagggtcggttccactatttccggcgggtatgccagcataacattcggcatggtggcatcgtactccgtcatgcacacgtacgtcagattctgtaccactttttttcgggtaaaaccatcgaaatctccatccaccagtgtccgggtaatttcccgcgcacggtccggccggaagttgatgaagatcacggaatctccatcctgaatcggctgcggagtaatgacggttggttttacaaattcatcggtttcatcctttgcataggattgtgccaatgcttcttccggagaatcggcgtgaagcccctccgaaagcgttagcgcatcgtaagccagctccagtcggtcccatctcttgtcccgatccatcgcatagaatcggccggaaatcacaccgaatcgtcccagttcgatttcgtgaatgtgatcctccagctgcttgagatagacatcggcacttttcggtggaacgtcccttccgtccagccagcaatgcacgatgacgtcctttacatggtgttcttttgccatgtccagaagcgccaaaagatgacggatgtggctgtgaacgccgccatccgacagcagccccataatatggagcgtatgaccggacccctccgccgcgttgctcattgcttttaccagagcctcgttctgaaagaaagatccgtcctcgattgcccgggtaatccgcggcaaatcctgatagatgacatttccggcaccgatattggtgtgacccacttcggaattgccaatctgtccctccggcagcccaaccggctccccgctggcatccagcgtgatgaaggggtacttgtgaaacaatgcgtccagatgaggcgtgttcgcagcggcaatggcgttgccatgcgcttcctcgcgaattccgaaaccatccagaatcaacaacattgcaggtctgtgtttcatgaaataacctcctgtcccttatagaaataaccttttaataaaccattatcgatagtatatcacaactcatattgcacgcaaagaaaatataaatataataatatttatagcaggaggaaactatgggcgtacattttacagaagatcaacagagagcaatcgatacattggataaaagcattctggtctccgcggcggcgggttccggaaagacggcggttctggtggagcggattattcacatcatcctggagggaaaagccaacgtggatgagatgctggtggtgacatttaccaacgcggcggcggcggagatgaagctgaagcttacccgggccatccggcagcacatgaaggatgtgccggagagcgctccggtgatgaaccggcagttgaatcggatgtaccgttcctacatcaccaccttccacagctttgcgctgcgggtgattcgggagtttttctataaaatcgaccgggagccgaccttccgtatctgcgatgaaacccagagtcagctccttcagatggaagccatggacgagctctttgaggagtgttttgagaatgacggatatattgagggagggtccttccgggactttctggagcactacagcagcgaccgaaacgagacgacgctgatgaacgaaatgatggagacctacgccaaactccgaagcctgccgaactattttcgctgggccttcgaaaaggcggagatgctgcgttttccggagtcgggctccatggcggattctcccgtatatcggatgctcctggagcggggaaagacagaactggatgcggccctgaaggattgcgaaaagctgattgacgttctggaccggaacggcatcgcctcgctggtggccatcgcaaacaaggattacgaacaactggaagagctgcgggactccttggaacacgccgacggccccgatgcttccgcctggggggcggtgaaattcgctacctttcgggtgaagaaagaggagaaggacgaatacgcggacatcaaggagtactgcacggatttgcgggaccggtacaagaagcgcatcaaggacttcaagaataaattcatggacccgagtccggagactcggttccgggagatggatgccgcctacgaatacacggtctattatctgaagctcctgcaggagttcgaaaagcggttcgatgcgaagaaacaggcgtcggatttggtggacttcagcgatatcgagcacatcacggtgcgcattttggaagacccggaagtgtcggacacccttcggaagcggttccgatttatttttatcgatgaatatcaggacaccaacaagctgcaagaatacctcatatccaaaatcgcccggccggacaacctctttaaggtgggtgatgtaaaacaaagtatctatgggttccggcagtccgacccgaagatttttatggatacgcggcgggagtacgagaaggaagaaaacaccgattccatggtcatcgacctgaacaagaacttccgaagcaacggtgccaccattcagtacatcaacgatgtttttgagggaattatgccggggtacgatgataatgcgaagctgtatcagggattgaagggagacgatcggttcaacctgaagtcggaggcacatattcttctggaagaggacaatgcggcggcggatgagccggtggaggtggatgatgacggggaaccgattccgaagctggaagcggaggccgcctacattgccaagctggtgaacggaatcatcggtaccacgttctacgacgggaaacagggcgtgcggcgaaccgccaccccgcgggatatcgtcatcctgtgccggagtaccagccgaagcgccgatgtgttctacaaagccatgctggaacaggatattccggctcatgtgaacgacgaccaggggtatttcgatacggtggaaatccaccaggccatggcgctgctgaagctcctggacaacggacatcaggatgtgccgctgatcggcatccttcgctcggagattttcgggttcagcccggaggaactggcgaaggtgcgaatcgcttacaaagagaatgggcagaggggagcgtactataaggccttcgagtactgcttgaaaaatccggaagcattggcggacaatgccctgtatgagaagcttcgtcaggcagaggagaagctggaggaatggcgctacctctccaacaaaatgccgctggatgaatacatctggtacgtgctgacggaatccggctactatctgtacgccggcgccatgtacggcggcagacagcgccaggccaatctgcggattctggcggagaaagcccggggctaccaggagaacggagtcgcctcgctgaacggctttattcgctacgtggatatcctccgaaagcagaatgtgaaaaccggacaggcggccatgatcagcgaggatgcggatgtggtccgcattatgaccattcacaagagcaaaggtttggagtttccgttcgtcatcgttgcgggaatgggcaagcagctgcgcggggataatctgggaaaaggattcatgttcgattccgatatgggtgtcagcctgtcctatgtgaatcggaaggacaaattctggagagcaacccttcttcagaacctgattatggaaaagaagagggatgagggtttccaagaagagctgcgagttctgtacgtggcattgacccgagccagagaaaagctgattctggtgggaaccgccaaatccccggaaaaactggagcggggcctgccgggcaaaagcagctactacgaggtcatcaaggagaaactctttattccgtcagtggaatatcggttcgcacctttcccgaaacagctgctgacccggaagcgaaacctcttcgaagaatttcagaaggagcgagaccggttccggggcgatgccaaggcggagcaggcggcggaattggtggcacagcggctggactacgaatatccggatgcccgaggcctgtccaccaaagcgaagtataccgtcagtgaaatccgcacccttcgggaggactccttccgaaagcgacgcatcgatctggaagagccggaattccggaaatccggcaaaatcaccggtgcggagatcggtaccggttaccaccgcatcatggagcggctggatttccgcaaagcccttgccgatggcgtcgtggacgaggattacatccggcaggtgggagaatcgctgagggacaagggggccatctccccggaaatcttcgaagctttggatctgaacatgataaaaacattcttcgccacggatatcggcagacgggcatcagaagccgcgggcaaaaaccggctgtggaaggagaaaccgttcaccctccggacggaagtggaagaccaatccgtgctggtacagggtgttatcgactgttacttccgggaaggagaccatattgtcctggtggattacaagagcaatcgcggttcggaagaagagtccaaaatgaaggaaatgtatcaagaacagattcgcctgtaccggattgccctggaacaggcggccggacttccggtcacggaagcgtacctgtacatgctccgcgccgggaaaaccatagaattataagaaaaacctgcatgcgatcggcaaccgcttgcggattgggctcaacgccccaatccgcaagccaagattgcctcccccatgcaggtttttcgttgccgccgcgaccaacgcctggtggcggaaatgatgacacgaaaaaagagagctgcaattgcagctctcttttgagtcttcaatgaagtgaatcgataatcgaaaggttcgattatacaataccctgcatcatcatagcatctgctactctttcgaaaccggcaatgtttgcaccggctaccaggttctcgcccagatcatacttagtgcaagctgcttcagtgatctcgaagatgtgaaccatgatgccttccagttcttcgtaaactctttccttgctccagatgaggtgctcagcgttctgtgccatttccaggcaagagcatgctacaccaccggcatttgcagccttggaaggaccaacaactacgccgttctcctgcaggtaagcgatagcttcgttggtcgaaggcatgttagcaccttcgatgaggtatctagcgccgttcttaaccatttccttcgcccagtcaagagtgatgtcgttctgcattgcgcatggcatgtacaggtcagccttaacttcccaaggtctctttccagggatgaacttagcgttcgggaacttctctgcgtaaggagcgcaagccatagggctgttagctctcagccagagcagcatgtcaatcttctctggtgtggtgataccttcctcgtccagaatgtatccatccggtccggagattgtgattggctttgcacccagctctaccagcttggtgatggttccccaggatacattaccgaatccggaaactgctacagtcttaccttccagagtatcgccgaagtgcttcagaacctctctagcgaagaatacgataccgaaaccggtagcttctgttcttccgttcagaccgccgttggttgttcccttaccggtccaagttccgtcgtactgtctggtaattctcttgtactgacccatcatgtagccgatttctctgccgcctacacccatgtcaccagccggaacgtctacattcggaccgatgtgtctgtacagctcggtaacgaagctctggcagaatctcataacttcagcatcagacttgccagccggatcgaagtcggaaccacccttgccgccgccgataggaagaccggtcagggagttcttgaagatctgctcgaatcccaggaacttcaggatgccaggatatacgttagcctggaatctcagaccacccttgtacggtcccagtgcactgttgaactcgaatctgtatcctctgttaacgtgaacttcgccgttgtcgtcaacccaaggaactctgaaggtaatgcttctttcaggctcgatcagtctttcaaccagaccggccttctcgtattccggatgtgcttccagaacaggctcgatagaagtcagtacttcttcaacagtctgaagaaattctggttcatgtggataatttttcttagcaatctcaatgtacttctgtgaaatattagccattttcttctccttataaaaaacttaatatacttgcgattgactctttcccaatcgcactttgattttagcactctcaatatgcagtgtcaatgcacgtgaaaaaagtatacaatctagaagcaaaatacaatctagaaggtgattccaattcttacagcgtgaaagaaccccttgcaccgccgttaaaatcttttgttttcatcgctattatgctaaaataaaatgtcgatagaaaagacaaatccgtaccgccggaaacattgagaatgccgaggctcggatagattcttttacagacggtcagatattttttcgcccgcattcctgcggacgcaatttatacatatattaaggaagagattaatgaatttatcaaatctgaacagcgaacaacagaaagcagtgaagcatattgacgggccacttttgattttggccggagcgggaagcgggaagaccaccaccatgacccatcgaattgcgtacatgattgagcagggcgtgaacccggcccaaattatggcggtgacctttaccaacaaggcggccggagagatgcgggatcgggtggaaagcctggttccacggacccggggaatgtggatcatgaccttccatgccatgtgtcttcggatgcttcgatatcagtgcgaggtgctgggatacaagaccggtttcacggtgtacgatgaaacggaccgaaaatccctggtgaagcggatcatgaaggctctggaaatcaacgaaaagacctatcccgtcagctatgtaatcagcgccatcagcaatgccaaggagcgggagcaaaactcggaaaaatatattgcggagaattccggagacttccgagcgaacaccgtgtatcaagtgtatcgggaatacgagaaggaaatgatgcggaataacgctatggacttcgatgacctgattctcaacggggtgcgtctcctggaagcggatccggagattctggcatattaccgaaaccggtttcaatacatcatggtggatgagtatcaggacaccaactacttgcagtacaaactgattcacctgctgtccaagaccaaccggaacctctgtgtggtgggggacgacgatcagtgcatctaccagtggcgaggggcggacattcggaatattctggatttcgagaaggattttccggaggtgaccaccatcaagctggagcagaattaccgctccgacggaaatattttgaacctggccaactccgtcatttgcaacaataagggccggaaggagaaggctctgtggacggagaaaaaggacggggcgaagattacctaccgtcgactgcccgacgagaagcaggaggcctggtatatcggcagtgaaatcgaccgcctgcacgaggcgggatatccctacagcgatatggcggtgctgtatcggaaaaacgctcagtcccgagcctttgaagagaaattctctttccggggaattccgtaccgagtgctggcgggattgcggttctacgaccgtaaggaaatcaaggacgtgatggcttacatgcacctggtggaaaatccggatgacgatgtggccatgctgcgggtcatcaacgagccaaagcgaggcgttggagcgaagaccctgtccggcattcaggcctacgcctccggataccgaatcagcatttaccgggctctttgcgaggcgcaggtgatggcatctctcccgaagaaggcgggaaaggccctgcaggaattcgtgcagatgattcaggatcttcgaggggaactggacaatctgaccctggtggatctgtacgacaatattctgaaccgttccgggtatctgggtgccttagaggccgcagatacggtggaggcggacggacgcatcgagaatatcatggaatttaaatccgtggtggcggagttcgagaagagcctggagaacggagacgaggcagcccatcaggaggagctgagagaagaacgggaagccttggccaaagccggatttccggtggatgagccgacgccgctggcggccttcctggaacggattacgctgatgtcggatatcgacaatcgggatgaatcggaagatgcggtggtgctcatgacattgcacagcgccaagggattggaatttccgattgtattcattccgggaatggagaacgggattttcccgggaaccgcttcctttgatgaagaggggcggctggaagaggaacggcgcctttgctacgtgggaatcacccgagcgaagaagaaactgtatctcaccggggcggagacccggatgctgtacggccggacggattacacgtccgaatccatgttcctggacgagatggacaagcagtacatcgacggcgagaccgtgaaggaacgccaggcgaaacagggaggcattgccggggacggtggacttttcggagattatttttacaaggggagaagccacggcacggaggatggatattccggaccggatggcgggaagccttttgacagtctgggatatgcgaagaagcagactcggaagaagttctccaacgagggcctgaaggccggcgataaagtgcgccacccgaaattcggagaaggaatgctgattgaggattcgggaaaaatccttaccatcgcctttgattccgtgggaattaagaaaatcggcaagggttttgtaaatattgagaaggtagattaatggaagatatcagaaagagaatcgacgacctgacggcgcagctgaacgaggcctcccgggcctattacgacgacgccagcgagatcatgaccaattacgaatacgatgagctgtacgacgaattgctgcggctggaggcggagagcggatacgttcccgaggacagtccgtctcagaacgtgggttatacggtgcagtcggaactgccgaaggagcgtcacgctcggcggatgttgagtttggataaaacaaaggatcgggaggcgctgcgttcctggctgggcgaccgggaggcgctgctgtcctggaagctggatggtctgacggtggtgctgacctatgaagaaggaaagctggccaaggcggtgacccgcggaaacggcgatgtgggcgaggtgattacccctaacgcccgggtattccggaacgtgccccgcaccattccccatcggggacatacggtggtacgaggagaagcggtgattcgctacgaggattttgagaaaatcaacgcggccatcgacgatgcggatgcgaaatacaagaatccgcggaacctgtgcagcggcagtgtgcgccagctggacagccggattacggcggagcgaaacgtgaacttctacgcctttaccttgagtgaggcgccggaggtggagttcgcgaacagccgggaagcccagatgaaatggatggcggagcaggggttcgacgtggtggaataccggaaggtggaccgagagaatcttctggcggccatcgatgaatttgaaacgcggattcccacctttgagattccgtcggacggactggttctgaccctggaggatttggcatattccgcatccttggggaccacagcgaagttcccgaaggatgccatggcctttaaatggcgggatcagcaggcggaaacggtgcttcgggaaatcgagtggagcccgtcccgcacgggactgctgaatccggtggcaattttcgatccggtggagctggagggaaccacggttcgccgggcatcggtgcacaatatcaatataatggaagatttgaagctgggcatcggagaccgaattacggtgtacaaagccaatatgattattccgcagattagcgggaacctcaccaagagcggcagcttccacatcccggagacctgtccggtgtgcggcggagagacgcaggtgcagtcggacggcggcaccaaagtgctgacctgcaccaacccggactgcttggcgaagcaggtaaaaagattttctctcttcgtctcccgggatgccatgaatatcgaagggctttccgagcagactttactgaagctgatcggcatgggatgcattcggtccttcccggacatctttgaactggaaacgtaccgggaagaaattgtagaaatggacggttttggggagaaatcctgcaggaatctgctggactccattgaagctgcgagaagcaccacgccggctcgggtgctgacggccctgggaattccgggggtaggcgtcaccatggcgaatcagattgcccgtgcctgtcgaaatcggtggcagaccattcaggcgttgacggaagaggaactgctggacatcgacggcgtgggaagcgtaatgtcgaaggattttgccggcttcttccgggaaccgaagaatgaggaaatggtgaatcaactgattgccaagctgcatctggacgaatcctacgaggagcaaggtaccggactggcgggaaaggtgttcgtcattaccggttccctcaatcacttcggcaaccgaaaggaactgaaggcgaccattgaggcagagggcggaaaggtggccggaagcgtcagcggcagcacggattacctgattaccaacaatccggaatccggttcctccaagaatcgggcggcgcgggagctgggcgtgtcgattatcacggaggaggacatcttggggatgatcggacaaagcgaagcgtaacgaaattgtttttataaaatatttttacatactatacggaaagggggaggaactatggataattcgattcaggatatggacgaaacttttgaatattcggaagagaagattttcagcctcctggaggagaaaaagtatttccagtgtcgggatgaactgctgaagttcaatgcggtggatatcgcggagatgctggaagacgtcatgcgggaatacgacatgcagaaagcggtggtgctgtttcgaactttgccgaaagacgtgtccgttgaggtgttcccgaacatggatgtggacaatcaggtggaaatcattaatatcatcacggatccggaaattcagtacattctggacgagctggatttcgacgatatgatcgacgtgctggaggagcttccggcgaacctggtggacaaaatcctggagaaaacgccgaagaatgagcggcggcagatcaacaccttcctgcggtacaaggagaacagcgccggctccctgatgacgccggattacatcgagctgcggaaggatatgacgaccaaggaggcactggcgcacatcaaggaagtgggcatggattcggagacgatttacacggcctacgtgctttccggggggagaaagctgattggcatcgtgtctcttcggtcgctggtaatcgcaccggatcacgagaaggtgtcggagctcatgcatgaagacattattctggctcacgtggacgatgaccaggaagaggtatcggacctgttcaagcggtacggttttctggcgctgccggtggtggataacgagggccgtctggtgggcatcatcaccgtcgacgatattctggacgtcatcgaagaggagatgacggaggatatcgagcgtatgggcggtgtcatcgattccaccgacaaggaatatctggacatgccggtcatggaccacgtcaaggcggagctgccgtggctgcttctgctgatgtgttcctacttcatcaccggcgggctgattgcccggttcgaggatgccctgtcctctgtggtggcgctggtggtatacatgccgatgctgatgggcaccggaggaaactccggaacccagaccactaccctggtggtgcggggaatgtccaccggcgaaatcgagatgggagacgccctaaaggtgttctggaaggagttccgagtgagcatcgtgatcggcatctgcgtcagtgcggtgaacttcgtgcggattattttgctggatcacaacggcacgctggtggcgctgacggtgtgcgtctccatgctgctgatcgtcatcattgccaagtgcttcggcgggctgcttccgatgggggcaaaaaaaatcggcatcgacccggcattgatgtccggaccgatgatggcatccctgacggatatggtatcgttgggcacgtatttcatcatggcaaaatatttcctgaatttatagctatggacaatctattgctatatgaatataatgaatctatgtttgcacaagcaagaacaggaggaagttgtgagtaacagaaattatgatgagctgaaagaaacagctcgcaagattcgtgtggatgtcattcgcgcaatccacgaagccggttcgggccacccgggtggttccctgtccgcaacggacattcttacggcgctttatttcgataccatgaatatcaatccggagaatccgaagatggaaggccgggataagttcgtgctgtccaagggacacgcagtaccggcgctctatgcgactctggcagagagagggttctacgatgtggaagagatgatgaccctgagaaaaatcggaagtcacttccagggacatccgaatatgcataaagttccgggactggagatgtccaccggttccctgggacagggtttctccgttgcggttggtatggcgacggccggaaagatggacggaaatccgggcagagtgtatgctctgtgcggagacggcgaactgcaggaaggcattatctgggaagcggcgctgtccgcagcgcatcggaacctggacaacctggtgctgattgtggactggaacggtctgcagattgacggaaaggtggatgacgtaaagaaggtaacgccgctgagcggaaagttccagaccttcggatggcacgtgattaacgtggacggacacagcttcccggaaattctggcggcgctggatgaagccaagacggtaaagggacagccgacggcaatcatcgccaagacccataagggccacggcgtatcctttatggaagatcaggccggatggcacggcaaggcgccgaacgacgagcagttccggcaggcaatggaagaactgggaggtgtacagtaatggcagatgtaaagaagattgcaaccagagaagcgtatggtgaatttctggtggaagagggtgccaagagaccgaacctggtggtaatggatgcggatctttccggttccacaaagacaaagaatttcgcaaaagcatatccggaacgtttcgtgaactgcggtatttcggagcaggacctctatgcggaggccaccggaatcgcattgtccggtcacgtggtatgcgccagcacctttgctatgttcgctgccggaagagcctatgaaatcattcgaaactccatcggatataccggcgcaaatgtaaaaatctgcgcgacccatgcgggaattaccgtcggtgaagacggtgccagccaccagacttttgaagatttgtccctgatgagagagattccgggcatgaccgtactgtgtccggcagatgctgtcagcgcacgcaagctgctggaagcggccgtggatttcgacggtccggcatacatccgtttgggaagatccggcgttccggtgctgtattccgatgagcaggcagagaagattcagattggaaaagcgactcagctgagagagggttccgacgtgaccgttatcgcaaccggcattatggtagccgatgcgatggccgctgcagaaactctggcagaagagggtatctctgcgcgcgttctggatatgcacaccatcaagccaatcgatgcagaggcaattatcaaggcagcacaggaaaccggtgctatcgtaacggcagaggagcattccgttatcggcggcctgggcagtgccgtggcagaagtggtcgtgcagaacgcaccgtgccgaatcgagatggtaggtcagaaggataccttcggcgaatccggaaagccggcagagctgctggagaaatacggcatgaccgcaagcgacattgtagatgcagtaaaaaaagttttgaaatagcaaagattaccgttgacaaatgaaattttgtaaaatggttaataaaataactgatagatttccaatagataacaaaaaaagtattaaaaatttgcatagaatcaaaaaaagcttttaaaagtgtttacaatgtgaagctatggtgatagaatcacagagtaggattagaccatggtctagctatagtctaattacagcctgtgtcccatcgaatttgagatatttttattcaatgggtgtgggaataaccaaggctttgtcaggttcgagacaaaggagcctgatgtaaattattcatcatttatcgttatttctttaggaggtaaaagtaaaatggaaactgcaaaaaaaggtaagccatttgggttttatgtctgcgcactcggtttcacattcgagcgtatggcattctacactgtaaagtatctgctggccatttggattgcgactaacacaacatccggtggtctcggacttgacgatgcgaagggtgcggctatctccgcttctttcgtagcatggacctacatcacaccgattatcggtggatatctcgctgaccacttcatcagcccaagactgtgcgtacagattggtatgctgctgatgggtgttggctacatcatttccggaatggcaacagatctgaagatggtatgggtaatgatcgttctcgttgctgttggtaccggtttcttcaagggaaacctgtccggcgttaacggacttctgttctccgatcaggaagaactggacgaagcattctccattcagtattctttcgttaacatcggttccttcatcggaactactttcatcgccgttctggctaccagcggaaagatgagcttcaccggcgtattcacactatgcggtgcgctgctgatcatcgacctgatttggttcaccgttggtggaaagaaggctctgggcgaagccggcaagactccgttcaagaaggatacccgtgaattcgtatccgaagagaagagagctgcagcagcagctccgctcacaaccggagacaagaagaaggttgttgctgtcatcctgctgaccctgctgtctgcagtattctggatgctgtggtacatggcttacatgccagcatactacagattcggctatggtgatggagatgccttcctgaacaaggcgaactggtacatcggaagcttccagattcctacatcctggttcgactccgtaaacgctctggtttgcatcatcctgggaccggttctggctatggtatggcgtaagctgtcccagagaccgcagggcgacgtgtctatgttcagaaagaccgctctgggctgcatcctgctgggtgtttcttacgtggtaatggtagttgcgaacaacatcgccggtgacaacggtcagtgctccgtaatgtggctggctctggtatgcttgctgatgtccgtaggtgagatggtattctcccctctgggtaactccttcatctccaagttcgctccggctaaactgctgggtctgctgcttggtgtatggccaatcgccgtattcctggctcagcagctgtatccaagactgtatgctttcctgaacaccatggacttcactaagggttacggcggctgcgcagttgtagtaatcgtattcggtgcaatcctgtggggattctccaacaagctggaatcctggggtacttcggaagagtaatctgtactacagaaacaggtttatgatttttaattaagatagaatgatgaattattggaaggtgttacgtgcttgcatgtagcaccttcttttgttgcttgaaaagcaaagaactaaaaaacgggatagttttcaataactatcccgtaaatattcgtgagaacttattttctgttcagcaggtagttccagtcgatgctgtcctgcggattgtcttgcagattggaggtagctgccggaccggaaccgccgaggaatgcccggcctacggtgccggttgcggctttgccgataatgtccagcttcggcgtaagtatcggagccagagatttcaaaatcattttatacgcttcaaaatctgcatcggcagactgcttcttatacttgtccgcttttcccaatgcaaagatttcgctcaagttttcggtgtcagtaatcttcttagcgtattcgtaaatcttatgctgctgttctttggagatttttgcggtctcaaagctgagatagcgcaggctttctttcactccataagcaacaatcattggaaccgtgtccatcgaaatttcctctgtcttatagaaaagactgttgacgagtacgtggtcgtatgccggatactcagccggaagctcactgccttttctgcagctttccccatcaataatgatataatctgcgtctgcgagcatcttcagctccgcagcgacggcattcagggtaacatctccggttcccagaagtgcgagttccatcggatggagttccgctgcttcggtacgtttaaagttgaacatgttgtgacctcactttcgtatagtgataagagttattttgacggtattatgtaattacatttgcaaccgtcaaattcttcgtatatagagtatacccccccccataaaatgtttgcaatagaaagggggaaatcttaatattaagaatactaatatcgaaagcgcacctattgaaaaaaacggaagtctgagatatcatagataagatacttttacaatgggtaagagagttttggaacgagggaaaagggattaacgatgtacaaattagtatcgaaattagtaatctaccgaaatatcgggaaggattccatcctgtttcgcatggcggacatctgccgggatttcgattccggaaattacgagccggctcatttgaccgaccggattttggatgagattcacgatttgatggatgtgagcactgcctacggttttgaccggaatctgtggcagaactatctggcgtacctgattgccatgacggagaatccgttcacgctggtgtcggagaagaacggcagcgtggagggaacggtgaacgacttcgccatgaacgacttcgccattttcaagcagctgttcgattacgactttacggaaatggagcaagccctgggtttgaattgcttccggttggttacgaattacagatcggtgccgaaaaaagagcagttcttcaaccgcaacgtgagcgttcgggtgtgccgactcagcgaggacatcgaccgggcgaaaaccgtggaagagatgtacgatatcgtgatggaattctatcgtcactacggcgtgggaaaattcggaatgaaccgagcctttcgcattgcggtgcaggacggccgaccggagatcgtgccgattaccgccaccggcggtgtggtgctgggcgacctggtgggctatgagcgccagaaaaaacagctgaccgacaacacggaagcgttcctgagcgaacagccggccaacaacgtgcttctgtacggcgatgcgggtaccggcaaatccaccagcatcaaggcactgctgaatcactattatgaccggggacttcggatgattgaagtgtacaagcacgacttcaaatacctgccggaaatcatcagcatcattaagagccgaaattatcgtttcataatttatatggacgacctgtcctttgaaagcgcagagacggaatacaagtacctgaaggcggttattgagggtgacctggaggtccgtccggacaacgtgctgatctacgccacgtccaaccgtcgccacctcattcgggaaagctttgcggaccgacaggagaccgatgccaacgacgtgcacaagaacgataccatggcggagaaactgtcactgtctgcccgcttcggcgtcagcatcgcctactacaagccggcgcatcaagaataccacgacatcgtacgcactttggcggagcgtcagggcgtaaatcttccggaggaagagcttctgctggaggcggatcgctgggcgacgcgccacggcggagaatccggaagagtggcacaacaattcgtggatatgctcgccggtaaaaacaattcggaaagggcataggcaaccgaaatcgctaatgaacggtcggaaaactttgcggccgtgaaaatactttttttatataacaggaggaaaactatggcacaggagagaacttacatcatgctgaagccggattgcgtacagcgcggcctgatgggcagagtgattgctcgaattgaggacaaggggtacaaaatcacccaggcgaagatgatgacgctgagcgaggagattttgcgggagcactacgcacacgtggcggatcagccgttcttcccgggtatgctggaatacatgacatccggtccggttctggcgatgatcgtggaaggtgagaatgcggtaaaaggaatgcggattctcatgggcgcaaccaagttcgaagacggaacggccggcaccattcgcggggattttgcttccagcaccacatataatctgattcatggatcggattccgtggagaatgcggaaatcgaaatcaagcgtttcttcggctaggagacaggaagtatggcgtggacgaggtgaaattgcttctgcaactaatccatttcaaaaaagttttaaaaagttgttgacaagtgcctgcaaggcgagtacaattacatattgtcgtcaccgaaaagcaaccgcttctcggaggcgcagcgtgcaggctccaagcctttcgtggcattggatgcgc

SEQ ID NO: 871 - DNA, 4309 bp, Unknown
  16S sequences of unknown bacteria
tctaccgcattccccgggacgccatcgcttcccggctggaatacatcgctgggaaagagggctttaccgtgacccgggaggcggcggaactcatcgccggcctgtcggatggagccttgcgggatgccatttcactgctggatctctgttcctcttacagccgggagatcacccgggatacggtgctggaggcttccggcaccgtggggacaggccatctctacgacctggcagatgccgcggcggacggggataccgcccgggcgctggcgattgccggggagctgagccgccggtccatggacgagagccggctgtgtgagcagctcatcggtcactaccgggacctgatgctcacccgggccgtccaggacccgaccccgctgctggataccccatcgctggatcttcagcggctgcgggcccagtcggaccgctattccatggagcgcatcctctattccatcgaggtgctgcaggaggcgctgggacggatgtcccggagcgcggagcgccgcaccgaactggaagtgacgctgatcaagctctgcgacccccggctttccacccggacggacgcactgctcagccggattgaaaagctggaatcggcactgcgggcgggcgtgaccctgccgcagacccctgctgccgcccgaccggcagtacaggaggaaccggaacttccggagatcccggatttcccggatgtcatgccggttccggagcagcctgctccgaaggaaaagcccgctgccagagcagaggcgccggctccggaggagcagaaggtgctcaactggcgggaggtgctggaccacctggagaagaaaaatccggcgctggccggcgcactggtgggttcttcggcctatcggcggggcggctatgtactgatcgactgccgggacgactttttcctcaagctcatgcgggaaaacgattatgcccgggagtgcatcaagcaggccttcctggaggtaaacggcacccgatgcagcattggtccctaccgtcggcctgtccaggagaagaaggaagaggacccgctggcaactttcatcgaaactcttgaccttccacaggaaagggttcaaatagactaatttcgcaacgatatttttttggaggaatcaaacatgaaagcaagaatcccgaagaatcttggcggtatgcccaataatatgcagagcatgatccagcaggctcagaagatgcaggaagacatcaccaagaagcaggctgagatcgatgagatggagttcaccgcatcggttggcggcggcgctgtggaagtggttatgagcggtaagaaggagctcaaggccatcaccatcaagcctgaggtagtagatcccgaggatgtggagatgctgcaggatctggtaatcagcgctgtgaacgaggctctgcgcaatgtagaagccaagactgctgaggaaatggacaaggttaccggcggtctgaacattcctggcctggtataaggggagctgcggatggcatatcaggtagcgccgcttcagaagctgatcgagcattttgaacgcctgccgggtatcggacgcaaatccgcccagcggctggcgtttcatgtactcaatatgcccaaggagcgtgcggaagactttgcccgctgtattctggaagcccgggagaagatccacaagtgtgcggtctgccagaacctgactgatgaggaactgtgtcccatctgccgggacgagagccgggatcataccaccatctgtgtggtggaaaactcccaggatgtgctggcatttgaacgcacccgggaatataaaggggtctatcatgtgctgggcggactgatttctcccatggatgggatcggaccggatcagctggctctgaaggaactgctgcgccgtgtggcagaaggggaagtgcgggaagtgatcatggcaaccaatcccactgtggagggagaggctactgccatgtacatagcccggctgctcaagcccatgggaatcaaggtaagccgtctggcttatggaatcccggtgggcggcaatctggaatacgcagatgaaaccacactgttccgtgccctgcagggacgcagtgagatctgaggctttataagctgctgcggcagcggaaaaccggacagtacctgaggactggtccggttttttcatggataaaacagaggtgtgattgaatggaacagcttcgcagtctgatcaaaaaactgctccagttccggtttgtccggttctgtattaccggcggactcaatacgctggtggattttattgtctttttcctgcttaccggttcgctgaactggccggtgatcccttcccaggtcatcagttacagtgccgggattctcaacagctactgtatcaaccgccgctggaccttccagacccggaaccggttcttcggacgggaaatgctgtggttcatcggagtaaatctctgtgtgctgggagtcagcgtgctgtccatgtgggtgctcaccacgcagatgggcttcgggacgatcctcagcaagctctgcaccactgccctgaccatggtgctgggatttatactcaaccggctgctggttttccgcagccgcgtatagcttcaaaaaacagacggcccgaatccagagccgtctgttttattatataattgtgtgtccacttgttaaattataaataatacttgattttccagaatctgaggaatataatgacagtaacaataattgttactgtttcaaagaggatgtacaatggaactcaagggatcgcggaccgaacagaatctgctcaatgctttcagcggggaatcgatggcacggaacaagtgtctgttttttgcagagaaggccaagcaggagaaccatccggaagtagccgagctgtttgaaaagatggcacagaatgagggaatgcatggcaagctgctctatcactacctgaagggtgtaggcggcacagctgagaacctgcgggaagccgtagacggcgaatatggcgagtggagccggatgtatccggagtttgcccggattgcccgggaagagggttttgaagccattggcaagctgtttgatgagatcaccaagatcgagcgcgaccatgagggacgcttcctgatggcactggcaaagctgcacaatccgtctatggatacttccaagccggaagctgcgcccaagaactccggcggcaagcacatggtgactgtatcgggttaccgctgcatgttctgcggcgccacttatgagcatcgtccggatgtctgcccggtatgtcaggcaatcggatcgtttgagtccactaccatccagaaggaaatggaggactgagttccatcaggactgtgtgcgacaggaaccggcattgacgaatctgaaatttgtggtatactgataaggtatcagcaaaaatcacagaggaggcaggagcatggcggaaaaggcatcattcaaaaccatcagtgaaaaccgccaggtgcgccatgagtactttgtggaagagacctatgaggcggggattgagctgtatggtaccgaggtgaagagcctgcgggccggaaccgtcaatatgaaggacagctggtgcagcattgaagatggagagattttcatcaagcagctgcatatcagtccctatgaacatggcaacatcttcaaccgggacccgcttcgggtacggcgtctgctgatgcacaagtctgagatccatcgtctgttgggtctgctcaaacgggacggctataccctgattccgctctccctgtatttcaagggatcgcgggtcaaggtaaaggtgggcctgtgtaagggtaagaaactttacgataagcgggcagatgcagccaaacgggatgctcagcgcaccatcgaccgtgcgatgaaacagcgtacacggtcctgatttacctgggggcgtaaaggcttcgacggggatgcagaagtgcgggcagcgagtaggaggcgggactccttcatcaccccgaaattaaaattaaacgctaacgataatagagtagcacttgctgcgtaactaaacgcagccgtctgaccggataggaccacgggtccggatcgggcgtcgattagtggtgaacgccttcagctttttccttggggctgctggtgtatcagaggataccgtagcgcatagcctgtttgccggcggtgcgtgaggggaatcctaaaagacaaactgcactcggagatacctgcgtggaagtgttttcggacgggggttcaattccccccgcctccaccaccagactgagtctggacgcaattcgcgttccaggctctttcttttta

SEQ ID NO: 872 - DNA, 3468 bp, Unknown
  16S sequences of unknown bacteria
ccttcggcggttgtatccactggatacccgcttcccttcgttcccctttggaaactttcgggcaccgaagctgacgagaaccccatgagacggcaagtcccactccgcgtcggagtcggcgcatcaaaccccgccgatgggcttccttacggccaaggcggcacatactgttgcttacagtgggctcccctcggggcaaacaatcggcgcaggccgtactgacgtgcgctccgcttgttgtttgcctgaactattgggggatcccccctgccccattcccgcgccaatcaacacactttcttcccccttcccccaaaaaatacaatgattacgccgtgttcctttttcccttttgggataacctaccattgccccgccaccgccttttcacaccgggagaccctcccctccgctgccccgcccccctttgctttttttgttgcctgtggtatagtatgcgggacgactcccgtaccgtccgcctgcggcccgcgtgccggagcgtcgataagcctatcgaaattgtttcaggaggacctcttcgaatgaaagaaatcctgttgaccctcgttaccgccgtcgccgcctacctgctggggtgtatctccacaggcaccatcgtgtcccgccgggagggcgtgaatatccgcaatgagggcagccataataccggggccagcaacgtgctgcgggtactgggcctgaaggacggcctcattacctttctgggcgacttcgccaaagctgccctcgcctgcctgatcggcaacctgctggtgccgtccgccttcggcatcgagggccttggacggatcgtggcggcgctgttcgtggtcatcggccataactggcccgtgttctatcattttcagggcggcaagggcgtggcctgctccacggcggtggtgctgctgatccaccctctgtgcggcctgccctccatcctgctgtgcgtgctggtcattgctgtgaccaagtacatcagccttggtagcatgaccatgctgctgacctatatggtgctgatctggatcgtgtgcttcggccagtgggcgctgtgcatcttcgccacgcttttgttcatcatgtgcgtataccgtcaccgggccaatatccagcggctgctgaatggcacggaaaacaagatcggccgccgcgtccagccccagaacactgaaaaaaaataaaattcggcttatctattgacaaaatccgccggtcatgctattctgccagacgacaactgaatgcgtgtcctttaaccacggtcccgtgaggccgggaaggctgcaaaagatatgccagtgaatggtcgaaatgtgtgtatctgccttgccctgccgtgggcaaggcagtttttcattttctaccaaaggcgcgcagggttgatctttccgactggaggagaacgaaccgatgaaactcgtgtacgacgtcaaccagaggccgcccctgaaaaagaaccttgtgtatgccttccagcagctgctggccatcatggccgccaccctgctggtgccgatcctggccgacgccaccggcctgtacctgaaccagcccgccgcgctgttcggcgccggcgtgggcaccctgttctacattctggtggctacccgccgcaagagccccgtgtttctgggcagctccttcgccttcatcagcccgctggcaagcgccgtggcgtatggcttcggcggcatccttctgggctccgtgttcgccggtctggtgtatgtgctgatcgctctcatcattaagaagaccggctccgcatgggtcaacaagctgctgccccccgtggtcatcggccccaccgtggccctgatcggtttgagcctgtgcggcagcgccgtgaacaacctgaacaacaccgccgccggcagctacaatctggtttccattctggtgggtctggtggccttcttcatcaccgtgtacgcctccgtgaagggccccaagagcatgaagatggtccccttcatcattggtattctgggcgcttacgtcatcgcgctggtgatgaccctgatcggcaacgccaccggctgcgaagccctgcagctggttcacctgtccgccttcgacaacatgcagctgttcaagctcccccggttcaccttcctgggtatgttcggcgtgtacaaggacgctcccaacaccatcaccagctgggctgacgtgctgagcctgttcctgctgttcgcccccgtggccttcgtaacgctggccgagcacatcgccgaccacaagaacgtgtccagcatcatcaaccgcgacctcatcaccgaccccggccttgaccgcaccctgatcggcgacggcgtaggctccatcgtgggcgccttcttcggcggctgccccaacaccacctacggcgaatccgtgggctgtattgccatcacgggcaacgcctccgtcagcactatcgcgctggccggtgtgtactgcatcctgctgagcttcttcgaccccttcgtctgcttcgtcaactccatcccctcctgcatcgtgggcggcgtgtgcatcgcgctgtacggcttcatcgcggtcagcggtctgaagatgctgcagcctgtggatctgggcgacaaccggaacctgttcgtggtcgctgccattctggtgtgcggcatcggcggcctgacgctgaacttcggttccgtgcagatcagctccatcgccaccggcctgatcgtgggcatcctggtgaacgtgatcttcaacaagcgctccgccgaggaaaagggcgaagccaaggccgaataagaaaagccttgacgcaactgcaactttggggtatgtttctgacaaaggaacataccccttttccaaaccgaaaaggcttctgtttaggaggactacgccatgtcagagcagcagctcaaagccaaattgatggacgcgcccgccatgcagcgggccctgagccggatggctcacgaaattctggagcagctcgatcccccggaaaacatcgtgctggtgggcatcaagcgccggggcgtgccgctggcccagcggctggccgcgctgatcgagcgtttcgagggtgtacgggtgcccgtgggcgagctggatatcaccctctaccgggacgacctgactaccctatacgaccagccccagttgaagggcgcctccctgccagtcgatatcaacggtaagcttgtggtgctggtggacgacgtgatctacacgggccgcacggttcgggctgcgctggacgcgctggtggatcagggccgcccggctcgcatctgtttggcggagctggtggatcgcggccaccgggagctgcccatccgcgcggacttcgtcggcaagaacgtccccaccgcccacagcgagcgcatcgccgtccgagtcaccgagatcgacggcgaagacagcgtcgccctctacaggtaaggggtagtgatccgcaacctcaatcgtcgtctttggcactgccgtgccaaatcctcgttt

SEQ ID NO: 873 - DNA, 5117 bp, Unknown
  16S sequences of unknown bacteria
cctgtatacgatatcggactctcggccacctcctccggcgtcccctgtgcaatcaccgtaccgccacgatcgccgccctccgggccgatatcaatgatataatctgctgtcttgatgacatccaaattgtgttcgatgacgataaccgtgtttccgctctccgcaagccggtgcaggatctcgatcagcttatgcacatctgcaaagtgcagtccggttgtcggctcatccagaatatagaccgtctttccggtactgcggcggctcagctctgtcgccagcttaacccgctgtgcctcgccgccggagagctccgtcgacggctgtcccagccggatataggacaatccgacatcattcaatgtctcgatcttccggtaaattgacgggatatgcttaaagaattccatcgcttcctctacggtcatattcaatacatcgtaaatggactttcctttgtattttacttccagcgtctccctattgtaccgtttacccttgcagacctcgcacggcacatagacatccggaagaaaatgcatctcgatcttcaggattccatcgccggagcatgcctcacaccgtccgccttttacattaaagctgaaacggcccttcttgtaaccacgcgcctttgcatccgcagtcgccgcaaacagatcacggatctgatcgaacacaccggtgtaggtcgccggattcgaacgcggcgtccgtccaatcggtgactggtctatgttaatgaccttatccaactgctccagaccgcgaatctccgtgtgcctgcccggaatgacacgcgcacggttcagatcccgcgccagacgcttgtagagaatctcattgacaagcgaactcttcccagagccggaaacaccggtcacacaggtcagcactccaagcggaaactttacgttgatttttttcagattgttctcctgcgcaccacgcacctcaatccagccgttcggtgcccgccgtacctttggcaccgggatccggatccgtccgctcaagtaggcaccggtgatggattcctcacagttcatcagatcctccaccgtaccggttgccacgatatgaccaccgtgctcaccggctcccggtccgacatccacgataaagtccgccgcacgcattgtatcctcgtcatgttcaacgacaatcagcgtgttgccgagatcccgcagactgttcaacgtactgagcagcttgtcattatcccgttgatgcagtccgatgctcggctcatccaaaatgtacgccacaccgaccagacccgatccaatctgcgtcgccagacgaatccgctgcgcctctccgccggataaggtgccggttgcacgtgcaaggctcaaatattccagtccgacattgacaagaaaacgaagtcgggcacggatctcctttaaaatctgatgtccaatcagctcctgttgctgcgtgagcacgagctgctccataaactgctgcagctctccgattgacatcgccgtgatctccgcgatatttttatctgctaccgtgactgccagtgcagactttttcagacgctgcccgccacaggccttacacggtgtgatccgcataaagctctcgtattcctgcttcattgtgtccgagccggtctcccggtaacgccgctccacatttttgatcagcccctcaaaagcaacgtcataaataccttcgccgcgctgccccttgtaatacaccttcacttcccggccgtttgtgccgtgaatcagcatatcctgaacatcctgcggcagctcctgaaacggagtcgcaaggtcaaactgatactcctttgccagtgcatccagaatcgcacgggtaaagctgcccttgtccgtacaggactgccatcctgtcacaacgatcgcaccattctgaatactcagggagcgatccggtatcatcagatcaacgtcaaactccattttatagccgaggccatagcagtccgggcaggctccgaacggattgttgaacgaaaagctgcgcggctcgatctcctcaatactgatcccgcagtccgggcaggaaaagctctggctgaagctgagcatgctcccgtcggctgcctcccctccgtttacctcgacaagcgcaagaccattggcgagatgcagtacattttccattgagtctgtcagccgctgctcaatccccggcttcacgatcagacggtctacgacaatctcaatattgtgcttgatatttttttccagcttgatatcttcagaaagctcatacatgcttccgtcaatccgcacccggacgtagccgctgcgcttcgcctgctcaagcagctttgcatgctcacccttgcgtccccgcacgacgggcgcgagcagctgaatcctgctgcgctccggaagcgccatgacctgatccaccatctgatcaacgctctgctttgcgatgacctttccgcacttcggacagtgcggcgtcccgatccgtgcatagagcagacggaaatagtcataaatctccgtcactgtgccgaccgtagaacgtggattgcggttcgtcgacttctggtcgatggaaatcgcaggcggaagtccttcaatactctccacgtccggcttttccatctgaccaaggaactgccgtgcatatgaggagagtgactccatataccgcctctgcccctctgcgtaaatcgtatcaaacgcaagcgaagacttgcccgagcccgacagaccggtgaacaccacaaacttattccgcggaatatccaggctgacatttttcagattgtgctcatttgccccacgaatccggatgtactgctttttatcgatccccggcgcttcctcctgaagtccttccgtaaatgtctctatactcatagtttatattttctcctcatcttctaccatatcagcaaaaatggcaattctatagctccgatagcagcggccttaatccatctcctgtaaatatttcttcagcgaaatcattcggtcacgcagcgtggctgccgcctcgaaattcagctcggccgccgccttcttcatctgcttgtgcacctctccaatcagcttctccagctcctcccggctcattgattccggatccttttcgagctccttctcttccttcgcgacttccttggaaatgctgatcagatcccggactgcctttttgatcgtctgcggagtaatgccgtgctcctcattgtacgcctgctgcagctcccggcggcgcattgtctcctccattgcgccgcgcatggaatccgtgatcacgtctgcgtacatgatgacatgtccctgcgcatttcgtgcggcacggccaatcgtctgaatcagcgatacctcagaacgcaggaatccttccttgtctgcatccagaatcgccacgagtgatatctccggaatatccagtccctcccggagcagattgatgccgaccagcacatcaaatacatctaggcgcatatcgcggatgatctccgtgcgctccagcgtatcaatgtccgaatgcagataccgcacccggattccgacctctttcatgtagtcggtcaggtcttctgccatccgcttcgtcagcgtcgtcacgagtaccttattcccggcagccgtctccttattgatctctccgatcagatcgtcaatctgtccctccaccggacgcacctcgacctccggatccagcagcccggtcggacggatgatctgcgacgcccgcagcagctcgtgctccgcctcgtagtctccgggcgtcgcagatacaaagagcacctgatccagcttgctctcaaattcatcaaaattcagcggacggttgtcctttgcggacggcaggcgaaaaccatagtcgaccaacgtcgtcttccgcgactggtctccgacgtacattgtccgcacctgcggcaccgtcttgtgcgactcatcgataatcagaagatagtcatccccgaaataatccatcagtgtatgcggtgtcgccccggcaggcatcccggccagatgtcgggaatagttctcaacgccggaacaaaagccggtctctcggagcatttccacgtcatagttcgtccgctcggcgatccgctgcgcctccagcagcttgtcctcactcttaaaatattctacgcgctcggccagctcctcctcaatcgcattcgctgcccgcagaattttatccatcggaacaacataatgggacgccgggaaaacagcgataaattccagtcccttccgaatctcaccggtcagcgtgtcgatttcggtaatccggtcgatctcatctccgaaaaattctacccgatacgcatactcatccgcatttgccggaaaaatctccagcacatcgccccggacacgaaacgtaccgcggtgaaaatccatatcgttcctgtcatactggatatcgatcagcttatggatgatctcgtcccggtcgcgctcctgcccctggcggagatacagcaccatatccttatagtctgccgggctgcccaatccgtaaatgcaggaaacgctcgccacaataatgacatccttccgttcgaccagtgaggccgtcgccgataaacgcagcttatcgatctcatcattgatcgcagaatccttcgcaatgtacgtatccgaggatggtacatacgcctccggctgataataatcatagtaggagacaaaatattccactgcattttccggaaagaattccttcatctcaccgtacagctgtgccgccagcgtcttattgtgtgccagcacaagcgtcggcttattcagcttctcgatcacatttgccatcgtaaaggtcttgccggaaccagtcacccccaacagcgtctcgaactgatttccttcctgaaatccctccaccagcttcttgatcgcctgcggctgatctccggtgggccggaactctgaatgtaatttaaaatgatccataatgcgctctcccgaccgactaaaagcgatctgcagcaagtgcaaaccgcaatcatattcttagtatggttactggtttagtataccattcaggcaaaaaaaagtacagagcaaactcaaacatttgttctgcactttaggatactttatgttattgtccgctcctcctgcttaaagacttaaatgaaaaactga

SEQ ID NO: 874 - DNA, 2469 bp, Unknown
  16S sequences of unknown bacteria
ggtactttgtttttgtcgttattaacatcataccatatttgagatgaattttctttttattttgttacctatctattgtaccataacattttttgattattttttaattataaaatacaatcagccaccgtaggaggaggttatgccaaaatattcctcaagcgttaagccgctgtcaaatatttttttggcgctttcgactccgacatatctgtaatgccacggctcgtacatatatccggtaatagactccttaccctcggggtagcgcagaataaatccgtacttataagcgttggcggcaagccattttgcttctgctgtgtttttgaatcggtagtcggcataattgatatcaaacgcaagacctgtctgatgctcggaatatccggggcgggcggaatatctgtccgccgcctttgcaccgtcgcgccttacatagctgttataaaggcttttctgaacggtgtagcttctaaagcccgagcagacccacattttaaggttttgctccgcctttgcggcggcaaacatcttatcgagtgcggctttagcctcggggtttacaccggggttgtaattctgcggcaggggataggtcttgttgactatgagtattccgtccatatatgtcatttcgacctttacgggctcattaacggtcactttaaattctgcttttatatcgggattatcggccgaggtgacggtaacgacgcagcttcccgcgcttttggcggttatatttccgtaattgttgactgtagcaaccgcggtattgcttgattcccatttttccgccttgtttgaggcgttgacgggggacatggttacgataggcataaatctgtcgcccacagtaagcgttctttcatatgcactgagcttgattccgtctacatggacgatttcgggctttggaggctctgaagactctgcagattccgtctgctccgacgaagcttcggaagcagcgcccgcagcagttagggaatcgcttgaagtatcactcactgtgctctgaacgggcactgaggactgggatattctgtcggtttctttatttgctcggcacgcggcaagagccgaaatcactaacaaagccgcgaataaagctgaaagccttttcatgtaaatcaccctattataataatagcatacctatatttattttacaataaataattgcaaaaaaaacgaaatgcgcgcgaaatgtcgaaaaaagggtgcgagctgcagcagagcctgccggaatcgggtgtaaattttaaatttgtcgtaatcggtattaacagtggattgtcggtaataatatttccggtgatcagatgataataacaattacgcgcacaattattctttatattttcgtgaccctgggaataaggctcatgggaaagcggcagataggggagatgcagccgaacgagcttgttgtcactctgcttatttccgaaacagccgccattccgcttcaggacaccactcaacctatcttaaacggcttggttgccatttttgtgcttgtgatactggaaatcatgatttcagttttgtctatgaagagcagatttatgcgcaagataatgaacggaaaatccgcagtcataattaaaaacggtgtcatagatcagcagatgatgaaaagtgtcagaatgacggtgcttgaccttgtggagctgctgcgcggtcaggatgttttcgatatatccacagtggcgtttgcggtgcttgaggtcaacggcaatttaagcgtactgctgaaatccgccgaacagcccgccacggtcgccgatttgaagatagaaaagaaaaaggcgctgctgcagctgccggttataagcgatggaaaaatagttaaggaatctcttgactttgtaggggccgatgaaaaggatatccgcaaaaagcttaaaggggataatgttgcggatgtcttccttatgacgatggacagggaaggcaatcacaatattataaagcggagggaaaagagatgaaacgattgatacccgccgcaatactcttggctgtggtgcttatttcctatttcggaagccttaaatatattaacgacagctgtgccgaagccgaccgattggcagataaatgcgaagccgaatacagaagcggaagaaacgccgaggaggagatagaaagacttaaaaagctttgggatgaaaaggagaaaatgctttcattttttgtgaatcatgccgatattgataatatcgaactggagctttcatctcttactgtattcgcttcggaaaaggaggacgcaatgttttacgaccatattgaaagcatgagaaccatgctgcaccaaataaaggaggatacggtactgagtacgcacagtgtattttaatgcctgccgagcaattcaaaagtacctcagcctagcatgttggtgtaaacttttgaattgttcaggtgcaaggtttttgcgcaattttgcgaaaaacc

SEQ ID NO: 875 - DNA, 10610 bp, Unknown
  16S sequences of unknown bacteria
tggcagtccccagcgccagcagcatctcgctcagcgtgaacccctcagtagctgaggatcgcatcgaccacataagcgtccatcctctgcatcaggcctgccgccagcaggatcagctgcgcgagcatcatgcagagcatcagaagcaccagcgcgtcggccatgaagaagccttcctgtctatcggacatcgctgcgcccgctccccagctgaaagaccagcgtcctgccctcgcccgtgccaaagcgcacgctcatcgccggggaagcgctgagctgcggatagaagcgtatcgtatgcggcgtgcatgacataccttctggcaggtgcagccgcatggtatcggaagagacgagatcgccttgaaaccgcacgctgacctggctgccttctgccgctgcttcgcattgggcatattccgccagcgcgcggacgctctccatccggatggcgctgccatgatcgcgcagcgatgcaggcagggcaaacacgcccatcaggatggaagcgatgcccagcacgaacagcatttccaaaagcgtgaatccttcttcactgcgcataagcctgtccgcctcggatgacgatgctccggccgtccgggcagcgtttctgtgattctttcagatatcctttggagatgagctggtccactgaagtcggcgtctgcagcgtatcgatctcgtacagcaggatctgcgcgtcgacgaccgaggtcagcgcctcacagcctttttcctcgatgatcgcctctttctgctggatgttgggcaaggtcagcaggaagagcagcgcaacgatggaaagcacgatcatcatctccaggatcgtgaatcctgactgatgtctcattcggtccatttttttctcctttacatctgattcagcatttcgagcggggtcagcagcagctgatagacgctgaataccagcaggccgatcaccgcgtagacaaacagctggatgagcgcgccgaagcggtcggcctgcttctgccagagcgtgatctcccgctgcagatagagcggcagcagcgaatcgagcgaatcgctttgatagcccagggaaaagcagcggcagaaccgcggcgaaaaataatcggaggtcaggatgatctcctcataggaaaacccctcttccagcagccgcttcatctcgctgacgcagggatagagcacgcttcctttctccagcgtcagcagcatgcccagcgcgtcgacggtcgcgatgccctgccggctgagctcgcgaaggaaagcggcaaacagataagagatcatgctgcgcaagagcggcagggggcgcaagcgcatcagaacgagcatgcgaagctccgtatttctcttcagcagcagcgcgaggatgaagagagcgagcagcgcaagcaggatgagcatgaacgacgcctgcagcacgctgagcacgaggagcgcgccggctgctgatgcgccatcgacgatctgctgcatctgcggcaggatgaaatgcagaaaaaacaggatcagcacaaaggcgatgaagaacaatacggccggatacgtcaggtgattgcgcagctgacggatcagcgaacggcggatctcacagaggttgtctgccatctcgatggcttgcggcagcgggcaaaggccgctgaaaaagcgcagatactgatagaacatccccttttgcggcaggatgtccagcagctgagcgccatcctgcagatgcgcgagcagcgtctccggagaagaaaacgcgatcgggatggcatcctgcagcgcaatgcctttgttcatcagcatcgccagcgcccgccagtcttcactgtccgatctcttcttccaaaacgccgcaagcgatgcgtcctctttcccaggcgcttttgatctcctcttcgatggagaggtgtcccgcaggaagcctctcttcttccatgaagcggcgaagcgcttcgccatgaaggacctcataaatgcactcctttccgtttcgctcagcgttcagcagcagacgctgtgtgctgacaaaggtcactgtctgccgaagatcatgcatcggcacgccgaattcacgcatgcgggcgaagacctctgcgcacgacttggcatgcacggtggtgaacaccatatgcccgctcagcgcggcacgcacgatcatgtgcgccgtctctacgctcctcacctccgcgatcatgatgatatccgggtcgtgacgcagcagttcgcgtatgcccacttcatacgtaaatccgctcttctcattgacctgcagctgcacatagctgctgtcggtgatctcgatgggatcctccagggtgatcacctgcagatgattgaacggcgccgcctcatgcatcagcgcatgcagggtcgtcgatttcccgctcccggtcggtccgctgagcaaggccaggccatggcgctgatggcacagcgcatggaacagcgcacgcttgtccgcatcattgcagatctcttcgatccgggtcagatcctgcaggttcaacaggcgcagcacgccggtctgcagctgctgcgtgcccaggcaggcaaagcgaaactgcagcaggcggtcctgatactgcctggtgaagctgccggactgcggtgtgctcatcgccccgagatccagatgagagatgtacttgagataatgcagaagcctgccatcaaacatcccgctgtcatcgtcgatcatccgctccggacagcgaaggcgtaaggtcagccgtccgaagcgaagcgtaagatgcgcatctgtggcatggcgtgccaccatcagatggatcagcgagcgaagctctgattccatcctcatcacctcctgcacttccctcatacgcctcgctctctccatcccctaggaaacgaagaaacaacagaaaaaaagccatcgcgtgatgatcacgtgatgactgagagccgcatcagcttctgttttcttcttgtcttcgcttatccgcgatatagcgcaggtccccctccacatcttgccggtatcgctgataatggcggtcaaaggggttgtggtcatggaagacggccgtgcccagggcgatcacgctgacgagatgtccggccgctctccagaagaagtcctgatgatccatcatgcggatctgatcatcccagccgaccttgcgcagctgctcggtgcgcaccaggatgatgttcggcacctttcccatgacgaaatgattcccatcgatctgcgtcatatgcggaatgcgcagcggcatcggcgcgccgcgcatactgaaggaagtgaaccggctgacatcctgatcgggatccttgcaccggatcgtgttcagcacgcagaatccgaccaggtccacctcactgtggcgctgcaggaaacgcagctgctccgtaagcttcgtccggcgggtcagcagctcatcatcgtccatgcgcagcacatatggcgtctccaccctctccagggccttgttcaggccatagctgaggccgctgttgaacggcagctggatcacggtcagcggatcatcctgcaggcgcataggctcagcgctgtcatccgcgatgatcacccggatgccgggataaaacgtctgcaggttctcatacagccgcttcgccatcttctgacgctcgaacgacttgtagatgacggtcacgttctggcagaccagatcgatctcctcctcatcggggagcgcttcgcctgccttcttccatttgtgatcgaaccagcgatgctccaatgccgcgaccgcatcaaagagcctggcggcgatcggcgacagcgggcccttgatcagcttcttcacccattctggcatatgtctttgcttacaccgtcaacagatagtaattgctgttgagctcttccttcagggtcgtgcgcggcccatgaccgggatagaatatcagttccggatccatccccttgatcatgcgcagcgtctgcaccatctgtgagttgctgccgccgatgagatccgtgcggccgacgctgccttgaaacagcacgtctccgcagaacacggcatgatccttcatgagcagcaggcagcttccctcgctgtgtcccggcgcatcgatcatctcgatctcaaaatgaccgatctgctgtttcccctgcttcagcatctgcggcttgctcttgaccacgagcggtgcaaagtccgcgctgaagttgagatgcggatccttgagcatcggcgcatccagcggatggatatacagcggacaatggtaagtctccacgaaagcatccgccccggcgcaatggtcgaaatgcccatgcgtcagcaagaccgcatccacgatcaggcccatctcttcgatgcgcttgtggacgctcctcccttttgaaccgggatcgatgacgagcgcatggccgtcctcgctcaccagataacagttggcctcgatcatcaggcccaatgtaaaagcttcgatcttcagcatatttatcctcctgaataaaaaagaccgtagtcggcctttcttattttttctccttgtgatcagtcttcttgttgcagcgcgggcagtatttggaaatggtcatccgttctgggtgcttgcgtttgttacgtgttccgatgtaattttcctcaccacagacagcacatttaaacgtaattctgtctctcatgatatacctcctatcactctatgccgataaattataacatatcaaaaacgcttttgtcatcatttttttaatcatccggatacaattcaaaatatttttccaggaccggccccatcacctcggtcgtgcagacattggcctgcaggttgttgccggtgtcagaagaggtcggcgcgatgcaggcaaacgacatcttcggctcctcatacggcgcatagccgatgaacgccgtactggtcgaatcgccgacttcggcggtaccggtcttgccggctacgccctcatcgcgggagtatgccgcgctgccgcagttgccagacgtgacacaggccctgaatccctgctggacacgttcaagatacgtcaggtcgccgctgatcgtggagacctgctcgttgctgtaggaatagacgacattcgtcgagttgacctcggtcgcataactgaatagatgcggacgcatcacttttccatcattggcgatcgtggaaacgtattgcaggatctggatcggcgtatacatatcatactgaccgatggcaaagtcgagcagcttaccagcttcggtcgagaagccgacatatccgccgacttccccaggcacatccagacccgtcacattgcccaggccgaacatcgaataatacgagcgcatcagctcaaaggtcggcgccggatccgtgatgcctaaagactgatacggcacatattccgaaccagccagccggatcgcgatattgaacatgtagacgttactggacacttccagagattcgatatcattgatcgggccatagtttcgataagacgccttgaccggtgtgccggcgatgtacatcggcgcatcgttgatcacttcgcccggctcgaccacgccctcattgagtcccatgtacagcgtggtgcccttgacgatcgatcccggattggtatagctcaggtaattgccgctcgcaaacggggtcacttcctcgctttctgtgtcgcgctgatatccgctcatcgccagcacttcgccagtgttgggatccatgatgcacacatagaggttggtaaagtctccgcggtatggattatccgcggcgttctccagcgtctcctttaccacccggtcaagctcttgctgcagttcgatatcgatggtcagatagatatcatatcccttcttgccgggctcctgatcctggatgacggcattgccgtcttcatcgtactcgatgctggatactttccgggtgccgctgagcaggccctcatactggtattcgaggccgctgctgccgacacgcgcattcagcggatagcccagcgcctgataataatcgctgagctcggatggcacgccctgtgtgctggtcgtgacggtgcccagcacatcgcgcagcgtatccccgtacggatattcccgcttccatgagcccagatcgacgtcaaagccagggaaagctcccttatgctcgaccaggtaggcgaccttttcatcgtccacatcctccagcacggtcttgctttgctgcagcgttccgctgaccatgcgggaataaatgacataaccggccttttcctcatcgctgagcacatcgagcatatcgctcgtgatgcgctcatgcagcaattgcgtacggcgcgattccgcttcatcgccccatgcgccgctgttgtactgctgcagttcctcctcgctgagcagatcgttgcactgataagaaggatcgtcggcgtccaacagcgaggtcaggaagatatagagatccttacgctgcgacatcgtcagctcatccggatcgacatcgaaggtcgacgcgaactgcttggccagatcccacttctcctgcgtcgtgatcgactcaggctgcgtatagatgatgttgtgggagacgaccgtcttggcgatcactttgccattgcggtcatagatctctccccgcggcgtagaggaagactgggtcaccgtgttgtagctctctgtcttcgcggtatattcttcatggctgagcacctgaatctgaaacaggcgcagaaagacggcgccgaacagcacgcagatcacgacggcaaacaccatcagccgcttagacacgacactggcgaaatccatcgtgtgactgagctggtcgctggagcgtctcatcttgtccagatcaaattttcgaaacggatttggaatcatctcaccaccacctgctccccattataccgcatggaccgccggctttccataccggcatctgactttttttctgtttcagctgctgttcacattggccaaaacacatccgcttttggacgcgaacggccaaaaagcaagacgatgcggcagattttcatgacttggtgagccttgcgcccatgaatggggtataatgagtaaggaagacaggtgaagatcatgaaacgagaacagactagagcggtccgcgtaggcgggctgcagatcggcggacaggagcgggtcgtcatccagtccatgtgcaatacgccgaccaaagacgcagaggcgaccatcgcgcagatccagcgcctgcaggaagctggctgcgaattggtgcgcatgtccgtcatggacatggcagacgcccaggcattggcccgcatcaaggccgctgtcagcgtgccgctggtggcagatatccatttcgattaccggctggcgctggctgcgctggaatccggcgtcgataagattcgcatcaaccccggcaacatcgggcgcagggagaacgtagaggcggtcgtagaggcttgccgcagccggcatgtccccatccgcatcggtatcaacggcgggtcgctggaaaaggacattcatgaaaaatacggacggccgacggcagagggcatgatggagagcgcacgccgtcatgtcgacatcctcgaatcgctggatttccacgacatcgtgctctccttcaaatccagcgatccgctgctgtgcatagaggcataccgcatggccgcggagcgttttccttacccgctgcatctgggcgtgaccgaagcgggaacattgatgggcagcgcggtcaagagctccatggcgctgggcaccctgctcaatgaaggcatcggagacaccatccgcatcagcgtcaacggcgatccctgcgatgagatcatgatcgccagacagctgctcagctgctgcaagctcatcgaccatgtccctaatctgatcgcctgcccgacctgcggcaggaccgcatgggacatgcagccgatcgtcagtgagatcgagcgcttcctgaccaccgtgaacaaggacatcaccgtggccatcatgggctgtgtcgtcaatggcccaggcgaagccagacacgccgacatcgccattgccggcggaaagaaagaagggctgctcatccgcaagggagagatcatcgaaaagatcccgcaggatcagatcgcgcagcgcctcaagcaggagatcatggagtttcaaccggaaaaatgagacatgcaaaaaaagagatttcgacaatggccgatgaagccatcgttgaaatctcttttccttattcgctttcgttcagcgcactgacatcctcggcgcttgcctcacgcaccgtgatcgtctcgatgacgacatcttccaacggcttgtcattctcatcgacccgcaccgatgcgatgtagttgaccacgtccatgccgtcgaccacctgtccgaagaccgtatgcacattatccagccatggcgttccgccgacttcctgatacttcgcgatcacgttatccgcgtaatcggtggaatactggctcatgttctccggcgtgtactggctgccgtcctgctgctggacgatgaagaactgagaaccgttggtatccgcgccggaattggccatggacagcgcgccgttgaagttatacagctgatcgctgaactcatcttcgaacgcatcgccccagatgctctctccgccggttccatcgccattggggtctccgccctggatcatgaacccgttgatcacgcggtggaagatcagaccatcataatacccttcttcagcgtgcgtggtgaaattctcgactgcctttggcgcctgttccgggaacagcttcaccgtgacatcgcccagggatgtctcgatgaccgccagcgtatcgccttcagcgatcggttcatcctgcagcagcacaggctcctgcggcgcagagctgcagccggcgatcaacaaggccgcggtgaataaagctaacaatttcttcatgttcaattcctcctgatctgatccatcagcgatggatcgaatgtgttttgtctcagcatcgcgatttcttccccataaggcgcatggccttcgacatacggggtttccaggatcttgacgatatcggtcagcgccggatgatgcacgaatgcgctgagcgcatcaaagccgatctcaccgaatccgatattggcatggcggtccttgcgcgcgccgcgcacattgcgcgaatcattcacatggacggccgcgatgcgctgaatgccgatgacgcggtcaaactctgccagcagcccatcgagatcctggacatcatatccggcgtcgtgcatatggcaggtgtccatgcagacgccgagtcgttctccatagcgggcatgatcgatgatccagcgcagctgttcgaatttccagccaagctcgctgcccttgccggccatcgtctccagcgcgatggtgagctgttcacccattccttccatcgccagatccagcccttccacgatcttggccagtcccttttcctcgccttccttcagatgcgcgccaggatgcagcaccagcacgcgcacgcctaaggcctgcacccgctccagctcctgccgcagaaagcgcacgccgagatcaaaggtctccggcttgatcgtattggccaggttgatgatgtatggcgcatggacgatcacatggtccatggacagaccgtgcgtctgcatataatcacgcgcttcctgcagacgcagcttttccaccgggacacggcgcgtgttctgcggcgcgccggtatagatcatgcaggcgtttgcgtgatagccgacggtgtcctgcatcgcgcccagcagatagcccggggcggacatcgaaacgtgagagccgatgatcatgatccttccgcctctctcttcgcccgcatcttggccttggcgcgttccttctgctggcggcggatgtcctcctggatcatggtcctgcgcgccttgcgccgcagccgttcgacttcctgcttctgcttcttgcggtagttgggcttcaccttcgtctttttcttcctgacgatcttgcggatctcgttttccagcggatcctgctttttcacgcgctgctcatgcagcggcttcagctggacccagtttccgccgcggaaattcgcatgttcgaaacggatcccgcgctgttccagcacacggatcatcgtatcgtcttcgccgcggtacagcgcatagcagacaccgtcacggccggcccttccggtcctgccgctgcggtggatatagaaatccagctccttggggaaaccaagggaaatgacgtgcgtgatgccttcgatatcgatgccgcgcgcggcgatgtccgtcgccacgacatagcttttcttctggctctgcagttctctgagcgccttcatgcgttccctggcgttcagatcgccgtgcagctccaccacaccgtatccggccgcgcgcatgcgctctgccgcctgcgcggcgaccaccctggtgttggcgaagatcagacagacatacggattgatgcccggcaggatctccatcagcttctccgtatattccatatgcttgcaaggcaccagcacatggcgaatatccgggtgaaactgttcgcttcgctcgatctggatggtcttcggctcatgcatgtatttccgcaggaacggcttcagcccgacagggatcgtggccgaaaagctcatcatctgcagatcgctgcccatccgtgacgcgatcttgtccacatcttccaggaatccgaattccagcgtcatgtccgct

SEQ ID NO: 876 - DNA, 7366 bp, Unknown
  16S sequences of unknown bacteria
gagaataaggtgcccgacgatgaaaaacgtgatgccgtggctcttggcgatgcgcatgagtttgcccgcgcattcgcgcacctgccccacgcttcccgccgcggaggacatttcgctcgaatagaccgcctggatggagtcgacgaccacgaatttttcgtcggtgatcgcctcttcgatgtcttccagacaggtttcgttgagcagcagcaggttttccgaattgagattgagacggttgcagcgcattttgacctgcgaacaactttcctccgcggaaacgtacagcaccttgtgctttgcggaaaggtgcgccgaaacctcggtaagcagcgtgcttttgccgattcccggatcgccgccgatcagaacgagcgagccgggcacgatgccgccgccgagcaccgtgtcgaattccgcgatacccgaagaaacgcgggcgtagcgctcttctttcacggcggacagggggacgggcgcggcgcggccggccgaacgcggttttttcagtttctgtgcggcaggttcggcttgggtgatttcctcgacgagcgtgccgaattgatggcaggaagggcatttgcccatccattgcgggctcatcgcgccgcattccgaacagatgtagacagatttcgtctttgccatgatctctcctttgtcagtctgtttccgccagcgaaacgtatgcggtgacggtgatccctttcccttcgcccacgtagcccaaaccctcgttggtgcccgccgagagacccacgtcgtcgggcgatatacgcagcgcgcgggcgatgttttcgcgcatggaaaagatgtatttttgaaggcgcggacgttccgcctggatcgccgccgacacgttgcggggcgcgaatcttttttcggccaaaagatcccgcacccgttccaacagacgaaggctgtccgcgtccgcaaacgcggggtcggtgtcggggaaaaagtgcccgatgtcgggcagggcggcggcggataaaagggcgtccatgaccgcgtggacgagcacgtcgccgtcgctgtgagcgatcagcccgctttcggagggtatgcgcgcgccgccgagcacgatatgatcttgcgcctttccgaaagcgtgcgtgtcgatgcccacgccgacgcggggcgcgggcagggggtcggataagaaatcttcgcggaaggtcagttttttatttttaacgtcgcccgcaaagatctgcggcggcgcgacgaatttcgcgtatacgccgctgtcgtcggtaaacgtttcgccgccgattttttcgtaagcggcgagaatttccgcataagagaacgcctgcggcgtctgcaaggcgtacaaggcgctgcggtcggggatgctcccgatcttttcttcggcgcaaagcgcgatcgtgtctgtgacgggcagggcgcagacggcgctgccgtgcgcgcgcaccgtttcgatgcagtcgtttaaaattttctgcgtgacgaacgggcgcgcgccgtcgtgaatgagaacgtaatcgggactgtcgcaggcgcgtaaggcaaaaaggacggattgcgtgcgcgtatcgccgccgcataccgcgcgtacgttcgcgaacttttcaaacattgcggaaatttccgcaatatcgcgttttgccgcagcgatcacgatctcgccgatgctttcgcaagccgaaagggcggacacagtgcggtaaagcacgggttcgccccgaaagaatgtcagaagtttgtttttggaaaagcccgcgcgcgcgcctgcgcccgccgcgggaacgacggcggagatcttcatgataagtccgcgtcggcgatgatctcgtacagcgaggacgcctcgtcctttttcaccgtttctttgagcgcgagcacgcggaatttcaggctccccgccgaaaatttcagttctaccacgtcgccgatctttaattggcaggcgggcttgacctctctgccgttgacgacgactttgcccgctttgcaggcgtcgcccgccaccgtgcggcgctttaagatgcgcgaaacctttaaaaatttatcgatcctcatgatcctcccgtaacgcggacaggggaaaactgtgcaaaaatggggcgcggtattccctttccgctttgcgaaatttgtttttttttgaattttcggacaagtttttgacgaaagcgacaaaaaaaatcgccaaagcgcgaaaaagaagttgacaaaactttcaaatttttatataatactaaactgtatcattatagagtataatgtgttttttgcgcttttttcgaacttttcttcctgcaaagcgtgtcggctcgtcccgtattatatataatatggtttataaatcgggaattcgggcggcgctttttccgtctttgacaattatacatgaaaaaaaccgttctgtaaaggaacgcgcgaaaaaagtttgaaaaattttttcagcaacaaaaagcggtgcgcatttcgcgcgccgcggcgatagaacgaaaattgaaaggagcagtcattgatgaatttacctattcagaagtacggcaaaaccgagagaaggaagttcggtaagatcaacgaggtcatcgatatccccgacctcgtggagatccagaagaattcctacgatacctttatcaacgagggtatcggcgaggtcttcgaggatttctccccgatcaccgattattccgaccactttgaattgtattttttggatcatgaattcggcagcaaaccgaaatatgacgaaaaagaatgccgcaaccgcgacgcgacgtacgctcttcccctgcgcgtgaaagtccgcctcgtgaacaaagtgaaggaagaggtgatcgatcaggaagtctttatgggtgatttcccgctcatgacggaaaacggctcctttatcatcaacggcgcggaacgcgtcatcgtttcccaactcgtccgttcgcccggctcgtataacgaggcggaacccgacaagacgggccgcaacatgtacaagaccaccgtcatccccaaccgcggcgcgtggctggaattcgaacaggacagccagggcgtcttgtgggtgcacgtggacagaaagagaaagatctgcgcaaccgtgcttttgcgcgcgctcggcttcggctccgacagcgccatcaccgacattttcgacgacgaccgcatgatcgccgccaccatcgaaaaggacaccgccaagagcgaacaggacggtttgatcgaactgtacagaagactgcgccccggcgaagtccccaccgacgattccgtgcgccagcatctgcacaacctctttttcgatccccgccgttacgacgtggtcaaagtggggcgctataagttcaacaaaaaactcaacatcgcctaccgtctgcccggctgcgtgctcgcggaggacgttttcgcacccgaaacgggcgaacttctggcgggcaaaggcgagatcgtttccgacgagaaagcgaaagagatccagaacgcgggcgtgaacgccgtgtacgtgctcgttttcgacgaaaaggcaggggagatccgccacaagatcatcggcaacaacaccatcgattttgccgccgtttcggataagaaccccaagagtttcggactgctttcgaccatctattaccccaacttcgtgttttccaaggagatcgccgccgcagcggacaacgccgacgcggaaacggtcgccgagcactatatcaacgagatcaacgccgtctactttaccgccgagagccgcaaagaggacgacgagaaacaggaagaaaagaaaaaccgcgaaaagcgccgcgagaaccgcgtgaaattcgtcgtcgcgtgcaaactgttccacgagatccttgcacgggatgaagtgtcgatcaccgcggaagaaaagaaactcatccgccccctgatcgacaaactcaaccacagacacatcaccgtggacgacatcatctccgcggtttcctccaacctcgatctgcgctacggcatcggcacggtggacaatatcgaccatttgggcaaccgccgcgtgcgcagcgtgggcgaacttttgcagaatcaactccgcgtgggcatcgcgcgcctcgaacgcctcatcaaagagaggatggcgacgcaggatcccaacgaagtgacgccctcgggcctcatcaacgtgcgtcccgtttccgcggtcatccgcgaattcttcggctcttcgcagttgtcgcagttcatggaccagaccaacccgatcgcagaactcacgcataagcgcaaactctccgcgctcggtcccggaggtctcaaccgcgaccgcgccacgttcgacgtgcgtgacgtgcaccactcccattacggaagaatgtgccccatagagacgcccgaaggtcagaacatcggcctcatatcctcgctcgccacctttgcgaaggtcaacgagttcgggttcatcatgtcgccctatcgcagggtggacaagacggacggccgcgtcgtcgtcacggacgacgtggactaccttaccgcggacgaagaggataaatacgtcgtggcgcaggcgaacgaacctctgaacgacgacggtacgttcgtcaacgagcgcgtttcctgccgcagaagggcggagatcacccaactgcccaaagaaaagatcgactacatggacgtttcgcccaaacaactcgtttccgtggcgaccgcgctcattccgtttttggaaaacgacgataccaaccgcgcgctgatgggctccaacatgcagcgtcaggcggtgccgcttttaaagaccgaaagccccatcgtggcgacgggcatcgaagcggcgatcgcgcgcgacagcggcgtcatgatcaaggcgaagaacgcgggcgtcgccatcggcgtttcttccgacctcatcaagatccgcaccgacgcgggctttatcgacgaatataaaatgaaaaagttcgagcgctccaaccaggggacctgcctcaaccagcgcccgatcatccatacgggcgaccgcgtcgcggcgggcgagatcatcgcggacggcccctcgaccaacaacggcgaactcgcgctcggcaaaaatatcctcatcggcttcatggaatgggaaggctacaactacgaggacgcgatcctcatttccgagcgtctcgtgcgcgaggacgtgttcacttccattcatatcgaagaacatgaaatagaatcgcgcgacaccaaactcggcgaagaggagatcacccgcgacattcccaacgtcggcgacgacgctttgaaagacctcgacgaagacggcatcatccgcatcggtgcggaagtgggcagcggcgatatcctcgtcggcaaagtcacgcccaagggcgaaaccgaactgacgcccgaagagcgcctcctgcgcgccatattcggcgaaaaggcgagagaagtgcgcgacacttccctgcgcgttccccacggcgagggaggtatcgtcgtagacgtgaaaattttcacgagagagaacaaagacgaactttcgcccggcgtgaataagttggtgcgcgtgtatatcgcgcagaaacgtaagatctccgtcggcgacaagatggcgggacgccacggcaacaagggcgtcatttcgcgcatcctgcccgagagcgacatgccctttatggcggacggcaccccgatgcagatcgttttgaatccgctcggcgttccttcgcgtatgaatatcggtcaggttctggaagtgcacctggggcacgtgtgccgccagttgggctggaagatcgcgacccccgtattcgacggcgcgaccgaaaaagacatcaaagaacttttctacgaaaacaacatcgtttccccctcgggcaaagtggacggcaagatccaactgtacgacgggcgcacgggcgaagcgttcgaaaaccgcgtcaccgtcggtcagatgtatatgatcaaactcattcacctggtcgacgacaagatccacgcgcgttccatcgggccttactcgctggtcacgcagcagccgctcggcggcaaagcgcagttcggcggacagcgtttcggcgaaatggaagtgtgggcgctcgaagcctacggcgcggcgcatattttgcaggagatcctgaccgtcaaatccgacgacgtagtgggccgcgtcaagacctacgaatccatcgtcaagggcaacaacatttccgaaccgggcattcccgaggcgttcaaagtgctgttcaaggaattgcagtcgctcgcgctcgacgtgaaagtgctcaccgagtccaaagacgaactgatcatcaaagacttctccgacgcagaactcgatgcggacgaagagcagacttcccgcaacgacgaggtggaagaactcgatttcaacttcgacgacgaggatgaggaagaagaggacgagggcatggagtccatcttcgaagacgacgacaacgacgaagacgatttcgcgtccgcggaactgttcgacgacgaggaactggacgatctcgacgatttagacgatctggacgatctcggtttcggatcggacgacgaagagtaatttaacgggaggatttatatgtacgaattaaacgattttgactctatacagatcggagttgcgtctcccgaaaagataagagaatggtcctacggcgaagtcaccaaacccgaaacgatcaactaccgcacgcaaaaacccgaaaaagacgggcttttctgcgaaaagatcttcggaccgaccaaggactgggaatgccattgcggcaaatataaaaggatccgctataaaggcatcatctgcgaaaagtgcggcgtggaagtcacccgcgccaaggtgcgccgcgagaggatgggacacatcgaactcgccgcacccgtatcgcatatctggtatttccgcggcgttccgtcgcgtatcgggcttttgctggacatgggccccaaacaactcgaacaggtcatctattttgccgcttacgtcgtgctcgatcccggcaaagtgcctacgctttcccgcaaacaggtcatcaacgacagtgaactccgtgagatcgaagagcagtacggcgacagttccgtgacgggactgcgcgtcggtatgggcgcggaggccatccgcgaacttttgatggcggtcgatctcgataaagagagtaagatcaccagtgaaattatcgaaaacaaccagagcggcgccaaacgcctcaaagcggtcaagcgcatcgagatcatcgaggcgttccgccgcagcggcaataagcccgaatggatgatcatgaccgtgctgcccgttattccgcccgaattgcgccccatggtgcagttggacggggggcgttttgcgacctccgatctgaacgatctgtaccgccgcgtcatcaaccgtaacaaccgtttgaaaagactgatggaattgggcgcgcccgaa

SEQ ID NO: 877 - DNA, 5155 bp, Unknown
  16S sequences of unknown bacteria
tcacccgccgcttagtgctccgcgcacttgaagcgggggaatgcttatctgcgttaaaaaaagcgcagacatcagactttcgctctgatatctgcacttccctattctgcttcaatctttaccgttcatccaacggcacatatgctctgtgatgccctacatacttgtacgccggacggatgatcttgccctcatttacgagctcctcaatccggtgtgccgaccagcctgcgatacgggaaatcgcaaagatcggagtaaacatctgcgtcggaatgccgagcatcgaatatacaaatccgctgtaaaagtcgacattgcagcagattggcttatgcaggttcttgcggccggtcagaagctcggacgccagctgttctaccttcgaatagagcatgaactcttctgtgagtcccttttcctccgacaggctgcgcgcgtactccttcagaatgacggcacgcggatcggacagtgtgtagacggcgtgtcccattccatagatcaacccgctttgatcaaacgcttctttgttgacgattttttccagatatgcgtaaatctcgtcatcatttttccagtcctttacatgtgacttgatatcggagaacatgttctcgaccttcaggtttgcaccgccgtgccggggtcctttcagagaaccgagagaagcggctaccgctgagtaagtatcggtacccgtcgaggatacaacgtgggtcgtaaacgtggagttgttaccaccgccgtgctctgcgtgaatgacaagcgcaatatcaagcacccgcgcctccagctctgtatattttccgtcgcttctcaaaatccgcaggatattttctgcagtggacagctccggatccggataacggatgacgaggctctggtcattgtggtaatgctggtacgcatgatatgcataaaccgatgtcagcggcatcgtcgcaatcagagtcagcgcctgacgcagtacattctcaatggaaatatcatccggattctcatcataagaatacagtgtcagtacgcttcgctgcaacgcattcatgatattcagactcggtgccttcatgatgacatcccgcacaaatttactcggaagctcccggtactggttcagcagatcaataaattcccgcagctgctgcttgtccggcagcgcaccgaacagaaggaggtacgtaacttcctcgaagttgaaccgtcgctgcttaaagccctttttcagatccatgacattgtagccctgatagtacagttcaccttcacacggcaccttctcgccctgtatggtcttaaaaccggtaacatccgaaatctcagtcagaccggtcaggactccttttccatctgactcacgcagtccacgctttacgtcgtactctgcatacagattcaaatcgagtgctccggaaatcatacaatattttacgagctggctaagccgctcatcccttgtctttctgtctgtctcattcagtaccataatctttctcctccctgcgtttattccagtcccatctttttcagtaaaaactgaatattctggttttcaacggagctgaatacactgtcgctgaaatgatcggcatctgtcgttccctgataccaggacttaccttcaaaatattgctgaatggattcggttccgaagatccgtccatgccttgcatagatttcattaatcgccatttgcagatcgtcataggacatcccctgtacatctgcgtctgtcagcgcacgctccgaactctccggcaaaatatactcgctgctatctgcctgtgcctgcgcctgtgtctgctcctgtatctgaatcgcttcggtctgcggtccatccccggtcaccagaatctgaatccctgcggcgatctgattgatctcagacgccattgccgtatactccttctgagccgcttcgttgttctgtgcatactgtacatccgtcggaagcatcagcacataggccgcgcctccgcccatcccaagcacccggtaagacggcagatcctgataggacatatcggtatatttcccaatcgtaaagagcgttccgttatagccgagcgccttcgacgactgctggtaaaatatataaaaattgtcctgctgggtaattccgtattttcccttccagtctgccggaagtgtcacggtaaaatctgtataatttaaggtcgttgccgtcgcctctgtctgcacagctgcctcggtctgtgcctctgtctcgcttccggccgtctccgcctgcacgcttgctttattctcgccatccagaattttgattgcctcggtctctttcttttccgagcccttcgcatcgctttgttccgtctgcgcctgtccggctgtggtactgttcgagctgtgatttctggagcgtccgaccagccagaatgctccaaacgtcagaagcgcaatgagcagcacgccgataaatccgagcagaatatactgaaacgtcgtaaaacgtccttcttcttcgtcctcatcctcttccggatcccaccggttccccatattggtcggtgcatactgctgcgctctggtacgccgccactcttccggtgatgctccggttggccgctgtggcgaaaaggcattgtcccgcccgatatccggaatagatggtccggcctgcggacgccgttgtggacgcccggcagctcccgtctgtgtaacctccgcgtcactcacagcggatgctcccgtctgcggacgccgctgtggattccctgctcctgtctgcgcagatccttcataatatccgcctgacggacgccgctgcggacgattgcccgctcccgtctgcgtagtatctgcatctcctagcggacgccgctgcggaggattgcctgctccggtctgcgtagtatctgcatctcctagcggacgccgctgcggaggattgcccgcgacacgtccggctgtctcgccgctcctgcgcggggtaaatactttttccgtctcatttttctgtccgtccggcaccttggacactgccgcaccgcagttttcacagaatcttgccgtcggctccagcgcatgcccgcattgcggacagtatcgcatatttcccataactgctcctctgtctttctgtcatttttatatgatgatgccagggtcaaaaggtcaaaaagccgttcatgcttgcatgataaggcttttgaacttgggacccgccaaacatgagaaagtagcgatttacgtagtaaatcagcggatttcgaatgtttgcagaattgcgagagctgcttcgcagcggagcaattcgtaggcatcagttagtctttactcttctgtcacggaagctgccttcgccgctgccgccatcttctcaagataggccgccgcctgctcaagcttctctgcgtcaatcgaatagtacgaccattttccctgtcgccgacatgctaccacaccggactcacataatattttcatatgatgtgaaagtgtcgactgcacaatactcaccgacttgagcagatctgccgcacagagctccccacttgcgcggatcagctgcacgatctgcaaccggacatcatcacccatcgcccggaataaaagagcagccatcgcatcatcggccaacgcctgctgtagacgcttcgctgtcttctttatcttcggccggctttgttttacaggagcgcctgtatccggcgtctctgctgcttccggcagagcttctgtaatcatctccggagacagcttttctgtcagcctgctctttttttctttctttttcttttttggcttatcctcggatttctgcttttcctgtttctcgagcttctcgagctttgccagttttttctttttcttttccttcatctgtactctctcctgcttttgccctgacagatgccggtatcttatgaattcgggcttctgacaccggcaccggaataatgtaacattatagcacgttgtatttatgccgtaaagcggttattcctgcatatttctcaaatttatggctgtttttatgcatttttattcatacacaatcaccggtgtcccgactgataccgtattgaatatcgtctgtgcctgctcatacggcgtattgacacagccatgtgaaccgttggtcagataaattgtcccgccgaaatacgcacgcgtctgcatgtcgtgaatcccgacatctccattaaacggcatccagaaatccaccggggactggtatccttccccgaccagaatcgcattctgcttcatcgcatcgatggcccagacaccacctgacggagttgcgtttcctttgttcggattaccggtcaccaccggcgtatcgacgatacacgtaccatattgataacaccacatccgctgctgggaaatgcagatctccacatatgtatcgccgatatcatttgtatcccgactctttgccgtgtataaatattcaggctccatcgttccctgataaccatctgccagcgcattcagcaatgccactaccgtcgcatcctgatccatacaccagccataatcccctccgtttaatgtgacggtcgtcccaagagaagtatagaattcccgcgtcaggccgaatgtatcgtattttgcagccaggctctctacataatccgtgactgccacttcatcaatgacatattccccgtctgcgcgtgtcacgatccagtccgcgataagcggcgcatttactacttccttccggtcaccaaaatcatacgtgatatatgcctttgccagcgcactttttttctttgcttcctccagcagtgcggcatcatcggaataccgctttggattcacatagcagccggcatcctcaaggctgagcacactctgccccgcatccagcgcatctgcaagcgcctgctcggctttttcggcatccagcgtcgttcccatgacctccggctccacctcaaagccggtgtccgtcgttttcacataagcatcctccggtgcggtcacatagagcggattcatgcagtccagctctgagaacgcctgcattgcagcatcccggtcatatgaaaatgccacagctgccgcattggaacgctttaatagaatcatgaccggccagagaaaagacttctgtgctttcagcatccggttaatgctgctgtcatccacaaatgcaagcttgatctgttctgcagtgaga

SEQ ID NO: 878 - DNA, 15819 bp, Unknown
  16S sequences of unknown bacteria
atctgcataatcaattcgaagagaattaatataggtactgaagtttactttcaacacattagagaaaattcgtgataaagtacattttccgataccgaaatgcttggcaatagtagaaagagatatttcttctcgaaagtgttttcctatataagtgataatttcattagaaagatcaccctgaggagcctctttaatatcagaaagtataagttttggaaaaatacggctcaacataagagacaaaagcgaactgatcagaatttgatcgtaatcatcctgatgaatttcatacaggcgcttttctgcatataaaatgtctggatgtatttcttctgcacggagaaccggattttttggataattgttcataagcactgtggtatgcaacggcaagtaagttgggtagcagtttagaatatggagttctgtatctgatgtcccggaaagtgtatggtagtcatgtggaatattgggaaaaatgaacgcaagatcaccttgttgtaaaagatacttttttgagccgatttgcatttccacgcatcctcgttcgattcttaccagttcaagatattgatgtaaatgaagcggaaactgaatagggtttttctcacagaaaagtaaaaatagttctcttttattttcataaaacatgtgtccacctctgtctagatatacttaaatacaaacaaaaatactgcaataattgtgaattatatgtaaaaaattatgaatcattataatataaaacctgttataatgtcaaacataagaatagagaagtagaaaaacttgtggtggttgcacaagaaaaacagaaaacgcgcggcctgtagagaaaacaaccaaactgaattagacaaaaattgttaatggatacgagaaggaggatattatgcgtaaaaacagtaaaaaagtcattagtgcagttctttgtacatcaatgtgtgcatcgatgtttagtggtgtagtagcgaatgcagaatctggagcaacaattgaggttgcttataatcttacaaccgaagatttttctgtgtttgagcagattacaaaggactttaccgcagagacaggtattaatgtgacaatctataatggcggcgatgattatgaatcagcgatgaagacgagaatgtcatcgggagatctcccggatatgtggactacacatggatggagcctgattcgttacagcgaatatatgatgaatctgaatgatcaggattgggtagcaaatattgattctggactgaaagatgttattaccaacgatgatggagagttatttatccttccgattactcaggctgttgtagctattatgtataataaagatgttcttgaagcagcaggagtggatgcaacacagatacgtacctgggaagattttgatgcggcatgcgcagcagtaaaagaaaaaacagatgcagctccaattgaaatttgtctcggtgatggatatgattcctattctctggaggttatctggccaacattactcacaaatccggatttggctgacaattatgcagaagctttgcaggatggaagttttgactgggatgcaaatggaaaagaaggcatgcagatgctggcgaactggtatgaagccggttatatgaatgaagattacgtaagttgcaagaaagatgatatctgtaaggcactggcaaacaacgaaggagcatttaccttatattcaaccgagatgattccgtcagttttggcgtacaatgaaaatgcgaatatcggaattcttccggcaccggcaaaggatgaaaatgcagcttcctactttggaacaggtgaaggaaacttcagttgcttcggtatctggaaagatacagaatatgcagatgagtgcaaacagttccttgagtatctggcacgtccggaagtagcagtaaagattgttcagattgatggtggtattccggcacttacgacaattgaattggacgagactgataaggcagcttatacaacaaatgcatttaaggaagcccagactcagtttgatgaagatcttacgtatgataactttttcgaccgtgaatatcttccgagcggaatgtggagcgtaatggcagattctgtaagtacacttcttgctgatggagatccggaaggatctatggatgaagcaattatgatggttgctgataactataatgatctgatgggcaactaagacaagaactccggataagaatatcagagtgtgagattgctctgcacccggcgaggcgtctggcgccttccgggtgcagtttttttgaggagaatatttatgacgaaaaaaagactacagagattgaactggttttatgtaccagcagttgttctgatgattctgtttattgcgtatcctcttggtaatgccatttatctttcattttttaaatggaatggatattcagtaaagaaagactttattggagtgcagaattatatatccatgtttaatgataagacctttgtttcttctctcagaaacacattattgtatggttttgtctgcacatttttacagcaggtaattggtcttgcaatggctgtctttttaaatacgaaatttaaaggccgtggaatcgcgcgtactgtaatttatatgccggcgatggtatctggtcttgtaatgggatatattatgtacttctttttccaaacgaaaggcggtgtcatgaatgatattctttcgtctatgggattggctacagtagattggcttggaaatgggaatacagcaatcgcagtgattatctttattaacacatggcagtttgttggtgtcagcatggttatttaccttgcaggaattcagggcgtatcacagtcttacattgaggctgctactgtggatggtgcaaatgcatggcagagatttcggtttattacgttaccgcttctgcagccagcccttgcttcgtccattatttataacttgatcggcggattaaaactttatgatgtaattattgcgttgacagatggtggtccggcgaaaaagacccattctcttgctacttacattgcgaatcgctacttcgatgcggagcgtgcaggatacgcggcggcaatcggtgtcttttcctttgtgatgattatggtgatttctatgattgtcaatggatatttccgtaaaaaggaggtcgattactaatgagtatgacgaaagaggaaaagaaagaatataagaaaaagttgaaacagatgaaccgggaagaagtagagcattacaaatttcaaaagaaggactggtggaagtatctgattgcattgggactcttgttcatttatctgtttccattttacattattatcaatgtatctttgaaatcttttgcagatacgacatcaagaatacagtttccaaatccaatttactgggagaattttagaaaagttatcgaagccggtgatatttttgtaggtataaagaacagcatgattattacggtatttgtgttgctggttgagattatacttggctgtatggcagcatatgcgttggcaagaaatcagtccaagctgaatgaggttgtgcgaagtctgattatgtctgttatgatgattacgccattgacgattttagtaggtgtatattctacaatgtctaagattaatgcgacatctacctattggggaatggtattgctgctatcttcgtttggattgccactggtaatatttctttatacaaactttatttcgtcgataccggttgcattagatgaagcagctgcaattgacggggcgacaaatcttcagatattcttccgcattattcttcctcagttaaagagtgttactataacggttattattttacagggtgtcagtgtctggaatgagtatacatactcgtattatttccttcagaaaacagaaatgcgcacgattacgcttgtaataaaaacattcttttctgcagtttcaaatgattatggagctgctgcagcaaccgcagttatcggaatggcaccgctgattatcctctatttgttcctgcagaaatattttattcagggacaggtggacagtgccattaagagctgatggaattgtatcaagtatcgggcggattatgaatatttatctgacggatgtgtcaaaagcgaaccttccacagtgtgtgagaaggttccttttaaaataatatttttacggagttagacaagcttttggcttttattcttgcgagcaacgagccaagtagtcatgtttgcatggatatttcattcatgtagttttactgttggggagcggctggcttggactgctaactataatcagacttcagaaaaggagcaaattatgcagaacattaatatcagagaaaatggacttacagtggaattcggaatccgtgaggatggtattgtagagcttctggattttacagcagaagatgtggcgaacgccaagacgacaccgaccgatccggaagcgatctttccggttgttgaggtgcaggtgactggaaaaacaacacggcacatgcatgcatataaacacaatgccggaagtgcatcgttcgatttcaggtacgacacacacagcctgaaggagactgcaaatggtaaagaattggttcttcagatgaaaaccggatatggccttgaggcagcctatcacatgcagttttttaacggaattccggccgtgcggacgtggacggtgttgaccaatgcaggtatagaggatatcgggctggagtatgtttcttcctttatttatcagggcgtgtctggcaacggtgggcagccatattataaaaaaacagagatttacgtgccgaacaacagctggtctgacgaagcacagtggaataagcatgcggcgatagacctgaatttgaccggaatggagacggatggtttcaactgcccgggctttggcatgaaccgcttctggtatggaagcaacagctcctggtcgacctgtgagtatctgccgatggggtatgcacaggatacggagaccggtgagatgtattattttgagattgaaagttctggacagtggcatgtagaatatggttccgggcttggaaagcggctctatgtggcactttccggaccgacggagagtgagcagggctggtggaaaaacctgaagccaggcgcttcctttacaacgataccggctgcatttggagtcgtaaaaggtggaatcagtgaggcgacagcggcattgacgagatatcgccgtgcgatccgcagaccgaataccgatgatgtgaagctgaacgttgtatttaatgattatatgaactgtctgatgggcgatccgaccgatgagaaggagcgtgcgatcattgataaggcagcggagatgggctgtgaatattattgtctggactgtggctggtatgacaagggcttctggtgggatcgtgttggtgaatggaaggaatctccggagcgttttccgaacggcctgaaatccatttgtgagtatgcgaacagcaaaggcatgaagatggggctttggctggaaattgaggtcatgggaattgcctgcaagctggcagatactttgccggatgactggttcatctgtcgtcatggaaagcgccacgcagacaataagcgttatcttctggatttccggaacccggaagtacgagattactgcagaggtgtcgttgatcgtctgattcgtgattatggtgtagagtattttaaggtagactataatgtgacgatgggatatggaagtgatctgaactctgacagctgctcagatgcgatcatggagcactatcgttgtctgcatcagtggtatgcagatctgtttcgcgattatccggagttggttatcgaaaactgtggttccggcggacagcggatggactatggcatgctgggacttctgagcctgcagtcgacgagcgatcagacggactacctgcacaattcacacattgcggcaaatgtggcgagcgcagtgacgccggaacaggccggtatgtgggtatatccatatgaggataacgaagagcatgttatttacaatatggtaaacgggcttctgctccgtccatatatcagtggcatggtctggaagatgagtgataccggaatgaagcgtatgcaggaggggattgcactttataaagagattcgcagtgatgtaagagacggtgttccgttcttcccgcttggatttggacacatcagggataaagcacttgcctatggaatcatcaatggagatgtcgcatatctggcggtatttactccggcaacggatgaggtcgaaattcctcttaccatcgaaaaagagattgcagaggtttccgtcatttatccgaaagagcagctctgcgagtattcgtatgagaatggcgtgttgcatgtgaagatgccacagaaggcagcagcgagactgtttcgaattcagctgaaataattttatagatatatgaaaatggcacaagggtcaaaaggtcatgcatttcatgcttgcatgaaaaagcatgacttattgacccgcaaaacaccgaaaagtagccatttttcgtagaaaaatgagcggatttgaggtgttttaggattgcgggagcatgaaatgcgaagcaatccgtgtgtcataggggtcaaaatactttttgatcccaacaacatgaaaatatggtaacatgagaagtgagccctgtgccatactgaagttatcttttatataaggtcgatgaacacaaagcaaaatattcacaagggagcacacaaatgaacaaaaacgattttgcaaaatacccgccgatgggctggaacagctgggactgttatggcgcggcggtgacggagaaggagctgcggcagaatgcagactatatggcggagcatttgaaggagcatggctgggagtatgtcgtctgtgatatccagtggtatgagccgacagccgatacgagccattatcacaatttcgcggatctgtgcatggatgagtatggacgggtgatcccggcgccgaaccggttcccgtctgcagcagatggaaaaggctttggaccgatcgcagagtatgtgcacagcaaggggctgaagtttggtatccacattatgcgtggcattccgcgtcaggcagtacatcagaatacaccggtaaaaggaacgtcctatatggcgagacagatcgcgcatccggcttcgatctgcgcatggaatacggatatgtatggtgtggatgcgacgaagccaggtgctcaggagtattatgattcaattattgagctgtatgcttcctggggcgtggattttattaaggtcgatgatatctgcgtcaaatatgggcaggcaggtaatgaaaatacaatacaatacggtggagatgagatcgagctgctgcataatgcgatcctgcacagcgggcgcgagatcgtgctcagtctttcgccgggaccggcaatgctggagcaggcggagcatctgagggcaaacgcaaatatgtggcggatcacaaatgacctgtgggattcctgggggaatatcatggagatgttcggacggtgcgacagctggagtccgtatgtatctgagggatgctatccggattgtgatatgattccaatcggacatctgtccatccgtggctgtgagcatgggctttcggagcgctggacccgtctgacaaaagcagaacagcggacgttgttctcactctggtgtattttccggtcaccgctgatgctcggctgtgagctgacggatgtggacgagtggacgaggagccttttgacaaatgatgcggtgctcggactgacgaagcacagccacggtgctcatcaggtgctcagaacattcgatttcatcgtatggcaggcagggggcgagcacggagagcagtatgtagcaatgttcaacatcgcaggctggccggatacattcagcgtgagcacggagaagcttggcctggaaggcgcctgggaagtcactgatctgtggaccggcgagaaagagggcactattgatcgcacgctgacggcggcggttgagacgcacggtgtgaagctggtgtgtcttaaaaaagcgtaatttaataagctgcgaagcggattgcgaatattcgctttaatcaggcatgtattctggagggctcctgcgggagccttctattattatggttttgcatactttccagtatttgctcatttatagaacataaatatcggtgtgccggctgatcggaagcaaatagtgggagtgattgactcgcttccggaaaataaggtatgataggtagtaagagtaaaaacgaaaggaaacgttttatcatgaatcgaattttaatgctgagcacaggtgggacgcttgcttcctcccacagtgagaatgggctggcgccgggactccatggaaatgatattctggatcgaatttccgggctgacggatggatttcttgtggaggaagaggaattgttcatgctggacagctccaatatgcagccggaggagtggagtgcgatcgcccaaagagtttatgagcggcgaaaagcgtatgacgggatcgtcattatccatgggacagatacgttagcttatacggcgagtgcactctcatttgcactgcagcagatcgagattccggtcgtgctcaccggcagtcaggtttcgatcgagaatccgattgcggatgcgacagagaactgccgggcagcacttcatatggcggcgagccattgtccgggggtatatgtggcatttaaccggaagattatgctcggagtacgggcgagcaaggtgcggacacgtagctttgacgcatttgagagcattgattatccgtatgcggcgcggatcaacagtggcggactgctcatcaatccggagatgaaaaagcataaaggcggggaatgtgtgctgcgggaacgcttttgtacggatgtctttttgctgaagctgtttccgggtatttcgccggatattttttcaagattgcaggagatgggcgtgcgtggcatttatatagaagcatttggtatcggtggactgccgtttgagcggagaaatctgacggaggtgatcggaaaagcagtggcagacgggatgatcattgcagtcggcagtcagtgtctgtatgagggcagcgattttaccgtatatgaggtcgggcgccaggtgctcgcacaaggggtaatcgagacagggaacatgacttctgaggcggcggttacgaagctgatgtgggcgcttggacagtaccggacgccggaagaggtgaaaagcgttatgcagcagaatctgctcggggagatgggaaatacgatgaactggtgtgagtaacttccggctttacacaaataaaggaagagcgtataattagaaaaaatgcatgcctgttcgggtgtgtgcaactaagcagaaggggaaagtgaactatgagaaagattctcagacacatgaaggagtatcggaaggagtccgtctgtgcaccgttatttaaactgctcgaggcactctttgagctgtttgtaccgcttgtcatggcgcggatcatcgatatcggtattgcgaatggcgatcgcgggtacattgtgaggatgtgccttgtcatggcagcactcgggctgatcggactgatctgctccattaccgcacagtattttgcggcaaaggctgcggtcggatttgcggcaaaggtgcgacacgaactgtttgcacacattcagagcctgtctttttcagaaatggatgtctgtggtacttcaaccttaattacgcggatgacaagtgatatcaatcaggtgcagtcaggtgtaaacctgtttttgcgtctgtttttacgttcaccgtttatcgtgttcggcgcgatggtgatggcatttacaattgatgtaaaagcggccatgattttcgttgtggtgatcccgattctttgcgtcatcgtatttggtattatgctggcgagcattccgctgtatcggaaggtgcaggagcgtctggatcgcgtgaccggaatgacgcgggaaaacctgcagggcgtgcgtgtcatccgtgcgttccgcagagaggaaaaggagatcgagacatttgagcagggaaatgaagcgctcgtcgggattcaggtattatccggacggatttctgcattgatgaatccgctgacctatgtggtgatcaacggcggtctgctcgtgctgctctataccggtgcgatccgggtcgacggcggatttattacgcagggtgcggtcgtggcgcttgttaactacatgtcacagatcctggtggagctggtcaagctggcgaacctgatcattaatgtaacgaaggcgattgcctgcggtaaccggatcggtgcgatcatggatctggagccggatgttgtatccggagccggggcgtcaaagacggaaacagccaatgagaagaaagggaatgttccggcagtggagtttgatcatgtcagctttcggtataaaaatgcaggagcagattccctgaccgatatcaccttccgggcgatgccgggtgagacgatcggaatcatcggaggtaccggttccggaaagtcctcgcttgtcagcctgattccacgtttctatgatgtgcgtgagggctgtgtccgggtaaacggaacggatgtaagggagtaccagctggatgccctgagaaataaagtcggcatggtcatgcagaaggcggtgctctttgccgggacgatccgggacaatctgctctggggtaatgaacatgcgaccgaggaagagctgcgtgaggcgatccatgcagcacaggcagacgaggtagtattcaaaggaaaaggcggattggatgcagtcgtggagcaggagggacggaatttctccggcggacagaagcagcgtctgacgatcgcgcgtgcgctcgtgcgccatccggaaatcctgattctggacgacagctcctcggcattggattttgcgaccgatgcaagactgcgtcaggcgatccgggatcttgccggagagcggacggtatttattgtttcccagcgtgcatcaacgattcagtatgcggatcagattcttgtgctggatgacggtgcgattgttggtatgggacggcatgaggacctccttgagagctgtgaggtttatcaggaaatatattattctcagttcccgaaggaggatgcacaatgaaaaagcaggcaggacaaaaggaaatcataaaaaaggtactggaatatatccggccgcagtggtttcgggtgctgttgtcgcttctgatggcagtcatctcggtagcgctgaccttatatctgccggtgcttaccggacgggttgtggatcatattttaggaccgggcaaggtagaatttactgagattattgcaattctgcgtacgatgctcattgctattttgctgacggcggcggcgcagtggatcatgaacattgcgaataaccgtatcgtttatacagtgacgagaagcattcgggaggaggcatttcagaagatcgagattcttccgttaaaatatctggatgggcattccaccggagagatcgtcagccggatcatcgccgatgtcgatcagttcgcggacggactgctgatgggcttcacacagctctttaccggtgtggcgacgattgtcgggactttatttttcatgctgtcggtcaatgcaggtattacggtagtggttgtcgtactgacaccgatatcgttgtttgtagcaaactttattgcgaagcggacgtattcgatattcaagctgcagtcggcgacgcgtggtgaacagacggcgctcatcaacgagatgatcgagaaccagaaggtcgtgcaggcatatgggcaggaaaaaaaggtgcagacccgttttgatgagatcaacggacgattggaaaaatattccttacgcgccattttcttttcatccatcaccaatccggcaacccggtttgtcaacagccttgtctatacaggagtcggcctgaccggagcgtttgcggcagtacgcggggtgatgactgtcggacagctctctgcatttttgtcttatgcgaatcagtatacgaagccatttaatgaaatttccggtgttatcacagagctgcaaaatgcgattgcatgtgcgggccgggtgtttgaactgatcgatgaggaaccgcagattccggatccggagcctgcaaaatcgctgccggaagatgacatgggccatgtcagtctggaacatgtggcgttctcctacacaccggagaaaaagctgatcgaggattttaatctggatgtaaaaaacggcgagatggtagcaattgtcggtccgaccggctgtggaaagacaacgctgatcaatctgctgatgcggttctacgatgtcgattcgggttccatccgcataggcggtactgatatccgggatatgaagcgcgagacgctgcggagtggctttggtatggtgctgcaggatacgtggctgcgcagcggtacgatccgcgacaacatccggatgggacgtcccacggcaacggatgaggagatcattcaggcagcgaaggaagcacatgcgcacagcttcatccgccgtctgccggaaggatacgatacgatgattactgagaacggaggcaatctttcacaggggcagaagcagctgctttgtatcgcgcgtgtcatgcttgcacttccgccgatgctcatcctcgatgaggcgacctcctcgattgatacccgtacagagatccggatacagaaggcattcaacacgttgatggagggccgtacgagcttcatcgtcgcccaccgtctctcaaccatccgcaacgcagatgttatccttgtcatgcgcgacggtaacatcgtcgagcagggcacccataaggagctgcttgcacgggacggattctacgcggagatatataacagtcaatttgttaacactagttcagaacagcagcaacatgcaaaataaggctgagacaaacttgtttgtcgaaggctgagtttgcatgttgggatgggcggaacgcccatcagccacagacagaagatgccgcaggcatcggatagcgcgaagcgcgagtctgtggcctgtgctctgaacgttaaaaagagcagcagcaacatgcaaaatagggctgagatgccgcaggcatcggatagcgcgaaaagcgtgtttgcggcctgtgctctgaacgtccggaaaaaatgaaaggagcccccatgacaaaagacatgacaagcggcaatccgctcagactcatcattggatttgcaattccgatgtttctcggaatgctgtttcagcagttttacagtatggtggatacggtagtggtcggaaaattcctgggagtaggaccgcttgccggtgtgggggcgacgagctccctgaactttatggtcatcggattttgtaccggagtctgcaatggctttgcaattccggtggcgcagatgttcggtgccagacgggacagtgagctgcgcaggtacgtggcaaacagtacatggctgtgcattttcttttcggttgtgcttacagcactggttgtagggttctgtcggccgattctgactctgatgaataccccggaggatatctttgaatatgcgtatctgtatatcgttattatctttctcgggattccgtttacatttctctacaatatccttgcggcactgatccggtcacttggagacagccggacgccagtcgtttttcttggtgtggcatcgctgatcaacattgtgctggatatagtatttgtcattgtgctgcatatgggagtggaaggaccggcgatcgcgacggtgatctcccagggcctttccggggtgatctgcctctggtacatgaagcggaaatttgagattcttcgtatatccaaagaggagtggaagctgcgtggtacctacataaagacgctttgctatatgggcataccgatgggactgcaatattccgtcacagcgatcggtacgctcgttatccaggcagcagtcaatggttttggttctttgacggtagccggtgtcacagcggcgcagcgtatcaattcctttatcagctgtccggtcgagtcgatcggcgcgacgatggcgccatacagtggacagaacatgggtgccggaaaactggaccgggttggcaggggactgagggatgcatcaattctgggatttgctgtatcagcggtactctttgtaatcgttttaatgaccggtaaacagctttctttgatctttctggatacggcagatgacagagtcatcgcctattcctaccagttccttgtgacgaccgcggctggctatttcctgctgacgctggtaaatgcagtgcggtttacgattcagggaatgggattttccgtctttgcgattacatccggtgtactggaaatgattgcacgtaccctcgcgggacttgtactcgtaccgctgatcggttataccggaatctgcctggctcatccgctggcatggatttttgcagattcatttctgataccggcgtttttctattgcaaaaagaaggttcagaggctgtatgattgaataacggcgcgtcgcattctcgttacttcagtgatgagttagacgcgcaaattttttgttaaaagcagagcatgtggatgaaataatctatatgctctattttttgctcatttttggaaaaatagaaataccagtaccctgtgctcttaaaagaatacaaggtactggtagcatgagaaaatttgctctactttttggaagtcattttacatatactttagcagataaagttgattacgaatataagttaaagaggataaaacggtttcctcagcccttttcgtacagcgcctgaatctccgccgccgtcagcgcaccgaagtacacgttgacgttgtcgaatctggcgtcttctacgtcctcgtcatcccagatcgcgccgctgccgaccatgacatttttcgcctgagaaatgccggtcttgtttttgcggaagcagtcggtcaggtctttcgtctcctcgccgatcagctcgccgttcagatagacgcggataccctgaggatcaacggtataagcgacgtgctgccacacaccgcgctcgccgtttgttgtgagcagcgcgccctgcacatcactgtaagcattggcattaatgcgggcgatcagatttgcgccgatgcgggtcagcggatactggttgttggcatctgcctcgaacagtgcgctgtgttcaaaggtcgcttcgccgatgttcacccacatcgctacggtgtagccagctggcttgatgtcggataacgtgtcctccgggagcttcaggtagttgacattcttggccgccggctcattcgtaacctgaaggacattgccacgtgtctcatcggatacgatggaagcggagccgatcagggaagccgtctcacttccggtggaatcggtatccggtgcgatggccccggcagcatctgccgccgtctcaaagtcgaagccatagatcaggtatggattctgacgaacggtgactttgtatgtctcctctacggtagtatctccataggtgatcgtggcagtcagctttgcgcgcgcatcttcctctgcctgcggtgtcacagcaccggtctcgctgatgactgaagcatcagaggttgcccaggtcacatctgcaccgaggacagaagtcggaagttctaggttctctctggttgcagctgggatcatctggccgatcgcgattgccgccatgtttgccagcatctcgttgtcattcatatcaatcatactgccccagatgcttgcattgttgtcgccgattgcggagaaggtcatgaccggggtggtatcagaattttccttcagctgacggaagaagaatc

SEQ ID NO: 879 - DNA, 5993 bp, Unknown
  16S sequences of unknown bacteria
ctcagacaagcaaacaggcgggcaagccccctccccgcctgcgagagcagcaagttctgttgccaggccctgctacatccccatccaagcggatatcttgggcacatagcccatcacgaagatgatgacgataagaaccgggataccgtacttgtaccaaaggcggaagcgcatcggcagctttacgcccttgcccttgtctgcctcttcgatgaagttatcccatccccagccgaatttggtcgtgcagaagatgacgaagatgagcgagccgagcggcagcatgttgttggagacgatgaagtcctcgatggactggatgtcgccgatgccgggaatggccacgccgctccacacgttgaagccaagcgcgcaaggcaagctcagcacgacgacgagcgcggcattccaggcgacggcgcggccgcgcgtcatgtcgaacttgtccatgaaccagccgacgaggttctcgaacacggcgatgaccgtggaaagcgcggcaaagctcatgagcaggaagaacagcgcaccccagacgttgccgagcggcatctggccaaagaccatcggcagcgtgacgaacacgagcgacgggccggcatcggggctcactccataggcaaagcacgcgggaaagattatgaggcctgcgaggatggcgacgaccgtgttgagcacggtgatgttgatcgcctcgccgttcaggctgcgctcggttccgacgcgcgacccgaagatctccatggccgcaatgccaagcgagagcgagaagaacgcctgccccatggccgcgtagaccgcctgcccgaaggtgccccattgctctgccggcgtgtcgcctgcaaacagatgcgagaaatcgggaagcaagtagaacgcgatgccctcgcccgcaccgggcagcgtcatggacctgatgcagagcaggagcatgatgacgaacagcgccgccatcatgaccttcgtgatgcgctcaacgcccttctggaggcccaccgcgcaggtaacaaagccaatggcaaccgcgacgagcatccagacgatcatctcggccgggctttgcaccatggccgagaacacctgtgccgtcgcatcgacggaggcgttggcgaactgccccgatgcgagcttggggatgtaggcgatcatccagccggcgacggtcgtgtagaacatcatgaggatcatgcagccgatgtagccccaccagccaaaccagtggaacgtgcgtttgggctggaggatgtcaaaggcgagcgccgagctcttctggctcgcacggccgacggaaaactccatgaccatgacgggcaagccgagaatcacgaggaacaccaggtacaggagcacgaaggcggctcccccgtactggcccgtgatgtatggaaagcgccagacattgccgatgccgatggcacagcccgccgcgacgagaatgaatccgatacgcgaggcgaaatgctctcgctcttgtccctcttgcacgttcctccccctaccctgttgtcaattccgggtgattatatccaattcgacgaacttccttgcacgcccatcgtgcgggcggcagcaactcgtcactcgaagctcgcgaaatgcttgagcgcgtatttgacggcccgttctctgccgtacggcgtggcgtctgccgccatgatgccgagttccatgaacttcttgttgaaaaagacgtcccgcgtcttgtactcgcgcctgatgacggcgcaggtctttgcgagcagcgcctcgtagctggcgctcgtcgtgagcgcgcggaacaggcaccaggcagaccacagcgcgaagtagatgccctcgcccgaaggcgggcagatgaggcttgcggcatctccgaggaaatagcagctgcccgtgcgcagcagcacgtcgctgcccgtgggaatgtacgcgccgcgcaccttgtccacctcgacgccgatgaagcgcgcaaacttgtcgagctcggctttcaagtcgggggcgccgcggaatgccccgcagccgattttcgcgcgttcgccagccggagcataccagctgtagccgaagaagctgctctcgtacgccatggtgtacggcgcaccccgatgctcgacatctgcctcgagcgtcagaatcgcatcgggtgccttgcccgtcaggagctgacgcgtcgtcgagagggcgccgtctgcggcgatgaggacatcgtagctgcactcaagcgcacgctcgtgatctacaaaccccgtcaggaccttgttcacggggtcgatcgagcgcagcgagaaccggtcgatgagctctccccccagctcttggtatttggccacggcaaacgcgtcgagctcgcggcgttccaccgacttcgtggtgatgttgccgaccatggccgttatctcgtcggcaatgcaacgcacgctcgtgagatgctgcttgaacaggtgatcagcttcgaacccgtagatgagatgcagcatctcgatggcacgtggcgtgcacaggcccgcacacagtttggatttgcgcgcaaggtcgaggcgctcgagcagcagcacctcgtgccctgcccgcttgagcaggtacgcgcaggtcgaccccgcaagccccgctccgatgatcagatatcgcgtgttcttcatagtctcaactgctcttcaagacgccttcgaaatcgaatgagggaatgaacgactcttcggcagcgccgccttcctgcatgaagctgttctctatgccgaggtcgagcgcgtagtcgatgagctcgtcgtattccagctcgctcacggtacgcccaagctcgggatacttcagctcgagacccgcgagtggcgtgaactggctcatgaggctcacgcagatatcggagacgtagggcttggccacaaggatgtcgataacgcgcttcgagtccatgagctggccgggaagcatcagatgccgtacgaccaccccgtgttgcagcaccccctcttcgccgtctatgcccgtgccgagcgtgtaggggccggcaacctcgtacatcgcatcgagggcagcgctcgcggcctgcggataatcgcgtgcggcagagtacttctgggcaagctctggcgaggcgtacttgaagtccgtcaggaagatgtcgacgtagcctttcagctcgcctatgacctcggggttctcgtagccgctcgtgttgtacacgactggcagccccagaacgtttggcttgaactgccccgcaaagtccgcgggaagattatcgggatcgggcagtcgccctgaacgcgcgaggtcgagcgcctgcacgatctggacgacgaagtgcgtcggggtcacgaggttgatgttgagcgcgccacgcgcctgctgctcgaggaaaatctgcgccaggcgctcgacggaaacctcgaggcccaccttcccgagcgagatctcgcggttctggcagtagacgcacttgagcgggcatccgctgaaaaaaacggtcccgctgccggcatccccgctgatgggaggctcctcccacaggtgcagcgccgcgcgcgcgaggcgcacacgatcggtctcgccgcatacgcccgatacgcccgcgcccctgtcgctggtgcagcggcgggggcacagtgcgcaggcatgtagatcgagcgccactagccttccagcttgtccgtgacgatcttggaaatgaccttcgggttgccctggcccttcatggccttcatgatctggcccatgaaaaatccctgcaagcccttcttgccgtcgcggtaggccgcgaccttgtcggggttttcctgcatgagctgctcgaccagctgctcgatggcacccgtgtcggtggtctgcttcatgccgtgctcttcgacgtaggcctcggggtcgacgtcatcggcgatgatggccgcgatgacctccttgccctgtttggacgagatggtatcggccgcgagaagtttggcaagcgatgcaaggtgcgcgggagatgcggcaaggtcggcaaccgtcgcgttgttctcgttggcccacgcgctcaggtcgttgagcaggatgttggcgagcttctttgcttcgccgtcttcgagcccctcggcagccgtgtcgaagagctcggccatggcgacgtcgccggcgatggcggccgcatcggccttgggcaggccgtgctccgcgatgaagcggtcgcgtttctcgtccggcagctcgggcagctcggcgcgcacgccctcgatgaactcgtcggaaaggtcgaacggcgcgaggtccggatcggggaacatccggtagtcatctgcggtctccttgacgcgcatgacgatggtgcgcttggcaccgggctcccagtggcgggtctcctggtagataatgccgccctcctcgagcacctcggcctggcgacgaatctcgtaggcaaggccgtcgtgcaggttcttgaacgagttcatgttcttgagctcggtcttgatgccgaactccttggcgccgcgcctgcgcagcgacacgttgccgtcgcagcgcatcgagccctcttccatcgagcaatcggagatgccgatggcgaggtaaatctggcgcagcttctgcatgaacaggcgcgcttcctcgggtgagcgcaggtcgggctcggtgacgagctcgatgagcggggtgcccgcacggttgtagtcgacgagcgaacggtcggcgccgtcgatccgcccttccgcaccgcccagatgcgtcatcttgcccgcatcctcttccatgtgaatgcgcgtgatgccgacgtgggcaacgtagccaccgtctgcgtccttctcgatatcggggcgctcgagcgccgccttgccctcgacctcgaggtcgagatgcccgcgcatgcaaaatgccacggggccctgcgtggtctggaagttcttggccatatcggggtagaaatagcccttgcggtagaacatcgagtgcttctcgatctcgcagttggtggcaagacccgccttgacgatgctgcggatggcgtccttgttcggcaccggaagagcgccgggaaggcccaggcagaccgggcaggtatgcgtgttgggctcggcgccgaactcgattgggcacgagcagaacatcttggtgtgcagggtggtcagctcggcgtggatttcgaggccgatgaccgcctcccaatcctggaggacttcttcgagttccttcatcttatgcggcacctcctctgacggcgagcgtgggaaccttcctgaccgcctcgagcgccgcggcgacgcgcaggatgatgtcgtctctgaactgcgggccgatgatctgcaggccaacgggcatacccgtctggctaccgaaggcgataggcaggttcatgccgccgtttccggcgatgttgaggctgatcgtgtagatgtcggaaaggtacatcgtagccgggtcggaaatctcgccgaacttgaacgcggtgcgcggcgcaacgggcatgacgatggcgtcgaccttctggtaggccttgacgtagtcttgcgtgatgagcgtgcggacctgctgcgcgggatagtagtacttgtcgtacaccccgctcgcgagcaggtagccgccgagcatgatgcggcgcttggcctcggctccaaagccctcggcgcgcgatttgtcctcgcggtcttcgaggttcttgccatgggcatgatggccgtagcgcacggaatcgaagcgcgagaggttggagaacgcttcgcacggtccgagcacgtaataggcgctgatggcggcgtctgcatgcggaagctcgacctccacgaggtcggcaccgaggccctcgaggtctttcagggcctggtcgaaagcctctttgacctcggcgctcaggccgtcgagctccatgagcgcgggcacgacgccgatcttcatgcccttgatgcccatgccgaggttggcggtaaagtccacgttgcattcctggctcgtgcagtcgtgcggatcgcggccgctgatggcgttgagagtctcggctgcatcggcaacgcagcgtgcgaaggggccgacctgatcgagcgagg

SEQ ID NO: 880 - DNA, 24119 bp, Unknown
  16S sequences of unknown bacteria
aatatcctttccggtgtaggtctttccttcgacatcaaatgacagcttagcctcgtacttccagtcggttgtgtagccttcgctgtcctttatcgggattaactcgtaatccttaacgacagcgctgacctcccgcacgtcgtcggagtttttgtactcattacttgcgatcctgcttgagacaacgccccagacgccagccacaaacaaggcaagaaagagcagcaccgccagataagagtatatgtctttcttcggggttgtcgtgttttcactcattatgactcctcctcttcagagtcgggcagaagggacttgagaagttcgcaaagagctttctctttccttccgtcgtatttcacgggtatactgccgccgtccgatgttttccagcatacagaaaggcagctgtcggtttcgtcgtatatcgcttcattgcagtgccgtaccgggggaggactgtgtctgcactcccggaagcacctctcgatactatgccgttgttcatcggcaagcgggacatccttacgctcgacgtgtctgtcgttttcagggacgacatattttccggagatgtaacagccgtcctcgtcacacgacaggttgaagacgaagcactcgtattcgtttgacgcgctctgtccccagttgagactgtaaagcacagcatcataggggatctccggcagtccggttctgattggtgggatttcctttttcttcccgtgccaatccatgagcttaatcatatcggaattccgccggagcagaacacccgccgctccaacggcacacaggatcggaatcacagacagtataatgaccggaaccttcaccgccttgtttacttacggtcgttttcgtcgaacagatcgccgcactcagggcagaacttcggcggatgagtcggatcctccggttcccaaccgcacttgtcgcagcgatagagaggagcattctcaggcttcttagaaccgcagttctggcagaacttgcccttgttcacagttccgcaggagcaggtccagccgtcgtcagccggtttcggagaaccgcactctgggcagaactttccggtcgccgtagcaccgcatttgcacttccacgcgcctgcctgaaccggctcgggtttctttgagccgcactcggggcagaactttccggtaacggtagcaccgcaggagcacttccagccttcagccgcgggagctgctgccggtgtctgctgagcctgctgctgtcccatcgcgaacagattctgcgcgttcattccgccgcctccggcgttcatagccatgcccattcccatgaatccggtcatagcgcccgctgagtttccggcagcggtcttcatagcgtcagcctgtgcgccgacgagcgtagccgcagccatggtcgggtcgcgcatgatagccgtgcgctgagcctgcttgatgagttcctgatcctcttcggggagagtgactgtcgacagcgcgatgctcacgaccttgatgccgcggagcgaaccccacttctcggagagcgactcattcatcgcgttttcgaggtcggtgttgtgcgacacgatctggttcggacggagctcgagatcggagagctttccgaatgccggttggagggcggagatgaactcgctcttcagcgtcgaatcaagctcgctgcgttcataatcgctttcgacgtttccgcagacgttcttgtagaagagcatcgggtcggaaatcttataggaatagacgccggcacatcttatcgagacgtcgatatcaagtccgatcttagaatcgactacacggaacggaaccggatttgccgtgccgaacttgttatcgagaatttccttcatgttgaagtagtaaactctttgatccttaccgggatcgccgccgtatgtaaagcgcttgccgactactttgaatgtttcctttatgctatcgccgagatttcctgcaaagatcgacggctccgtcgagttgtcccaggtgaactcacccggctccgcgcagaactcaacgattttgccctgctcgacgattatcatgcactgtccgtcagcaacggcgatgcctgaaccgttcgagatgatattgtcatttccctttgtgtttgaggaacgtccgctcactcgcttctgccccttcttaacaagtacctccttaggtatcgactcacagtagaaaaattccttccactgatccgcgagagttcctccgagcgcaccgattcctgctttgataagtcccatagttatttctcctttcagaatttcaaataataatatgatttgaatgtgttatcatgagcgattttatccctcacccagcacaatccacttgtcgtcaataacatcgtacacatatatctgagttttcgaaacaccataaagtatttcctgtacgaaagaatcttcattgttggttccaagtgcgaaaataagacattcgtctccgtctatctcttccttgtcgcccgtatacatcagtgacatacccgactctatatagttctttacttcgtcggtttggagcagcaactcacgagctatcagcacatcgtcattttcatatgagtaatcctgatacaaagtgagatccaaacagccatccgtgtcggcgatgtgaccatccttcaatgatattaccggacggtaatcgtagctttttccgtccttttcgagtctaaccaacgtatccgggaagatctcgctgacattgcagcgcagaataatggactcgtttgcctttgtctcgtataccggcatgtcagtatgatcgtcatattcggcgttttcgctcatggtaaccgaatataccgtcatagaccatccctccgcaggcacaagcgcgtatatctcctgccctccgcagtctacgatatcaaccgattcccgaatgaagggatactcactttccaaagaactcttcaacagattattgatatcatctttagaagcgtcatattcgacataaccgagaaaagccgtgccgataatacattcctcgtcttttagaagcttttgtattgaagataaattctttttttcatcaaccgaacttgtttcactgcctggttttgtttctgcgacagaatccttgcgtgtgtctttacagccgcaaagcagcactgcaagaagcatacaaataaataatgttctcattcttttcataacatcactcctgattttcaagacttgttatcactgcggcaaggaaattttcacttaccgatgtaaatagtattgagtctgcatatccggattgttttgctttgactatctgatcggcgagctttttgtctgcatcaccgtcagtcatgaatattattttgcattccggattgtttttctttattttgtttgaaagctcaagcctatcattaagcatccaaggagaatatccggttacttccattatcacaactcgcggcttgtgtatctcacagatatcttttgtcagatttggagttttcgatatgatgatctgatgattatcaagttcctggagcatggcgcgttcaagcagtcttgcatataacacactctgcatatctaaaacaatcactgtcattaaaattttcaccacctttttcagtatacggaaaatgacagattcacataccgtatattgttttttacattgagtagcttacgcagaaccgtgttagcgcagttgcaatcatgtgtcttagcgctttgtcaaccggagcgagcattccttcgacttcttctattattcctttcgagtaagcccacgtcatggcgtcaagtgcccatgaatcaatcttagaagcgtcagattgcagaagcttgccgtatgcagggacgattatattgcggctctttgcatatctgtagaggaaaactgccagctgctcacgcgtgataggatcgtcaggtccgaagcgaccgtctccgtagccgttagtgatgccgtacttcacagcccacgcaactgcgtcagaataccactggtttgcgggaacgtcattgaattcacttgcagccgctgttgcaggagaaccttcaagtctgtagagaacagtaactatagcagctcttgtgagattgccttttgggtcaaatgaatctgcgctgacgccgttcatcaatagcgggtcgtgattgttggcataccagacgctgccgtaataaggatctccgggaattacatccttgaatggaagcgctttatttttcggaagaagcagacaggagaacacaagtgaatgttcgtctccgttgtcgttcgctacacatttatagtagaacgttctgtacatattttcatcctttataccggatatcgtaagtgatttaccgctagcaaggattgtgtctttgttgattttgccgtccttattgcattcataccatttgagactgacgttcggagaaaagttctttgtgtttactttgaagctgaatttttcctttgaactgtatacaatgacatgctgattggttttttcatcatatttcagcttgccgcttccgcccgatgtgcttccgcctgatgtgcttccgcccgaggtgcttccgcccgaggtgcttccgcctgatgtgcttccgcccgaggtgcttccgcccgagtttttctcggtgactttaacaatgacagaatcggggattgtcgttagtttgctcttctcacccatgagttcgcacgaaacctcgcagtaatagtaagtcgttccggctttatcggttggaatattgagtgtcagagactttgcaccgctcaccgggactcctgagccgtaagcggaggaggtagacttataccactgtatcttgaggttggtggcgagcgtgctgtcaatgttcgtcgttacggtgacagcagcattgtccccaaccttaagatcgtagctggtttttgagtatgaaagctcaagatcaaaatagttgtttgtgtgctgtccttcatttgtttctgcggtctgtccctcgatatcctcaggagtgaaggtcgcggtgatgaatttctttgtctcgaacttcggctttcctccggtgctttcgccctctatcacgagaaccgcgtcctttgactctatgctgaagctgtagttcgtctcaatgtcgtcagtccagacatattcaggctcaagctctatgggaatcttgaccgtgtaggttgtacccgatttgaaggtcttgtctgccggagtccagatgggatctccgtagattattccgttgtcgtcgctgtcgatataatttctgtcgggaactctcgctccgaccttaagcatagcgtcgccgctgaagaagacagagccgctgtttatataagcctgctcactaaagacgccgacagttaccgggaaaacatagagatattcgtcgcttcccatcgaggaggtgcggattctgtactcactcgtctgtccgttccagacagcatagctgccatccgcaaaagtgaagccctttggaatcttaacctgtaccccgacgctgatgttatcgcccttggatacttcgttgatttcctttcgtaacatctcgtaccggaccttcgtaaccgttcctaccgatgcggttgccgtgcggtcgagcggctgaccgtgagtcggaacgtcaaggttggtgatttcgatttcctttgcctcgccgccgattgtcaccgggaagtagaagaacagcgtgttgcctttcttgtacgtaaacacactcgcatcgaccttcttgccgttgacggttacattgctgagcgcaggcgaccagtaaggctcaccgtcatccacccagccgaagtagtagggatcggtgggttcgagctctactttgatttcagcctcgacgccggcatagtaatccgggatgatctcgtcgtggtgagttccggcagcggagatctcgaaccacgctctgaggaactttgcgccgtcacccttggattccaccttgagttccgggaaaggctttccggcgacaaagggctcatcgtatgtgattttgatatcacctttaaacgcttccttttccttgacggtgatggtataagaattggaagaactgttactgccgtcgaaattaccgtctacagtgccgtcataataccgccagtggtggtacatcttcagctctccggtttttatatactccacggtatcgttggggtatatgatagagcgttctgtgatggtttttccgttgatcagcaccatcgaggggtcgctgaatctgtaggagttggacgccgaatcgtagtcattcgctgcagtgaccctcggaaacgggtactttacgccgagataccgggtaaccgtatagtcggttgccgacgtcatgacgctgagagcacctatgatgaccgcagtcattacggcgatgatgaggagctttacggttttgcctgcgttctttttcattttacgtttctcctttgtaataatatattccgttcactgaattatccggtcttatcagtcggggagacgtacgattatattgcaattctattataatgcatattttggctcttgtcactgtcaaaagtgtcagttgtttcggttaaaacaaaaaacctccggagtatttccggaggaaagttatcatttcgtatcctggagcgtcgttactaccagcttgttctctatagccgtggcgatcagctcttccttgttgttgaatccgcctttttcgatcatatcagatatgttccatctgactccgctgacagacagaccgaatttatcggcaatctcccggtaggtgaagccgcgtatgtagtggcggagtatctcgatctgtatcggtgagatatcgcctgagagcatattcttcatctcgacagagggagacgagcccgggaaaatacgctcgccgttcatcgtccgtattatcacgtcgagcagctcctccgtgccgtgatccttgtaccagaggctgtcagccgcgccgcgtttcgcctcggaaagcacattcgggtcgatgagcgaggttattatgacgatctttatgtgcggataccgctcctttatccgttttcccgccgcaagtcccgagtgcttgtgaagggtcaggacgtccatcagcacaaggtctatgtctgtcccgcagcggctttcgacctcaaaggcgtccctgaagatacccgcgacgctgaaccgctcgtcagacccgagtattgcggagaagtgcttctgcatatagctgtcatcttctacaagtatcgtgtttatcatatgtcctcctccgttcccggcagattgagcagcagcgcgaatctcggagagtgcgcggtcagcatctcaccgcccgacgcctctattcttcgtctgagagacgagagaccgcttccctcggttatctttcctttcggcttttcgccgtcgttggttatcgtgacagaataaatgccatgccgcgcctgaatgtcgaccgcgatatatgttccgtgcgcgtgtctgacgcagttggtggcacactcgcgtatcgccgaaatgacgatccgctcgagccccgagtccttcggcagatagccgttcaggatcagcctgacgccgagcttttcacagtttctcatctcgtcagcgatgtctccgtccggcggagttggtgagtcagagagtatgctcacggcttccttcagttcagcgagcttcttgtccgcctcgtccgagttctccatgatgtcctgaatcgttatgagactccgtcccatagtgtcgtgaacccttaccttcatctcaaggctctccctttcacggatgtcgtcggtcatgcggtcatacatcgcgcggagttttcggttggtctcggcaagacgtcggttttctctttcaagatgttcactcacatggtagagttcggttatatcctgagcagtcatctgccgccagccttcctctccgctgacggttatacggcttgagttgaactgtctcacgttgccacttggaaagaagaatatcccgcttgatgaccgttctccgtccggaccgggaggaaagagcaccgtgtcgagctcgccgatcatctgcggataggaacctatcatcatatatgaaagctcacgcatcgtctcgttgcagaggattattcgtcctgccggatcggcaaagcagatccccatcgtgacgtcatttgtcgcctcacggatggagtcgggggtgatgcgttcgaaaagccgtctgcgctccatgggtatcacgacagaaagatgaacagccgccagaatcagcagaacagcgaccggaatccacggaagcccgcacagcccggtatccgcgtcaccgtcctgcgggaacagtatcagcgcggagaacaggatgaagaacgaaaggagggagaccagcttctccgtgaatcgcaccgaacagtatgctttatatatgagtagcgccgcctctcctgttaccgcagcaaagagcatcgcggcgaacattgagcgcagaagagggggcagtgtgtaaaaagcgttcattcttcacctccgtccgactcgagcggcaggatcagcgtctgctcgccatcgtctgtatcaatttccgccgaagggtacttgtgctttatcgccgagagatcttttcgggtgtcgagcgagactgtgactcgaagaagaccgtacggacgcgtcagccggacattgacagcctctagctctccgacggtctcctcaacgcagtcctcgaaaaagtcgtatgcgagagccgccgctctgccgttcagcatcacagcatcgacaaaatatgtcccgcgcaccgagagaagtccgagcgcccgtatagtctcgccgaacgcgttctccatctctgccgccggaatgtcataattacggtagttcagcagcgcgagatgccgccttcgttttatgaagccgcaaagcaccgcaatccgcgcgagtatcctccttgactcgtccgagttcttgtcagaagcttggtactcgtcgaccctgacggcaatcttgtctatctgttgctgcgtgacgctgcggagcatatcgtagagccggttttcctcctcgatttcccttcgcttcttgtcgcgcgtgtattcgtagcggagaagtgaattacgctcctcaagctccatcttgatttcccgcgtctcggcgccgcgctttattagttctgacacatcctcggtccagatggcgtgcccgccgtttattggtatattgtagagaagccggtgatccgggagaagtatcggcgttttttcggacgagacaagcgtttcaagactgaacggctctgcgtcaagtgccgcgtatcggacattgtaatcattgtcggtgatctgtgccgagcagccggtaaccgcacggaaaagttcatcgtatcgcatgttcgaagcgatgagtctgcattgtatgcaaatctcgaaggtcagagcgtagaggatactctgtatcactgtaagatcgccgaacagtgtcatgaaccagtcgtacctgttccagtaagcgaatacatatactatcgccaacgccgacggtataaatggcatgatcatgagtctgtgtgtccgcgggatcctgcatttccgaagcatcaggaagagtgccagaagcgcgcaggtaatctgccaagacataacgatgtaatagactgtcgcatagctgtattccttgtcgctccactcaaagaacctctgatctgcgggaaagacgaagaccttctgatgcaggtcgttcgttatcacgagaatgaagagaagcagtgtcacgccccagagaatcaatgttttcttcggaatccgccagtcgatcggctttccgagcgtcagcgcgatgatcactccgcacatcgggatgaacagcatgggaagatagtagagataccacatataccgggcggcgaaccgtatcgtcaatatgtggaatttgagcgtcctgacgatcagccagaacagtatcagcccgtcaatgccgataagataccggcgcaccatcttatgtactatccggcgcttcagtgtgatcccccacgcgaagaagagccccatgtacagaatcgagcgtatgagcccgagcggacgaacgaacatcggcggcagaatatcgttctttgtgagctgacggcagatgaacgctgagagtattgtcagaaatataactaagagcgtcttgctgtatttccgggtaatgccgtttgcggcgtccatccgagaatcatctcctttctttcttgaatgattacacgagtaacaggacgcattaaaaagggattgatttaccacctgcaagattggtgttttacaatgagagcaccaatatacttcaacaggaatcgatcccgcaattctggagagcaagctttaggcacttcttatcagtaaaagcgcattctataggtgcccattctaatgccgttgagatcgttttcaagagctttttaatggtgatgtacttttctttttctgcatctgttccattaagcgaatagccgtccattatagaggaacagtccgcctttgagaacaaggttttccgcatattttgacttttccaggcggcgcaggaactcttactggcaaaaaagctgcaagcagagctgatagctcctgccgctttttgctgctttgcttttgagccgctcgagcacggatgcagccacatcagccattcagcagcacctccatcacactcatcattttcttatatacgcctatttcctttgcgtatttggaaaggttagcgaggtttttcttctcatctgcagcataagcgttgacggctttgttgaatatctcgttatccatcttcgtgcggtacttgaagcagtcgcagacagtgcgttcacggtcataaaccggaagcgttacaccgttgaaggtaccggttgtttcccccaagtgatacatcggattctgcacataatacgcttttaccggcacttccgcctgaatcgcctttaccgttctggaataagagcgtggaacggcaatcgaccatgctctgggcgcaaagtcgctatagccgtagtaaaacagagctgattcaacgcagatgaccccgtgcgtcatcagtttcgaaaggataagctcctctttgggttcgtccccgacggctaacatgtaatacccttttttcatacgctcgatatagccttgcttaaaaagagtatatatatcttggtctttgagtccggcagaaataaaatccgatttctttgcaatttctccgatggcatcaaagacttcgttgacgatatcgtacctgctcaacctgtcaccaactttctgcacgcaatatttgcattatgcgtgtttatattataacacttcagttctgaaaaatcaatatgttttgcacgctttttaaaaatactgcgtgcggattttgaagaacagtattgcaattcaaagagcgctgcgctatttatattcatacagattggttttgcggcaatctatcattcgtgacaacacaattacaataggaaggtattttaatataatcaaacgaaaaaattgtcttgtttcctgtattctacagtggaggatacgaaattctgattcgggtttacggtgaagataaggataaaatattcaacagtctcaattttcacccgctatataacatcaccgaatccgatatgatagaaatcgatcgctttgaaaaagaaatcggtgtaattatttatgaaaaagattgacttatacgcaacacgctatagctgaaaataggatatattatcaacttgcctgtctttttttcatcctgcgggaagtctgcactattctacggtaccgctcagccaatgttacccgtgaagtcaaagatgaacctcaaagcactttactgattattgtaatgtattttatatgccttattgggaccagttaattcggcaagttgaaacagttttagaaaaaatggcatgataaggatggtggtacacaaaaagattatgatgacaaataatcgagacgttgagcgtagtgtgatacagataatctaaattacaaacctccgctattgatagcaccccctgatagttttttgatagcagaaagtcgatacccccataggatcgggataactggtatcaaataaagccaaatggaatcaagcggtctatacaaaaaagtttagagcgcgttttcacttggcgagtgggaatgattttcagccgaatagtagagaataccatcccactctcgagcttacccttttggggtccctgaagtgtttggaaattgccttcggcaagcgggtaatctccgttctttcggcttggatttaatgtgggaataaacttaagctgagtaggagagcgaaccatcccactcccgagcttaccgttttggggcccctgaagagtttgaaaattgcctatcggcaagagggtaatctccgttctttcggcttggatttggcgttgaataaaaagaataatccccgaagtccgcataaatagtggattttgggggattattttaccttttgagtgcattttatgcttttttgctttcaatggatttcaaagtttcgccattatcacttttccatgcctgcggaccacttatgctatatcctaccgcaaaagctgctgccgcagaagaacttgcaaatatcttatcagattgcaatgtatcatcaacaatttcgccatttgctctgctttgctctactttcttctttatccctttagccagcgaacttgcagattctttatgtatctttgagcctttcagcaaaacaaatccatctgtagtttgtatgcaatttgcagttccgtttgcaagcttcaagtgatatatattttgcgattttttagactgattgttggaatcggaaaccttttcaaataccttgtgtccaagagcatttacaagtatttttgcattatatataaactctgctaattcagcttgatctgcctcggaaactgttgatttagttggtatattagaattatcaatcgaatatctgccggattcggttgctatcctatgaaattcatgctcaagatatttgatatgagctttattgagattatcgtctttactaataaaagcaataacttcgttccaattgtcttttcttgcaatatgctctttcaagcgtttaattatattctctgcttctccaacatatatgagtggcttttctctatcatcgtcatagccgaacaaaaaataaattcccggtgaggataattcttctctgtcttcactttctttaaccatatttcttgggattttatatgctacacctgtccagtttgaaagttcacatatccagcgcttattgggacttccatctaataaaaacaactttataactttgccaaaagccatattgctaactcccttgattaacaattgcagtcatcttgcaacattaattatacataaattaatggcaaaaatcaactaagagttataaatttgaatatcaattttccccaccccataaccaaaaaatcaccgaatcagtctcattttgactaatcccggtgatttttctttaaaatttcgttccgccgccgccgtgggttgttccggatgaagaaacgtgcgtgctggagcctccggagctgctttcgcgtactatttccgtgcggctgacgttgcggtagaggtagatatccctctcggacttcactttaatgctgtcctttctcacatagcttccggcggcgagggcaggacggacggttttcagctgtgctttcatcgttcctactatgatgagcgcgcacaccagtcccatgataagcgacgccatgagccacgtgaagttaaaaaatccgcttctctccgagccgtagtagtagtcgccgtcattgatatcgtacggactgccgtttttcgccgcggttatgtattcgtccgcttcggagatgaacgagcagaacccgccgtagtagtccccgtccgagaaatatccctttacgtcgtcaagcagggtgtctattccgtagtccgtgaacgccgtgattccgaatccgcaggtggatatgtaaaggtcgcgcgtgttcattgccacaacaaggattataccgtccctgtcttccccgtaaccgtagccgttgtagtcgtagtaatcgtcggcgtaagccacaacggagctgtacccgtccatgtcttcggtggtgtgtattacaacgtcaaagctctgtctttcgctaagctcgtcaagtcgcgacagcaccttgttgtattcgtcggaggagaggagagccgcgtcatcctgaagtcttgcatacgggctgttaaatccgtctcccgactccgcgcacacgggaagagttatcgagaggataaagaagagcgcaagggcaagagtaaagaatctttttttcatgctcacgcctccctcatataagtcccgagccgaacaggaagtacattagtaggtacacagcggctccgattccgagcgtcagaccgagcgtccatcttgctgctgctccgtgatccacgggaaggtcgcctataaatttgcccgtctgtccgttcatcgcgaaggtgtactgcttgccgctccatgtcgtgttcaacagccacacaggatagagcgcgtattttacgtctcctccgtgcagggtgatgctcgagcttcgcggagttacggtggcgtatccgtcgacagtcgaagcaaaggcagaataagcggagtttttcactctctcgttcgccctctcgatgctttcttccgcggtcacgtcatacttgtcggcgaaaaatcccgcgagatatgccgtgcggaagtcgacagcctcggaaaaatcgtacggttctatggattccatgaggtcgtcgggcattttcttcgagccgtccaccggaatatggtcaaagcctatgcttccgcttctcgacacgaggaaatgctccgtctcggtgtagttgtagtctctgtcgctccaagtgcgtactctcgtggcgttgaaggtgaggtccgcgtcggcgtcagagtcaaacagccagaacgggacgtaaactccctttatttcgtcaatgtggttttggtctttaaatatcttcggaaggagcttcttgcccgagaggtgtctctccagtcccgccttcgccgcccttttgtcgagcttgaacgggattacatagtcaggtcggagctttcctgagagcttgtcgagcatgacgacgggatttccgcaaaacgggcatgatgtggctgccgttgtagcttcgcacactatctcgcctccgcacgacgtacacacatacgatcgcaggttcgcggcttcatcgtcggtccactccttgccggagcttatgttccagtcgatgtcgtcctttttcgttgtctcggcgttgaagtccttcagcgtgtcaatgtcaaattccgtgtcgcagtaagggcatttcagcttctgcgccgcactgtcgaaagcaatcgctcccccgcagcacgggcatttgtattcctgtattgtgttactcaaatgtgttcctactttctgtaaccgacaaatcgaatttgtttattgagcgtcgtcggcgttaaagggatctccgcattcggggcagaacttcggcggctttgtcgggtcttcgggagtccatccgcacttgtcgcacttgtatttcttcggagcggtaggtttcggtgagccgcactcggagcagaacttgcccttgttcacgtgtccgcacttgcaggtccatgtttcgctctcgggtctgggggaaccgcattcggggcagaattttcccgcagccgtcgcgccgcacttgcacttccatgagttagcggaggtattctgagcgccgctagtatttgcggaggcgttctgctgattctgctgtcccatctcaaagagagtctgcgcgttcattcctcctgcaccctgagccatgttcatgccgacaaatcctgccgtcgctccgtttgcgttagatgcagctgccttcattgcgtccgcctgtgcgcctacaattgttgcggctgccatagtgggatcgcggtacattgcgttcttctgcgcggtcttgataagctcctgatcctcttcggggagggaaacgttcggcatagctatggacactaccgaaataccgcggagcttgctccatttttcggagagagccttgttcatcgccttctcaagatcgggcatatagcgcggtatctggttgggtctgatttcgaggtcggagagttccgcaagagccggctggagagcggagacaaattcctgcttcagcgttctgtcaagctcttctctgcggtactcgtcggaaacgttggagcatacgttggtgtagaacagcatggggtcggtcagcttatacgaataagatccgctgcaacgcaggttaacgtcaacgtcaagtccgatacgtgagtcgacaacgcggaacataacgggaggtgcagtgccgaaaaggttgccgattatttccttagtgttgaagtagtaaactctctggtcttttcccgcgccgccgccgtatgtgaagcgtttgccgatatttttaaatgtctgcttaatgctctcgccgaagtcgcctgagaaaatgctcggttcgcttgagctgtcccatgtgaattcgcccggctctgcgcagaactctactacctttccctgctctactatcatcatgcattgaccgtcggcgacagcgatgcccgaaccgtttgatatgatgttgtcttcccctcttgtattggaggaacgtccggaaacgcgctttctgcccttaacaacaagaacgtcgttgtcgatagaatcgcaatagaaaaactctttccactggtccgcaagaactccgcctgccgcgccgagagctgatttaataagtcccatagtaaaattcctttctattttatgtctttacaggcatattatatctcattttcgcgccgaagtaaatcacttgaacgcatttttaattcttctgagcgtatttttaatgaagtcttaatactaaggcttcctcgtcaatgctccgccgtgagctttattattttgtcgatgttgtcgtccgacgccgctttgtttctgcgtatcgcgccgcattttctgcatttatgcgtgattatgtagccttttttcgggtcgggttctgcgcctatcgcgtccattattcccccgcagtccgcagctctgtccccgggattaacgtcaaggtgaagggaggctaagcatttcgggcagtgatttcggcaggtataaccgagcggctcaacctcatatccgcagtttttgcagacgaagctctcgtctattttggtaaatctctttttttccatctcattcctctttttttcctctcccgatgaatattttattccgcgcggaacaataataggcgtgcaaaaacatttctcaggaggaaatttatatgaaaaagctatctctttctattctcgcggttttactcagcgtatgtctgctctttgcgctctccgtacagtgcgctgcggcggaggtgatgggaaaccccggcatgggagcaagcgaaaactctggcggcacaaattccgcaggcgaaaatttcgcaggggatttaaacaacggttttatcgagggaaatcccaacaatccgaacgacggaaacaacggaagcgggttcacctccgacaacacgaacgaaagcggaaatgcaaacggctcgtacaacggtggtgtcaatgggaattccgctgacgacaatggcgctgcgaacggcgttaacaacggtgctaacgaatccacagctgcgcagggtgaaacttccgctgcggttgacgggaacacagaaacaagctccggcttcagctgggttatgctgctcgtatggcttgtcatcattgcggcggtgatactgctgattattgcgcttataccgaaacgccgcaacgggtaaggtagaaaggacgctgccctttcggaatccattgtttccgcctgcgggtgggggggtgctcctacgcggaggtgcgcactaacgagcaagctcgttctgggatatcaaacgcctgccccttgcacttactaagtaagtgcggcgttccctccgaaagggcgccccacgcgaagtggactaatgaaatcgaaagacgtagtctttcttctatccttctcacttaaaacctaagtgaaccccaaaggctgtggtatcactcccgacatctccgcagccttttttatatcgccgcaaaccataccgccccgggatgtacctccgccactacggcttcctcacgccctgtctcaatgacctcgccgtcgagacatatcatttccggtccgactatctccatcctgcggcatttgtagtagtcgatcacgtttttaaagctgctcctcatactgccgtcctcggaaatgtagtcgccctttttgtagtttccgactatggaaataaacttcgcgcgactcacgtcgtttaccacaagcacatccatcagcccgtcgttcagcatggcaagcgacgccgcgttgaatcctcccccgcagtatcttccgttggcacaggcggtcagcagtatgtttttctccatcactatgtcttcctgcggcgcttttttgtcgagcgataccactcccgagagctttatcttcgccggaattgtcttcttcaccgcaagtacctttaacactcccgctatgtatgccgcaggtcctttcaaaaacggcttcttcttcagcgtgtacgtctccttcacgacagcgcagtcaaagcctatgttcatcatgttcgcaaagtagtctctcttcccgccgtgacttaccgagatgaggtcgattttgttcagctccgccttcttaaatcctgccttgtcgtttgcgaatgtcgaaaaatcgttgccgcttcccgcgggaaataccgaaaacgatgccgtagccgcagctcccgactccattatgccgttcactgcctcgtatacgctgccgtcccctccgtacacgatcgcgtgcgcaaaagggtctttacggaacaggtcggctacaagagctcgcaggtgttctcccgacgtgctctcaagcctctcgtccccgcttttttctatcgcgctgacggcggcagagtagtattttttacttccggcgttcggatttattatgtgtacatggcgtctttcgctgacgttcggcaaaactatcggtgcggctgctttcattgatttatcttccttttaatcagttttgtttttgtacggatttgtattcgtcgtagaatttgtaatacggacatgagactctgcggtcttcacgctccctgtatgcgtcgtcctcgtcaacgtcaaccacacatccacagtctccgtcctcgtctatcacgtcgtagtacgcgcaggtgtcacacccatgtggagcatttttcatcgcttgttttctctcgaatttctttatctcttcgcttttttccggtgtgttcattgtgttctgtctctccttgccttctccgtcagctcacgggcagtgttttcgcagcttccgcgcattacatcgtcaagcagccttgtaagctcatgtccgatgtccgcgcccgcatatcctatgctcatcagcgtctttccctcaactgcgaggtcggacagcttgcgcggcaggtttttctcgattatctccgaaatcatctcacgtaccgcggcgtattcttcatccgtgataactccgcgcgagagctgcatatcggtgagcgagagtacaaagccgtcgtccgtctcggatatcagccggcgcacctcgtactccccgtcaaggtaatttctgtagttttcgtattcagagtagcgcagaacggcgtttttctcggctctcgacggcttcatcgagcttatcatccgctcctcttcctttgcgtcaagctcggaaaacagcacggcatatctcatctccgcgtccctcgggcatctctcaaccaaagcagccgcgcggcatatcatctcttccgtaagcgcggggaaaatgaacgatatcacctcgggaaaggtcgacaaaatccggcgcgcaccctttccgagaagaagctttgtcgtctccgtgtatatcctctcgcgcgatatcttcccgagcagtcctctcagccgccgcaccgaatccgcacagtccgcgtcaagctcaaagtcaagcacggaggcaaatctcagcgcgcgcagaatccgcagtccgtcctcgttgaacctctcgtcaggcgagcctacacagcggattatgccgttttcgaggtcgctctcacccccgaagaggtcgattattccctttgtttcggagtaagccattgcgttcaccgtaaagtcgcggcggcacaaatcaagaccgagctccggcgtgaacgtcaccttgtcggggtgtcttccgtcagcgtacgagccgtcaatgcggtaggtcgtcgtttcaatcggcattccctcgcgcagtacggtgagagttccgtgcttcagtcccgtttcaatgatgcggtcggaagaaaaaaccttcagcatttcctcgggctttgcggaggtcgtcacgtcataatccccgggagtttttcccatgaggtgatccctcacgcatcctccgacagcgtaagcctcaaatcccgcgcagcagagcttgtttatgacgtactcgacctgcgggggtaagtatattttctgcatattatttcctatgtttagttattcgttgctcgccgattcaaaatgagcgcagtattcctttatcggacattcgccgcacctcggacctcgcgccatgcagtattccctgccaaacagcaccattctgtgacagtacgcagtctgctcttccggcggaattattcccgagagtatcttctctgccttcgcggggtctttcaaggcttcgggataataccccagtctgccgtttattctgatgcagtgcgtgtccgccacgattccgggaatattatatatgtctccgaggactaaattcgcgatttttctgccgactccggggagttcaagcagtttttcgagcgaatcgggtactttgccgccgtactgctccgtgatgattttcgcggctttgacaatgctttccgccttcgtatggtacagtccgcacggctttattatccgctcaacgtcggttatgtccgcctcagccatgcttttcgcgtcgggatatgcttcaaacaggggtctgcaaacgatattcaccctttcgtccgtacactgagcggaaagtctcgccgccacaagcagtctccaagcgtcctcgccgtattcgagtgagcacagcgcgtcggggtagagcttttttaattcttctattatttcttttgtataattattcataatatatctcgtcggttgttttgtcggttatttcatcggatgtagtttcgtcaacatatccgtcggattcgtctgtggtttcatcggtttcgggagtttcgggtgccggcgcccacttgccaatcttaaagtagtagtcgaaaacgtcgcgcacggagtagccagcttctgtaccgccggagccttgttctataacgcaggttatggcaatttcgggattttcaaacggagcgaaggctgccataacgccgttatccgacttatcggagtagacctgcgcagtacccgtcttaccgccgacggaaatctcatatcccgagaagacggacgcggcggaaccgttatccataacgcccttcatgccttccttgactaccgacagaatctcgtccgttatgttaaagctgctcagcacctccggctgttttttgtacgtcacctcgccgctcgcgtagtcatgcacctccgagaggatatgacaggcgtatctttttccgctgttgagcacggttgcgaagtaggaggaaatctggagcggggtgaagaggttgtccgactgaccgatagccgcctgcaatgtgtcgccgggactccattcgtcaagaccgttgtcgtttctgtagtccggacctgcgaggatgcccgtcttttcgttaagctcgattcccgtgtgctcgccgaggccgtagtattttgcgtactcgttcatcttttgtatggtgagctgccgtcccacgtcatagaagaaatagttgcacgactcctgaatagcctgaacgacgtttatcttgccgtgaaccttgcccgagaggaggtaaatccagcatcgcggcgtgaaccctgacgaagcgtagtacatatatttgccctgcgcgtcgattatggtgtcctttgtgattatcccctccgtgagagccgcgactgcaacgcctaccttgaaggttgagccgggggcgtatgtaccgcttaatgcgcggttgaggtacggtcggctttcgtcctgcgagagctcagaaaaatcctcggagaacgtcgcgaggttgtaggtggggtaggaagctatcgcgagaatctctcccgtgttcacgtcaagcacagtcattgcccctgcagacgcgtcctcgccggagagaggctttgtggcttccgcgcggattttgaatatgttctcggcaagcgcgttttccgccacgacctgcattcccatgtcaagagtgagccacacgtcctgccccgcgacaggttcttttgtcagctcgacggagacagtgttgccgtaagcgtcctcggttatggtgagcgtgccgtcctgaccgcggaggtattcctcaaacgccgcctcaacacccgaaagtcccacgacggcgtcaagggaatatccgcgttcggtatagtagtcgacgttatcctgaatttttcccgtctgtccgagaatatgagacgcgtagccggggtacatataatcgcgggaagcttcaacggtgacgataaagcctctgctgtatttttcctcgatggcgctgatatacgaaaggggaacgtcctcggcgatggtatacggctggatatacgagtggtcggagagcgtcatatcaaggcgtatggtgaggagcttcgcggcggtttcgtaggtatagttatagtaggtgacgtattcctttgagtcggggtcgcgttcacgtgtcataatgccgtagtaaatcatgagagcctcggcgtcccccgcagcgtcagagtcttcacccacgccaagctctccgaggagttttgagaggcgttttccgcgcgaggtttcaaagaagctctcgggataggaaaattcaagtccgtccttattcacggtgatattgatacttccgcgcggggaggtaagcttatcggcgcagttatgcttttcggcgatggcggcggtatccagaatcatatcgttaagctccgcgtcgtcggaaggctcggtggagtagtcgagggagacgtcgtatgtatatttattcttgacgacagcattgccgtttctgtcgaaaatctcgccgcgctgagcctgtacggtaacgtagcgtttataagttttcgcgggagtggacatggagtaataatcctgccccgacacctggaggtagagcagtcttccgacaaagacgagcatcaagacaaggtaaaacgctcccgcggcgataatacgagaaagatggttttttttcattgcaaagttttttactgtaatactgattttttcttttggcttatcaaatttagtattgctttaatcttttagaaagatttcaagaaagagcgtaagttaatttcttttccttagactacgaaaagcttctaagaaactgcacgtctttcggaaagacgaaggaagaaaagactaacgtcttttgatttattaaatcgactgcggtcgaaggctgctcctacgcggagggcgcacaaggagactcagacgccgtctccttgtgaatctacgctcgcggtggagccttactatatggtttacttttggtgtcgcccccgttaacagaccagtcgcgcgggtacgcataaagtgtaagggtggagcttaaaatgttcgcgcgggagagtgagacgcggtaaatgcactgaattcattcgttttgctttcgcgcggggtcgagaataccaaatcatgagtgaattggattaggctaaccgcggattgtcgtttgtttttctgctgacgtagagcgaacatccaatttcgttttgcttccgtcagcgaactttgaatcaatccagtgcggcagcagatatcgaactacacttgcagtttcaacttcacaagactggtgatagtgtagaaatttaagctgaaaatccgtcaaccaactacagaacacccttggtataaatccggcggttagccaaaatctaagaagaccctttcgccagtagttcacgggggcgaagacagcagttaatcct

SEQ ID NO: 881 - DNA, 6240 bp, Unknown
  16S sequences of unknown bacteria
ggaagccgttacctcgagccagagcgaatcgcgtccgggtccttcgggaggactgtccacggacagctttgcgctgatcggctatagcagcgatgaggccatgagcgacttcatcgatggcacggcgtcgatcagcgagggcagcatgttcgcggaaggaggaagcgatccggcgtgcgtcatctcttcagagcttgcgctgtacaacgacatcagcgtcggcgatgagatcaccttgcaggatcaggatggcacggcggagctcacgcttacggtcagcggcatctatgagcgggaaagcgcgatgatgcaggggccgggcgtggacagcgccaaccagatcttgatgagctacgccgcattggcgcagctggcggaagatgtacagctcagcccgcaggtcagcggcacctatgtattttccacgatgacggactatgaggcgttcgacgccgagtgcagggaattagggctcgatgaggcatacaccatttcctccaccgatgtcaatgcttatgagcaaagcctcatcccgttagaaaatctctctaatttcgcattctggttcttggccgtcatcctgctcatcggcgtcgtcgtgctgatcgtcatcaatgtcttcagcatccgcgaacgcaaatatgagatcggcgtgctgtgcgccatcggcatgcgcaaaggaaagatcgccatgcagttcctctgcgagaacatggtgatcgcgctcatcgcgctcttgctcggctttggcgcgggcgctgtgctcagcgtgccggcaagcaatgcgctgctgcagacacagatcgcttcttcctcgcagcgtgcccagcgcatggatgacaatttcggccgcgggggcatgcctggggatcaggaagggcaggacatgcagcagatggaaaaaccgcaggaggaagcaccggagatgccgtcagatggaatggtgagcgcggtgagcagcgtgagcgaggcgagcgatccgatcatcctgctgcagatggccgggattgccttcgtgctggtcatcctgagcagctcggccacgctgatctcgatcttccgctttgatccgctcaccatcctggccaaccgtgactgaagaggaggatacgcatgaacatactggaattgaaacacatcacatacgcttacgatcggaccccggtgctgaatgatgtctccatgacgtttgaggatggcgcgtgttacgctatcgtcggcccttccggcgccggcaagacgacgctgctctcgctgatgagcggactgaccgccattcaggatggagatatcctctatcagggaaagagcctgagacagatgaacatgtatgactaccgcagtcatgatgcgggcatcatcttccagcattacaacctgctcacgaagctgaccgcgctggaaaatgtcgagctgtccatggagatctccggcatctaccgcagaggacgacgggagcttgcccgcacgctgttggccgatatggggctcagcgacgaggagatgaaccgccgtgtgctgtgtctgtccggcggacagcagcagcgtgtggcgatcgcccgattgctcagctacgacccttccgtgatcctcgctgatgagccgaccggcaatctcgacgtgcatacccgggatgagatcatggatatcttcctgcggctgcgagaggacggaaggtgcatcatcatcgtcacccattccgctgaggtctctcatcaggcagatcatgtctatcatctggagaggatgaagcgcgcataaaaaaagatggccgcacaccatgtgcggccattgcctgttgcctgaccgggatcagatcgatcttcgctcttttggataaaggatcaggcgcacagggtgcgcaggtaggcgaggatgagggatacggtggcatccagcgcttcgatgtgggtgcgttccatgccatgggaggcgtggacgccgggaccgatgagcgcgccgcgaatattgtttcctccgcgcagcgcagcgctgacatcagagctgtacatcgggtaaatgtcgacggcatagggcagctgttcttgtttggccagcgcgatgagcgtcgaggtcagcgtgtagtcatacggcccgctgctgtccttggcgcagatgctgacatcatattccgtgcatgccagatccaggccgatgcagcccatatccacagagatcatctcttcgacgtgctcagggatgaaggatgcgccatgaccgacctcctcatagctgctgaagatcacgatcacatccttcttcagcggcagcggatgcgcatgcaggtgtctgagcacggcaaacaggcaggctacgctgatcttgtcatcgaggaagcgtgacttgatgaagccgctgtccgtgacacaggtcttcgggtcgatcgcgatgatatcgccgttggcgatgcccagcctctgcacatcttccttggtcctgaccacttcatcgatgcgcacctccagcgtatccagcgtgcgggccagcgtggacgcttcttcatgcacatgtttggctgcggccgtgcacaggatcgttccggtatatgtcttttcctcacgggtatggatgcggcagtatgcggaatccagcgtaggcagggtcgggccgccgatgttggtgacggcgagcatgccgttgtctttgatcgagcggaccatcagtcccagcgtatcgcagtgtgcgctcagcgcgcaggcctgcgcatgatccttgcctgggatcgtgaccatcaggttgcccttggcgctgcgcacgcaggaaaacccgagcttttctgcttcttcctgcagaaactgcatggcgtgcatcgtgtatccgctgggcgaatcgatgcccagcaggcgctgcgcaaacgcgagcagttctcttcgttcatcttgattcatgttatcatctcctgtaccagtatacctgtttcttttctgcttgacaatgcgcatggacgtgaaaaaaacaggaagatgtggtatgctaaagggcagagaacagggggagacgacatgatttcttttgtgaatgattacagtgaaggggcctgcgatgagatcctgcgggcgatgatcgagaccaaccatacgcagacgccgggctatggcctggatgcgcattgcgagcaggcggcggagctcatccgcaaggcgtgcggaacacgcaaggcagacgtccattttctggtgggcggcacccagtgcaacaagacgctcatcgcggcggcgctgcggccgcatgaggcagtgatctgcgcagacaccgggcacatcaacgtgcatgagaccggcgccgtagaaaacagcgggcataaggtgatcgcgcttcgtgcagacgatggaaaggtgcgctgtgcggatatcgagcaggccgtgaagaagcataccgatgagcatatggtaaagccgaagatggtctatctttccaatgcgacggagctaggcacgttttatacgaaacaggagctcagcgacatctggaagctgtgccgccgccttgacctgtatctgttcgtggacggcgcaaggctgggcaatgcgctgtgcgcgcagggcaatgatctgacgctcaaggagatggccaagctgtgcgatgtgttctatatcggcgggacgaagaacggcgcgctgttcggtgaggcgctggtgatcctcaatgatgagctgaagccggatttccgctatcacatcaagcagaatggcggcatgcttgccaagggcaggctgctgggcatccagttcgaagtgctcttttcttcagacttatattggcgcaatgccatgcatgccaatgcggcggcgcagaagatcgccgcgcatctgaaggcggaaggcgtacagatgctcatcgagtcagcgaccaatcagatctttccgatcttcgcggatgatgtgctgaagaagctgtcaggccagtttgagcttggcacatgggaaaaggtggatgagcggcatacggcgatccgcatcgtcacttcatgggatacttcggagaaagcggtccgggtattcaatcaggcagtcagccgttatctgcatccatgatcgaaaaacgggatcacgggatgaggtccgcattgcggcaccatcccaggatcccgtcttttttgatgatggagaagcgttcatagcggcggaccagcgagacctgctcgccgcgctgaagcggcatctgatagctggtgaagtcatcggcacacagctgatcatccttgcccgcatggatgaactcatgggcgatccacagcttcctgccgctggcgagatgttcgcagaaatcagcgtcttcaccatgcttcaggacccggatggcgctttcccgccatgtgatgaacaatggatcgcggttgggcggggcgatgtcccgcgccgcgcgcacgcagggcagttcgtcaacgctctcccagctgatcgatccatcgcgcatgatcagggcattgagctgtccggcatgcttgacggcattgccgccgtcgatggagatgatgtgcctgcgtgcatcgatgagcgggtgaaaacgcgcgatgtcgtgacaatattcgctgaccggcatatggccgacgatgacccagcgggtgaattccggcgcgtgaagcatgaaatgcggataggtcatcacttcgcggaagtcgctgccaaagtccgtttcgttcatgatgccggcatgggcgaagatgtagctgtcatcataaacgacctgcggcagggcatccacccaggaaagctcttctgcatagtgctggtgcagcagatcgcagaagcgttccatgtcggtatgggcgtcgatcgagacatgcagggcatcggccatctcatgcaggatgctcgctttgcgctgcaggagcacctgatggagaaagcgcaggttatatcggtgccagatgttcttgcagacaaagtcgcagttgcccatgagcgcatatacgccgggcgctttgctcagcttcatgatgaaacgcagggtatccaggctctgcggccctttttcgatgaggtcgccggccagcaccagcacatctgatccaggcgtgtagcggacctgatcgaggagcttgttgaacagccgcaggtttccatggatatcagagacggcgatcagccgctgtcccggctgcagggacagcgctcgtgtgatgacgctgcggtccatatcacgccaggaagaagcgcaggaacaccgggatctctttttcccagcaggcctcgcaatgcgtcccgcccaggaccaggttcaggtgcacgcgggcccctgcggcattgagcaggttggccatctccagattggtctttgagatccagctgagcgagcgcttgctgcgggtctcgctgctgccccaggaaagatagacacgggtatccggatcgatcggccggcggcattctctctccatgtctttgcgcaccggaaacaggtaaggggagagacaggctgccttggaaaaggtgtcattgtgggcggtgatcgtatacagggacatcagcccgcccatggagctgcccgcgatccaggtgtctttgcgggaagtcagcgtaggcagctcccgatcgatgagccagcgcatcatctgtctgccgctgccggcgatcgtcccgaactgatggtcggtaaaggtatatgggctgtattcgacgaggcggctgttgccctcgtggttgcattccatgcccaccacgatgagcggcaggccgctgtgatccaggtagtccttcaggccccagctcttgccataagtggcttcctggtcttcaaacaggttgtgtccgtcaaacatatagagcaccgggcagcggcgtccttcctccatcgctcgctgcggcacatagatgtgcagcctgcggttcatctgataaggggtgatccacacttctttcttgaagatcataggcccatctcctcgcgcaatatcgggatgagctgatccaggctgctgacgatccatctggccatctttctctcttctgggctgagggcggcgacatcgggaatgagcgcggtcatggcgccggccgcatgggcggcgcgaacgccgctgggcgaatcttccacgacgacgcactgcgcaggcgtcgtatgcaggcgggcagcggcgcactgatagatgtccggcgccggcttgccatgcgcgacatcgctgtcatacccggtcacgatcgtctggaaataatgtctggcctgcgcgtgctcaaggtttgtcttcacgatgtccggcatggaagaagtggcgatgcccatcgggacatgatgcgcatg

SEQ ID NO: 882 - DNA, 9802 bp, Unknown
  16S sequences of unknown bacteria
ttgaaatacataatggttttgtagtcttcttaatctgttccaataaatattctttagatcctccatataggtgtggcctgcgggggcaaggtggcaaatgttcggggtcttttcgctgatgccgtttgccatgtcgaggtcaagcttaattccgcattcgttggcaatggcgggaagatgaagcattgtgtttgtggagcagcccaccgccatgtcggcggcaagggcgttataaaatgccttttcggtcatgatgtcgagaggctttatgtcctttttcacaaggtcgaccacggtcatgcccgcgtgctttgcaagctcgagacggcttgaatagacggcgggaattgtgccgttgccgggaagagccatgccgatggcctcgcacaggcagttcatggaattggccgtatacatacccgagcaggagccgcaggtgggacaggtcttacattcatattcgagaagcttttcttcggaaattttacccgccatgaaggaacccaccgcctcgaacattcccgaaaggctggtcttgtgaccgtccacgcggccggcaagcatggggccgcccgacacgaatacgccataagcaggccgggcacgtttttgtcgcagttgggaatcatgacaaggccgtcgaagccgtgggcaagcaccatggcctcggtggagtcggcgataaggtctcttgtgacgagggaatatttcatgcccctgtgacccatggcgataccgtcgcaaacggcaatggccgggaacataatgggcgttccgccggccatggccactcccattttgaccgcctcggttatcttgtcgagattcatgtgaccggggactatttcgttataagagctgaccaccccgatgagggggcggtcgagctcttcggcggtcagaccgagagcgtgataaaggctgcggtgggatgcgttgtgggcgccctttactatttcgtctttaatcataatgtcctccgaaaaaaatcaaataatcagttgttgataagcttgtcctcgtcgctccagctgtagagctttctgatttcctcgccgacgatctcggaggggtgctcggaagcaagctttctcatggcgccgaaatgaacctggccgccggcctcggacatatcgaggaggaattccttggcaaaggagccgtcctgaatgtcgtgaagaacctttttcatggcctttttggtgtcctcggtgatgatcttgggtccggtgatatagtcgccgtattcggcggtgttggagatggaatatctcatgccggcaaagccgctctggtagataaggtcgacaatgagcttcatctcgtgaatgcactcaaagtaggcgtttctggggtcataaccggcctcggtgagggtttcaaatccggcctgcataagggcgcaaacgccgccgcagagaacggcctgctcgccgaagaggtcggtttcggtttcggtgcggaaggtggtttcaagcacgcctgcgcgggcgccgccgataccgagggcataggcaagaccgatgtcgagagcgtcgccggtggcgtcctgctcaacggcaacgaggcagggaacgcccttgccggcaagatattcgcttctgactgtgtggccggggcccttgggggcgatcatgatgacgttgacgttcttgggaggcttaatgcagccgaaatgaatgttgaagccgtgagcaaatgcaagggtcttgccctcggtcatgtagggctcgatggactctttatagagcttggcctgcttttcgtcgttgatgaggatcataatgatgtcggcgtttttggcggcctcggccgaggtcatgaccttaaggccggccttttcggcctttgcccagctcttgctgccttcgtaaagaccgacaatgacgtcaacgcccgaatccttaaggttgagggcatgggcgtgaccctgagagccgtagccgatgatggcgacggtcttgccgctgagtttgttcaaatcgcagtcctgctgataaaaaattcttgcttgtgccataataaaagactccttttaataaattttatttttgcttgggggaaaatccctcttaaataccaacgctgaaaatgctgccctctccccgctcgagagccacgatgccggttcggcacatttctattatgccgaggggcttcattatctcgataaaggcatcgagcttttcggtgtcgccggtgacctctatgcagagggcggcggtggaatagtcgatgattttggagcggaagatgttgacggcggtcatgatgtcgtttttggtctcgggggtgtttttgaccttgatgagcatgagctcgcggctgaccgagccgcccttttccataagctgaacctttttgacgtttaccagcttttcaagctgtcttatgacctgctctttggccgcctcgtcgcagtacatggtgatggttatgcgggaatactcgggcgattcggtttttccgacggtcagcgcgtcgatgttgaagccgcggcgggtgaacatactggtgacccttgtcagcacgccgaatttattgtcgacataaacggcaatgacatactttttcacaggtcctcctccttttcgatgataaggtcgtccatgctgccgccgggggggagcattggaagaacaagctcatcctcgtttattttacagtcgatgaccacggggccgtcggcggtttcataggcctcggtaaatgccgccttaaaggcctccttggtgtttgtccgaacgccctttgcgccgaaggcctcggcaagctttacaaaatcggtcttgcggtcgagggtggtggccgaatagtgtttgttgaagaagagcgactgccattgacggaccatgccgagcacgccgttgttgaaaagcacgattatgacgggaattttataggtgacggcggtggcaagctcgtttaaattcatgccgaagctgccgtctccggtgatgagcagggttttgcggtgtccgccgatgtatgcgccgatcgaggcgcccagtccaaatcccatggtgccgagtccgccgcttgtgactatggttctcggatagcggaatttgcaatactgcgccgcccacatctggtgctgcccaacgtcggtggcgacaagcgcctcaccctttgtgacgccgtttatgatgtcgaaaagctcgggcggggtcagctcgtcggagggctttttggtgagctcctcccgtgctttaaactcctccacctgctttatccactcggggtggcttgcctttttcgattttgcggcgatgcggcggaaggcgtccacaaggtcgcccgcaattcccacgcttgcgggaattatcttgtcgatttccgagcggtcgacgtcgatgtgaattatatttgcctttttggcatatttctttttgtctccggtggcgcggtcgctgaatcggacgcccacgccgagaatgaggtcggcgctgttttgagccgccgaggaggcatagtgcccgtgcataccctgaagccctaaaaatctttcatagtcggagggaacgcccgtcagccccatgagggagcagccgataacggcgtcgattttttcggcaagagccattatctcctcgccgagctcggcgcccacggcaccgccgccgatgtagatatagggccgctttgcgttgtttataagctcggcggcacggtcgatttccgactcttttgccttgcggatttcggcaaggggcaggggggctttcggttcaaattcgcatttggccgtctgaacgtctttgggaatgtccacaaggacggggcctctgcgccccgagcgggcaattctgaaggcctcgcgcacgtcgtccgcgagattttccaccttggtgacgaaaaagttgtgctttgttatggggagggtgaccccggtgatgtcgatttcctgaaagctgtcctttccgatgagggaaagggggacgttgccggtgatggccacgaggggaaccgaatccagcatggcggtggcaattcccgtcacgagatttgtggcgccggggccggaggttgcgatgacgacgccgggctttccggtggctcgggcatatccgtcggccgcgtgggcggcgccctgctcgtgtgccgtcagaacgtgatttatacggtcacggtagttatagagctcgtcataaatgttgatggcctgcccgccgggataaccgaacacgtcggtaacgccctgttcgagcagcacctcaatcaatatctgagcgccgttcattaacaaaaaaatcattcctttcgggtgcgccggagggagttcttataaaaaaagccccttttacacagcgcaaaagttgtgtaaaagagacgaaatagcttattccgcggtaccactctttttggccgaaggcccactcacggcatcaaacaatgcccttctctgtaacgggagaacccgaccggatttaatcggaaaacctttcaaccggcagctccgggatgacttatggcgcagcaaacggcggctctctttgccgagaaaatgcacttttattcccttcaaagcctttttattttgtgtgtatattttatcatttgaaataccgtttgtcaacacctttgcggtatttttattaagttgacagaaagatacaaaatgttgtatcgaattgcgacaattaacactttatagggtatggtatattttccttgaaaggatatgagcctatgttttccggaagatttcttcaaaacagaaaatttatttttattcccacggcgcggctgctttgcccctccttttccccccgaaaggatttcggcggagaggaggaactgtgcaaaagtattatggaaaacggcatttccgagccgctgaccgtccgcccggcgatgaagaataaatatacggtggtttcgggggagcggcggctgagagcggcaagggcggcagggctgtcgaaggtgccctgcgtcgtgctgtgccaaagcgaccgtcaggcggcaataaccgcgcttctccacggactttgcaaaaaaccgctgaatatgtttgaacaggccgagggaatttacaatctcataacccgttacggcgtcgagcgggacgaggcggccgaacttttgggtctttccgaggggcagctgatgtcaaaactgaggctgctgaatttcagcgctcttgagcgggaaagaatactggggctggggctttcggagggacaggcaaaggttcttttgagaattcccgacgaaaagacccgggaaagggagcttgtgacgaaaattcccgagcgggcggccggcttttcccccgccgtgaaaaccggcgcaatggacgggagaataataacaaataccctgcttcgggcggtggaaagcataaaaaaggcgggcatatcggcggctttcgaaaaaaacgaaaccgaggacgaaatcgtttataaaatcagccttccgaaggtgtgatacataaagcgcgggtgttcatgggaaagcggcggtttttgcggaaaaaagcgaacatacggaaaaaacgggagcggtagtttgataccgttcccgttttgggtttcaatattcctttttcgccttcacaatgctttttaaatgagcaaaagccgccttctcccctttttttgcaagctcggtcagcagcatttcgagaaaggccgccgtttcggggtgcatggtttttgcgtccctgccgctcatgtaatatttaaggggataatcgtcggtatagtctctgcccttgtatattttgcttgcggccacgcggtcgcagaacatttcggcggcatagcgcagcggcatttttacggggcagacccgctgttccttaaggctgaaatcggtccaatattcaaaatggtgcttgtttctgcccttgtgatgaagccaggccgaggagtagccgtaaagctccctttcggtgatgttggggctgcgggtgccggcatagtattttgcgccggggatgaactcggcgggagaatattttgaaaggtcgtgaaaaaggccgcgaaagccgagccccgccttaaagcaatgggcaatgaccttgtggcggtgttttgttatggtgcgaaagtgtttgacgggatgcaaaagattttcctccgaagattattccttaccttttttgacaagcttttgaaagagaaaacgggaggtgtcctccaccctttgcatggcgacgttgatttcgctgaaggtgcggaacatttcgtcaaaacgaaccttttcacgggcggtttcgcgtgatttgaagttttccaccaccagttcgtagcgttttgtggctttttcgacggcgtcctcccaggaaatatagatttcgtccatggccgtttggccgagaaccttaagcttttcgcggttttcgcaggcaaaggaaagacatttcgccatggattcgccggtttcctctatgagaaggccggttcttccgtcctcgatgccctccgaggcgcagctttcccgaagcagcacgcttgccttgccgcaggcggccgcctccctgaccacaatgccgttggtgtcgaaggaggaggggaacaaaaacaaatctgaaagggtgaaatatccgcggattatatcccgattgtgaacggcgccgacgaatatacatttttcctgtatgcccagcgtttttgcatattgctcgatttcggggcgttcgacgctgtctcccacgaaaaccatgcggaaatccttgccgtcgtttgcaatcattttaagtccgtcgaggattattctcgcgcccttataccacatgagcctgcccacaaagagaaagacgggcacatcggcgggcagggcgtgtttttggcgcagctcggccacaagttcgggagaggcaagtccctttttcaggtcgacgccgttttccatgaccacacagtcgccctgatagccgaggcttttaaggttgtcgccggcgcccttgctcaccacccacacctcgtcgcaggccgagatgttgtccaccaaaaactttttggcggttttgcgaagaaaattcatttccaccgccttgtttatctcgatgtcgaattttgtgtggtatgtaaatacgatgggggcgtcgacctcctgctgaaccatgcgtgcgagaagggtggaggaaaaggggcaatggctgtgaagcagcaggggatttgaggcttttatggcgtttaccgcttttttgccgaaggggtagcccagtcggtagccgaatttgcgggtggtgttgaggcttgaatagcggatgacgggaaattcaaagctttcgtcgtcggctccggggtaggaaggggtggcaacggttgcgtttattccgctttcggtcatacatttggcataatttaccaccgcgttttccaccccgtcgataaggggaggaaaggagtcgttcaaaagacaaaccgagccgttttcaaacataaaatcacctatcctataatatcggtgttcatatattttctcagcacttcgggaacggtgaccgttccgtcggcattttgatagttttcaagaatggcggcgacggttctgcccacggcaagacccgagccgttgagagtgtggacgaatttggccttgtcccccgccccgtccttataacggatggcggcgcggcgggcctgataatcctcgaagttggagcagcttgaaatctcgcaatagcggttatagctgggcagccagacctcgatgtcataggtcatggccgaggaaaatccaaggtcgccggccgacagacagaccacacgataaggcagaccgagcatttggagcagcttttcggcgtcgtttgtcagggtctcaagctcggcataggaattttccggctttacgaacttaacaagctcgaccttgtggaactggtgctgacggatgaggcctctcgtgtcgcggccggccgaacccgcctcggcgcggaaacaggccgaaaaggcgcagtatttaaggggaagcttgcttccgtcgagaatgtcgtcgcgatacatattggttaccggaacctcggcggtggggatgaggaattcgtccgagccgtgaatacggtaggcgtcctcctcgaatttgggcagctgaccggtgccggtcatggaagcgcggttcacgagatagggaggaatgatctcctcatagccgttgtcggcgtgggtgtccataaagaagcagaaaacggctctttcgagacgggcgccgaggcctctgtaaaaatgaaaacgggcgcccgatacctttgcggcggtttcggggtcgagaattccgaggtccttgccgatgtcccaatgagccttggcctcaaaatcaaattttctcggctcgccccagcggcgcagctcgcggttttccttgtcgtcctcgccgtcgggaatggtgggattgggcatattggggatagaaaggagaatgtttctctgcttttcggtcagctcggagatttccttgtcacattccttgacgtcgtcggacagggttttcatgcgggccatgatttccgaaaggtctcccccctccttcttgatacgggggatttccttggatgcggcgttttgctcggccttgaatttgtcggccttgctgctgatgactcggcgctgctcgtcgattttaagcagctcgtcgatagcggcggtatagtcgccgttgcggcggttgacggcggccttgaccgcgtcggggttttgtcttataagcttgatgtctaacatttttgtcgtcctttctattcgcccagcttgtttgccagaccctttaaatcctcaagattgtaaaattctatttcaagggtgccttttccctttgcggccttgacctttacacgtcggcccaagttttccgacagagaaagctccacctcgtcataaatggtgctgcgggcgggctttgccgtcttttgaccgtctttttcggcttttttcgactccttggccatctgctcgatttttctgacgtttgcaccgaaggatgcggcctttgccgccttgagcagctcctctttatcggaaaatccgagcagcgctctgccgtgaccggccgaaatggtgccctttttgaccatgtcaagcacctcgtcgggcaaatcaagcagccgcatggcgttggtgaccgccgggcgggatcttcccaccctcacggcgacctcctcctgggtcagaccgaagtcctccatgaggcttttatagcctgccgcctcttcaatggggtttaaatcctccctttggaggttttccaccaaggcaatttcggcggtttcgccgtcgctcagttcctttatgattgcaggaacggccgacagccccgcaatgcgcgacgctctccaacggcgctcgcccgccacaagctgataacgcccgccgtttatggggcgaaccacaaggggctgaagcagaccgtatctttttatgctgtcggcaagctcttcaagggcttcggggtcgaattccttacggggctggccgagattgggctctatatccatgagggatatttcggcgggagcgttttgctcggtggcgttttcggcaaaaagtgagccgagacctttgtttaatccgccttttttggccattttcattctcctctccgctaaattccgttaagcaacagatgttcgaacaccgtatggtttcgctcgttccttttcccgtgcggcttcgcgttcatcaaccgtaggcggcagccttacggccgatttcacacttccccgcgcagaaaaatgaacggcagaaactcttcgaccttaaaaatgggtaaatttttcgtttttgaagttttgtcgcgccgacataccggcgtatttcaagcggcgaaacaataaaaacggggaatttaacat

SEQ ID NO: 883 - DNA, 14229 bp, Unknown
  16S sequences of unknown bacteria
gcaaaacaactatggacatctatgcaaaagtgaagtacaataaaccagaggagctttttgaggtggtaaatgatgcgctacatcagagggtttctgattaaaaaagcacctatttttgtggttaaggaataggacaaccgagaaccgaaagggcaaaaaagcccggaatatcaaggaaaaacggcaatcaaagaatttcagtacggtctcaaggcagctcgtcgcgcacctcagttcagcaagagataatctgctgttcaaactttatcgagatgttttcaaaacccgagaaattagaatttctcgggtttttttgtatctaaaatgtcgagaagactatgatgttaaataatttagtaaagatatatccggtttttattggatgaatatggagacaagacgtttttgtttataaaataaaaaaattgaaaaaagctattgacaaaattattataatggattacaatacaaaacatcaacttaacaacaacaaaatggcgttgatgaggagagtaagcagtggaagacttaccagagagtccctgtatgctgagaggggataagaacaaaactgccgaatatggcctctgagtcgcgtggatgaaccgaaaggataagccacgacgggatcgcccgtaacagcggcagagtattaaatacttaaatgtatgcgtactttatgagattcatagtgtgagctatggatgaatttaggtggtaacacgtgggattttatgccttcgtcctatttagttaatataggacgaaggcttttttatttgtttcaagggggcgaagtaatgatagagttacaaaatataacaaaagattttaactctaaaaaagaaaatattcatgctgttaaagatgtcagcctgacaataaacgatggcgaaattttcggaataataggtttttcgggcgcaggaaagtccacattggtaagatgtataaatctcctggaaagaccgtcaagcggaaaagttattttagacgggaaagacctgacggagatgagcgataaagagctgagggaagaaagaaaaaagataggaatgatttttcagcactttaatctgatgagatcgagaacggtttacggtaatatagcatttcctcttaagaaaagcggattgagcaaagaggaaaaagataaaaagataacttctcttttaagactggtcgggcttgaggataaaaaagacgcatatccgtctcagttatcgggaggtcaaaaacaaagagttgcaatcgccagagcgttggcaaacgatccaaaggtccttttatgcgatgaagctacttcggcgctggatccgcagactacaaaggcaatccttaagctgcttgaagaagtaaataaacaactgggaataacgattattattatcactcaccagatggaagttgtgaaggatatatgcgacagagtagctattatggatatgggagaggttgtggaaacaggacacactgccgacgtattccttaaaccgaaagagactgtaacaaaatcttttatagagacggcaagcaatataagcaaggtttacgatctgattaagagcggagacgcttttacggaacttaagcctggagaaaagatgatgattcttacatactccaacgtaaatacaaaggaagctatgatctcgcatttatcaagaacttatggcgtggacgccagcataattttcggaaatgttgaaattttgaaagacaaacctctcggaaaattggttgtaattatgggaggaaaggaagaaaatataggttcggcaattgattatctaaagtcagccggaatagatgtggaggtaattaaagaatgagttttttatatagtttagcgcctcaccttgaaggattgcaggatgaattgattaaatgttttttccagacggttcagatgtgttctgttgccggaatagtagcttttatattcggattgtttttcggagtacttcttacggttacaaagaaagacggaataatggaatgtactcctatttatacgataatagataaagcaatagacgttatacgttcgataccttttataatattgatttttatacttattcctttaagcagagcaatagtcggaacgagtataggagtaaaaggcgcttatgtagcactgatttgcggaacggtacctttctttgccagacaaattgaatcggcaatagccgaagtagataaaggacttatagaagccagtcaggcaatgggattttcgccgttggaaataataaaggacgtataccttaaagaaagtataccgagtatagccagagtaagcatgattactcttgtaaaccttataggacttacggctatgtccggagcagtcggagcgggaggtctcggcgacttcgccataagatacggctaccagttgcaatatagagatatgatatgggtaacggtaatattgatacttttccttgtaagtatcgtacagattgtaggaaatataataatcaaaaaaactacgcactgattaatgtcaagtaattaaaatttaaatataaaggagaaaaggaacatgaaaaaattaattttatcagtaacagcattattaacagcagcagctcttacagcttgcggaagccagacatcagaggagaaagccgaaggaacggctgacggtacaacagtcgtaaaggtaggcgttgtaggagagtacaattcacagtgggacactgtaaatgaacttcttgccgatgacaacattcaggttgaacttgtaaaatttacggactatgcagcgcccaacagagcgttgaacgatggtgaaatagacttaaatgctttccagcataaggcatttttggctaacgatatcaaacagagcggatatgaaatagaagctatcggagatacaattatcgcgcctctttcaatctacaataacaaggataaaatcagcagcatagaggatatcaaagacggagatataatagctatccccagtgaccttacaaacggaggaagagctcttaaacttcttgaaaaggcgggaattattgaatgtgatcctgcaaagggatttgttcccacaaaggccgacattacaaaatataatgtccaggtagaaattttggaggcagagtctgcaactcttgcaaatcttctccctgactgtgcggcagctataattaacggaggaaacgcttttacagcaggacttaatcctttgacagacgcaatctttacagaagatgtaaatcctgaaacaaacgaagccgtaccggaacttataaacgtaatagctgcaagaacggctgataaggacaatgaaacttacaaaaaagttgtagaagcatatcagagtgatgaaacagcaaagactattgaggaagaataccagggcgcatttatatgcagctggaaagccgaataaaatttaaaacgcagctgcggtcgggaggtaatgtagtatggcaattaaagattatataaaaaacgaagaaaaatatctgattgaattaagaaggtatttccatgagcatcctgaggaaagcttaaaggagttcaatacatgtaaaaaaatagaggaagaacttgataaagcggggatagaacacagacgtgtcggagaaacaggagtttatgcatggattaacggtgaaaaaaaaggtgaaaacagagttatagcattacgttccgatatggacgcgcttaaaatgcaggatctaaaaactgttgaatataaatctaaaaacgacggatattgccatgcgtgcggacatgactcgcatacagccgtactgatagccgcagcaaaggttcttaacagtaaaaaaagtaaattttccggacaggtaaggttgtttttccaacaggccgaagaaataggagccggcgcaagattgtttgtaaaagagggacttcttgaaggcgtgggaagagtatacggaagccatgtgctttctcagatggaaagcggaaaggttgcggttgtagccggtccgacaaacgcaagctgcgaccattttacaataaaaattacaggcaagggagcccatgtatcaaagcctcatctttctgtagacgctctttacatagcggctcagataatagtcaatatacagtccatagtatccagaaacattgaccccgtcgacactgttgttgtaggaataggattatgcaaggcaggaaccgcatataacatagttgcggaaaatgcagaacttgaaggtacaacgagatgttttactcctgaaacaagaaagtatgtaaacggcagaataaaagaaatagccgaaggaattgcagcctcatacggcgctaaggcagaattacaatttgatgactttgccgctcctcttattaatgataaagaggcggctgacgaggccgatataatagcaaggagaatacttcctgctgaggatattatacatgacagggaaaagagtctcggcgctgatgattttgcagactttttagctgtaacaaagggtgtttatacttttataggaacgcataaccccgataatccggacacgggagcggctcatcataacggacatttcgatatagatgaaaaagcaatgcttatatcatgcaatctttatgttgactatgctatagcataccttaacggagaatttaataaataaaaaattgactgccgtaacattaaatttgttgcggcagttttttatgccgtaaaacagtatatttgtctggttttatatggattttgattgtatgagattatagttgatagtataattgagacataggacagaggtggaaaaatgaaaataggagcggcggtgctggcaggaggaaaaagcagaagaatggggcgtaataaagctatgctgaaaataggcgaagttacggctgttgaaaaaatacttgaagaattgaaagaatttgacgaaataatagtttcttccgacgattataaaacatcggataaaaaagtcggcatttgcagagatatttttaaaaactgcggacctatgggaggaatttatacaatacttaaaaattgtaaatccgaagcgatatttattactgcctgcgatatgccgatgataaaagaagatacggttataaagttctgcggtttttttgacgatagatttgatgcgatggttttaaaacacgggcaaaaaacggagcctttgtttgccgtatacaaaaaaagtaccgtggaatattttgaaaaagccattatagataaaaggtattctctgaaagaggcgttgtctgaactgaatgtaaaatatgtcggtacggacatgattaaatgcgatgaaattgagtttataaacatgaacacacctgaagattatatgaaagtagcggagatttataatgagaataggtcttgaagaagcagttgaactcataaagaaaaatataataacgaaaccatgtgaaaagatttttatcggagacggattgggaagagtgctgagtgatgacgtctatgcggttgtggataatcctccttttaataggtcgccgtacgacgggtatgctttgaaagcaaagtatacatcgggcatttttaaagtaatcggagtaaactatgcgggaaaaccgtcggtatgtaaaatatccgacaaagaggctgtaaaaataatgacgggcgcatttataccggacggagcggactgtgttgttccgcaggaagcaactgataggggcgatgagtatgttacggtgttcgataaatatgatccgaaagacaattttatcgaacaaggtgaagattttataaacggaagtattcttcttagaaagaatacaaaattaggagctgcggagatggcgttgaccgttgccggaggcgtggacagaataaatgtatatccacggctgaaaacggcggtaatatccacggggaacgagatagtaaaacctgatagaaatctggaactcggacaaatatatgatacaaatatgatctatacgtcggcaagacttacggaacttggatgtagtgttttatataaagattctgtaggtgatgatacggagactatcggagaggctatacgaaaagcgtcggaaaactccgatttagttgtaacaaccggaggggtatcggtaggagaaaaggacttgctgcatgaagctgtaaaagctatcggcgccgaaataatatttcacggtgtggatatgaaaccaggaatgccgactatgctggctgttatgaataaaaaaacagttattttgtcgctgtcgggaaacccttttgccgcggcggttggtttggaagtcataggcagatatattatatccgctatttcgggagacatgagtatacttccccaaaaacgtgaagcggttcttaataacggctttgaaaaatcttcaaagagcaggcggtttataaaaggcgttgagaaagacggcagggttacgatacaatcctctcagggtaacggctcgctgaaatctacagtaggctgtaactgttttgttgatattcccacagggagtaaaaatctttccgcaggagataaggcggtggttttgcttgtctgatataatagccgtaagcggagcgaaaaattccggaaaaaccactttgatagaaagacttattaaatactatgataaaatcggtataaaaacggcagctataaaacatgacggccataactttgcgcccgaccgagaaaacagcgacagcagaaaattttatgattccggtgcaatcgtaacggcggtttttgacgatgataaagtccagattgtaagaagaggaacaacaaatatttctgaaataacagaaattttttcggacgccgatatagtttttttagagggattcaaatattccgaatatcctaagatatggatgtgctcggatgaaaaatttgataatataaaaaatataatcgcatggataggagagtgcgaaaattctccgaagtttttgcgtgatgatatcgaagaaattgcggaatatatacttgattttataaggaggtagattatgaatactgttaagaaaaccgtatgtccttacgactgcccgactacatgcggatttttagttgagactgacggagataaaatattgtcggtacgcgcagacaaagataatcctgcgtcaggcggcataatatgcagaaagatgagaaactatgaatcatcggtaaattccgaaaagagaatacttaccccacttataagaaaaggtgaaaaaggaaaaggcagctttgaggaaataagctgggatgaagccatagaaatcattacgggaaaatggaaagacattataaaggaaaacggagcgcaatcaattgcctactgtacatattcgggagttatgagcgacatacagagaaactgcggcgacgcgttttttaactatatgggggcgtgcgaactcgtaaagacgctgtgttctaccgcgaagggagtaggctatgccaatgtaatgggaagaaccggatgtcttgacccaagagagttaaaagacagcgactactatatagtatggggcagcaacatggctgcaacaaggcttcaggctatgccggaaattataaatgcgagaaagtcgggaaagaaaacggtgcttattgacgtatgcggagaagctatgtcgaaatactgcgataagactatacttataagacccggaacagacggggcgttagccttggcaatgatgaatgtccttgtaaaagaaggtttggcagacgaggagtttttggataataatgccgagggatacagggcatttaaagagactttgtcggaatacactcctaagtgggctgaaaatataacgggaattgcctctgaaactataatagaacttgccctggaatacggaaaggcttccgcaccggcgataatattgggaagcggaaattccagatacggaaacggagccatgacggtaaggcttataacaattctttctttattcacgggagcgtggaaaaagaaaggcggaggactttgcggatgtactccgattgatacttcgtatataaatctttctcttataaaacgacctgatttcagaaaagagccttctaaaaaaataaatataaatcaactgggaaccgccgtaaatgataaaaatattaaaagtttgtatgtttacggatcaaacccggttaattccgtcagcaatacaacggcggtagtcgagggaattaaaagagatgacttgtttaccgttgtacatgaaagatttatgacggatactgcaaaatatgcggacataatactgcctgcgacattttcggtggaacagagcgatgtatatgaggcatacggatattgtacgctcagtacggcatataagatagttgaaccgaagggacagtgcagaagtaattggaatacatttaaagctcttgccgaaggaatgggatatgacgatgagtattttaaaagaaccgaggaagagatgctcgatatagcgcttggtaatccaactgaggcattgggaaaaatttcggatgacgacagaaaaacgctcaagaacggaggctccataagtatgccgtttgccgaacatacaaagtggcgtacaaaaagcggaaagataaaaatagtaaatgaaaagctcgaagaaaaaatgccgagatatacagaatgttacggcggaaaatatccgctggcgcttgtttccgtaccgagcagccatacgcttaattccatatttacacaaagagacgatatggttgaaaaccgaggaaatatgcggcttataataaactgcaaagacgcctgcgagagaaatataaaatcgggagataaaattttatgttttaacgatttggcagaggtgggctttgaagcttatgtaacggataatatagccgtaggagccgttgcggccgtagggatttatacatcgtctcagactctgaacgggcttggcgtaaatgctttgcaccatgacagactgtcggatttgggtgcggctacaactatgaacgataacaaggtagatataaaattaatgtgaacaaaacgcccgatgaatttcatcgggcatttttatgcagtataaaaaatattattcggaatccgacggatatattttacttttggagagaatatctctgtcgcagctttccagaacatttttatcgggaaccataatatagaaaaaaatactgctgtcgtattccttaaaatattttgcatacactctgccgtacatttgtatcggcgtaaaatctcgggttatatcatagttgggtataccgtactgcaaatatgatatggaaaagttttcgtagttatggcatacgctgtttacctttaagtcggaatcaatcctgctccatccttcgtaaccggcataggttatattatcctcggcatttgttattttccagtcaaaaaccatgtttttacggtcaagtcccatagcgcccaatacaagattctgcatatcaaactgaggaatttgagaagcggtttctgaatttacagatccgtcgggattgaacccgtatataccgtttttatcctgtaccgcataagcgccgtaaaatccgctgcaatatggcgatgaagggtcaaaaattttactgcatcctctaagaggagagtatgacggaaaattgtacattatggagagagataaatcttcgtttccggtgaattttctaatacccgcattatcgttaaatgtactgacgaacggataccaatcgctttcggctgtcgaaaaaccgccgggaatttttattttaaatccgttattctccataacggaattttttgaatttaaagcgttgtatgcagacagaacagccatacttctcaaaattgcaacaggcggcgaaataaatattaaaatggctataatggctgtaagaagcttttttgtcgatttcattattatcaatacctctattccatgatatattataattgcccaaaaataatgaacaaggttaaaataattaaattttgttgattaaaaaaatatatagtgttaaaattattaagggttgtaattattattcaatttataagagaggtgagaacgtaatggattactgcgacagttgtgggcaaagtaaagatgacaggcatagtttgaatgaaggaccgcggagtatcgcattgcgttctttttaatatattattatgcccatcgccttgacctgcaattaaagctgatatattccgtatccgctggataaatagggcgatgtttttttatgccttttttaatttgcggaatatagaaatttaggaggtgtaaaagatgatggatgaagaaaagaaaaaaatgattacagatgtcccgaccagaccggattatgatgacgaacttataaagataataaagggcaacttatccgatgaagaaatcagagacagattggaaagttaccatgaaaacgatatatccgctgtccttgataggcttactaagacggaaagattgagactttacaaaatactgggcgtcgaaaaggtttccgagatattttcgtatttggaagaagatgttgtaaaatatatcgaagagctggcgccggaaaaagccgccgatataatcgaatcgatggacgccgacgacgctgtagacgttcttgacgaacttgaagaagataaaatcggagaaatcaaagagcttatggatgaagagtccagacaggatattgaacttattttgtcatatgacgaggactccatcggaagccgaatgacgacgaatttcatagttataaaaaaagattacactataagacaggctatgaaatctcttgtcgaacaagcggctgacaatgacaatatatcgacaatttatgttgttaccgatgataatactttttacggcgctatagatttaaaggacttgataatagccagagattatattgaccttaacgaacttgttgtaacgtcatatccttatgtatatgcggatgagaaaaccgaggactgtattgaagaacttaaagaatattccgaagattccatacctgtattggatgtagataaaaagcttataggaattataacggctcaggatatagttgaagccgtagatgaagaaatgggcgacgattatgccaaattggcaggtttaaccgcggaagaggatttaaacgagccttttatagaaagcgtaaaaaaacgtttgccgtggcttgttttactgctgtttttaggactgctggtttcatctgtcgtaggtctgtttgaggctgtagtttcacagattacgcttgttgtctgttttcagtctctcatactggatatggcgggaaatgtcggcacacagtcgctggcagttacaatcagggttcttatggacgaaaatttatcgggcaaacagcagagaggacttgtgtttaaagagatgagagtcggatttataaacggagctatattaggctcgctgtcgtttgttttggtaggtgcctatatacttattgcaaaatcttcaagtcccgcgttttcttttgccgtttcgggctgcataggtctggctattattatagcgatggttgtttcgagttttgtcggaaccgcaataccgatattttttaagaagataaaagtcgaccctgctgtggcgtccggtccgcttattacaacagtaaacgaccttgtggctgttgttgcttattacggaatagtatgggtgcttcttattaatgtacttcagattgtacaataacagagccgttgaccttagaattttaggctgatataatattctgcaacggattatagttttagaaaggaaaatactgatggcaaacaaatatggaatggtaaaatgctattttgaacacggtatgtggtctgctaatcaggttaaagacgcagttacaaagggcctgattacatctgacgaatataaaaagataacgggtgaagagtttaacatagcatatcttaaagaacgtgaaaataagagcaaaaaaaataaatgcataaaacagtatacggtcgatacgtttacagatgaggtgttcagcggaaatcctgccgctatatgcatgcttaacagtccgatatccgatgaactgatgcagaaaatagctattgagaacagattcggcgagacaacatttgttactaaaaaaggaaatgattacagactaagatggtttacctcaaagggtgagatagacatgtgtggtcatgcggttttggctgctgcgtatgttattcttaatttttatgaaaaaaccaaagatataatagaatttaatacgtctgacggaaaaataacagtcgttaaaaacgatgatgtttttgaaatggattttccgagatacaaccttgaaaaaataaatgttacggacgaaatgtcagaagctgtcggagttgtacccgaagaggcgtttttgggaagagatcttctgcttgttatgaaaaacgaagaagatgtagttaatatgaaacccgatatgaaaaaactcagcaagttagacggtcttataacccatgttaccgccagaggaagcgagtatgactgcgttgcaagatcgttttcgcctaaaatagggattgacgaagatcctgtgtgcggtctcggacactgttatattgcgccgtattggaaagataagctcggtcaaaatatacttgtgtcaaggcaggtatcgaaaagaggcggaactgtttactgtaaaatgttcaaagaaggcagggtaaaactttgcggtaaggctgctctgtactccgaagccgaaatatatgttgactaagtattaatgacgttgttatgtaatgatgtgaaacctctctaaatgatagagaggttttttgtttagtatttatttgttttattcttgacaaactttgttaaatgatatacaataaaaccataaagaaaaggaaaaacaagataaagagatacatggaaatgctgataaagtcattgattgtataaaatttaggggaggttttattatgaagtgcgaaaaaatatttaacaaagcttgtgaagaaaaaatgagtggaaacacagaaagagcttatgaactttttgcagaagttgtacacgactatcccggaacaatatttgcaatatatgcaaatgacgaaatgatgagactctctgttaataatgctaaagacagctacacaccttcttatgttgaagaagaggctatagcttaatattttaaggaacaagtaatgcggcaacacataaaagcgcccttctgtgtaataattacgcaggagggcgcttttcgtggatatttataataaagagttaacgaagagggattgaaaatatatcggttgttaattataatattacccgactgatataatgtgaaaagaggtaaaatgatgagtcctgaagtggaaagattgaaagaactgattgacaatagcgacaatattgtgtttttcggaggagcgggagtatcgacagaaagtaatattcctgatttcagaagtgaaaacggtatatataatgcggttaataagtacggttatccgcctgaaacaatgttaagccacagcttttttgtatctcatcctgaaatattttttgaatatttgaggactactcttatttacccggaagcaaaaccgaactatgcgcatataggtttggcggaactggaaaaacaggggaaacttaagactgttataactcagaatatcgataaccttcatcaaatggcaggcagcgtgaatgtatacgaactgcatggaacattatataaaaattactgcgttaagtgtcataagaaatttgatataaattacataatggaaagcaaaggaataccgcattgtgatgaatgcggaggaatagtgcgccctgatgttgttttatatgaagagggacttaacagcaagactatatatgattcggtatcggcaattgaaaacgcagatgtacttattgtcggcggaacgtcgttaaatgtatatccggctgccggatttatagattattacagaaaaaataagcttgtgctgataaacaagagtgagacttcgtatgataggagagcaaaccttataataagagaaaatatcggagaagtttttaaagaagttttaaatttgtaaacagttaaaacgccgatatttaaaggaatattgtcctaatataaaaaaattataaattttttgaaaaacatattgaaaaatgtattgacaaacgcaaagtgctttgctataatcaataacgcactgtgagctttgaaaattgaacagcataaaaaattaaacccaagtcaagagacgagttacaagaaaagatgtaacgaaccaaag

SEQ ID NO: 884 - DNA, 1934 bp, Unknown
  16S sequences of unknown bacteria
ggacacagaacctgtacacctacacctccaacaacccagtgaactatatagacccaacgggctactcaaaagaacagtgggcattggcagaaggaatgaagtatgcaatgggagaagcgaaaaaacagacaaacattgttgccgcgctcaatacatttatgacatcgataccgaaaggatacaacgatgcgctaaagcgtgcagacgcgagagaaaaagagttgagaaaagagcttgcggggcaggttgggaagagaaataccaacaaggatgaattggcaagaagctcgtataagatcctcatggaattgacattattgacggatgtggaggtagcgctggatgggcggtttatagacggggcatatgaatggattgggtatacgatatcggacaacagtgcaacggtagattgtggctaccaaagcggcccgggggctattacattgcattcgcatacctatttggagagtggggccatagcggtattagatgaaatgcatgttttgcattcgaaaaaagactttgataaatttggcttgtcgtcgagccaggtggaaacttcttatgttactgcattggggggactagaaaagttcgacgcagtaaagcataaaggcacaaacgcattcaagggacaaatggaaaaaatagaaaaggggatagagaatcctgaagataacaaaaaatttgtagaaactttggtaaaaatagaggcggtgtattgatgaaaaaaagaatcttttctgcgcttctaatggccttagttatattgtgcagcggttgtgaacgagaagcagtttattttctaatagaaaatcagacgacaggactgcaggggtttgcagaccaaaagggaaagatcgtaattgagtgccagtatgatggatgcgattttatgctggaggatgtgcaatatactgttgcccataaaggagagcagtacatgctgatcgataaggctggcaatatggtatttagcgtaaattgtccgcttatctattatcctgaggcaaacttgtgtatgacgattgaggaggatctgacgtgtattgtacttgatgtagagggaaagcagaggatccctggtgaattcgaagatgttgatgtcatagaccagcgctatgcgtgcgtcaagcagaacggtgaggtatttttgtatgacctggagacaaacgaacaacgaaagctggcagaagggaaaactgtacaaaatgtaaatccctggatcaaacagcctctgtttgcatatacagaaggaaaatttgattgggcattaaaccaatggacggagaaatggggtgtcgtagacgcacaagggaacgaaatcctgccgcccacgtataacgatatgacagggtactctgagaatcgggcttttggttattttatggagaatggcagtgcttggccaactaaagtacatatgctaaatgagaagggagaaattctaaaagaattagacgggggatatttggccaaacagccctttgaaaacggcagagcaggtatggagcagcaaaatgtaggatttggtatcattgatgagaagggaaactggataattgacccgacagaaaaagaatataggttctcctacctacgagtggagggggagatcatacacggaataacccggggacgccatgttttctatgatttggacggaaaaaagttgtttgagacttcgatggaatttgctaaatatagaaatggatacatagctttttccgatgaagagaaggggagcggactgatgaatctatctgggaaaattgtaacgcgttttccagagggctatatgtggacgaattgagaaaggggctaaaagcccctttctcaatataaaaatagtttctatgctataattttatacgaattcggacggcgggatgggatgaccgaccataccgatggcgagaccatccaaagca

SEQ ID NO: 885 - DNA, 6335 bp, Unknown
  16S sequences of unknown bacteria
ttcccagaggcatataattatatgcaattcctctcctgctgcatatatcggcaatctgtctgaacatagagcctgacgaggcgccgttgtcatacggtcttaaatcaaaatgggcatcaaaattgattatacccatatccgcctcaacttcgctgcagtgcgccagctgtcctgtaaaatgtccgaaagtggtttcgtggcctcctcccagcactataggaaacagattaaggtcaagtatcattgaaaccgcctctgccagaagcttttgcccctcttccatgggtatctcgtcacacaggatattgcctgcatcaaacagcttgacgtcctgtgaaaaacagcagggcagatttgacatctgccccctgataaagtcaggtgccagcgctgtacctgtacggcccttgtttcttttaacaccctgttcgctgcaaaagcctataaaggcaaatcccagcggtccttcaaattttttatcatattcattaagatcaatgggcttcacccactgatgccatctgaaagtatcgtagtcatctgtgctgtctactctgcccttccagtattccattgcatttacataattgttaagcatattgtttccgccttgaaatttattactgtgcaataagtccgtcaaatatctctgtaatattctccggagtcacattgcagatgagctcgtcatctgcttttattgtaacaccttctgcgcattttccaagacagaatcctgctttcagctcaacttttttttcaagctctctctctgcaacaagcttttgcagagtttctattaccttttgtgagcctttgagatggcaggcgcttcccacacatattgttattaccattacctgtaacactcctttttaaatcaacagaaaaacatctttaaaatttctaaaggaactatttgtaatgcaggaagtgatgcgccttgtcacctgtaagaagttcactgtatatgctgtcggttacagggttttccgctgagagcttaacgcttgacatgcggtctgcctcatacattccctgtgatctttcctgttttgctccgccaagcgcgtaaggctgtccggctcccgctatgcagcctccctcgcatgccataacctctacaaaatcataatggatttctccggcttcaagtttccttatgaggttctcagcgttcctgagtccgcttacgatagcaattctaagctctgtatccttgtacggaaccactacttccttgagtccgtcaaagcctctgacacctgtaaatgaaatgtcagccagatgaccctttgcatcatctcccataatataacggattacagcctctgtaactccgcctgtaactccaaagataacacccgcgccactggcaatacccataggcatatcaactgcttcaggaagaaccttttcgaagttgattcctgattctcttatcatcttggcgagctctactgtcgtaattgaataatcaaccgactgctgaccgtcaaccttgaggtcgtctctctttatttcatatttcttggctgtgcaaggcattattgcaacaaccttggtctttttaggctttctgcctgtttcgcttaatcttgctttttcttttaataccgcgcccatcatttccataggtgatttgcagcttgaaatctggtctttaagttcaggatgcttaatctccgcatatctgaaccatgcaggacagcacgatgtgaacagcggcagcctgtcgcctctcttaatcttgtttataagctccttgccctcttctataactgtaaggtctgcgcctgttgcagtatcataaactctgtcaaatcccatacgcttgagcacgcttactatcttgcccattacgtttgtgccaagcggaagtccgaattcatcaccgagagccactcttaccgccggtgcgatctgagcctccacgattgtatccttgtcgtttaaatcctcccagagctcctctgtatcaagcttgattgtaattgctcccgtaggacatacggctctgcactgtccgcagtttacgcagttggtttctgcaagaggcatgttgaaggctgttgtaacctccattttcgaacctctgtaggcaaagtctatagcgcctacattctgtatttccgagcacatacgcacacagtcaccgcacagtatgcacttgttagggtttctgattattgcaggtgatgaataatccttgttgtcccatatgctgtacggctcaaatcttacgtctttgagaccgaacttgcatgcaaagtcctgcaggtcacaattgaaattgatttcacaggttgtacagtctctgcagtgatccgcaagcataagctcaagtatcatcttacggtatttacgaagtcttggtgtgtttgtctttatttccattcctgaacgcggcggagttgagcatgacgccattatatctccgttcttgccctcaacaacgcacattctgcacgcgccaaaggttgaaagctctgaatagtagcagagtgtaggcagctctattcccgcttttcttacaaggctcagtatgtttttttctccctcaattgcaacaggcaggccgtcaattatcatatatttttttccattcatcgtattcatataactaatcctccttaattgcattgaacttgcaggtgcttatgcatgctccgcatttgatgcacttgctctgatttattacaaacggttcttttaccttgccctctattgcatttacaggacaggatcttgcgcacaggctgcatcccttgcacagatctttgtcaattactatctgcttgagagcctgacagttctttgttctgcatttcttgtctactatatgctctacgtattcatctctgaaatatttaagtgttgaaaccacagggtttgctgcggtttttccaagtccgcagagcgctgtcgaagtaattgtgtcagccagctcctcaagcatatcgaggtctgaaagctcacccttgcctgcaactatcttttcgaggatttcgagcatacgtcttgtaccctctctgcaaggtacacatttgccgcaggattcattctgtgtgaagttcataaagaatcttgcaacttcaaccatacaggtatcctcgtccattactacaagtccgcctgagcctatcatggcgccggcttttttgaggctgtcaaagtctaaaggcaggttcaggtgttcttctgtaagacaggctcctgacggtcctcctatctgtactgccttgaagctcttgccgcctctgatgcctccgcctatatcaaatattattttgtgaagcggagttcccattggtatctctataagtcctgtgttcacgatgttgcctgtaagtgcaaatgctttggttcccggacttttttctgttcctatgctgcaataccattccgcacccttttcgattatgataggcacattggcaaatgtctcaacgttgtttaaaagtgtaggctttccgaacagtccgtgttcaacagttctaggaggctttactctaggcatacctctgtcaccctcgattgaagttgtaagggcgcttccctcaccgcatacaaaggctcccgcacctttaactatctctatatcaaaattaaagcctgttccgaatatatcctgaccaagcacgccgtattttctggcgtctttgatggccttgtcaagtctctgtactgcaagagggtattccgctcttacatatatgtagcctttctctgatcctgccgtatgacctgcaattatcataccctcaagcattttgtgagggtctccctccataatgcttctgtccatgaatgcgccggggtcaccctcatcaccgttgcagacaacatatttaacaggtgatttctgctgctttacctgtacccatttacgtcctgccgggaagcccgcgccgcctctgcctctgaggtttgactctgttatgatttttataacgtcgtcctctgtaatatcaaagagacatttttcaagtgatgaatatccgccgtaggctatgtattcttcgatggactccgcatctatctgtccgcagtcctcaagtacaattcttgtctggttgctgtaaaacggtattttttcctgaacgggatagctgatgccgtctttttgatatattaggcggtcgataacctcgtcacctataattgacttttcgattatttcctcgcagtcatctacgctgactttaaggtaaagaagctttgccggctctattctcagcagcggtcccatttcgcaaaagccgtggcatccgctttttttcatactgatacattcgccctcgacttcttcataaagctccacctgacagactatacccttttcttctatgagttcctttaatctgtcgaatatttcaagtgaaccgcctgcaacgcagcctgttcctccgcaaacataaatctttttagtctgtttttctatctgataaagaaatttttctcttaatttctgcagttctgctctgttttcgattttcattactgcctccttattttaattcctgtaaaagttcaatagccttttccggtgtcatcgccggatagactttgtcgttaacggttaaaacaggcgccagtccgcacgcgccaagacacgatacagtctcaacggtaaacagcaggtcctctgttgttttctctccgtctgccagcttgagttcttttttgagcgcgtttaaaatcggaatggattttctgacatgacaggctgtaccatcgcagattttgattacgtattttccttttggtgtaagagagaagttctcatagaatgttgcaatgctgaaaagctttgcaaggcttacatcaagcttctctgcaagatagtcaaaagcttctctcggaatatatctgtattcctcctgaacatcctgcaggatagctactatcggcttattgtctttgtgattttcaacaatggcatcaattttccgatacagttcgttgtttgtcataaaatcctccatcttcaatttgttatttttttaacgaaaatttatataaaattactgctaaattattattgtcaattataattatatcttgtcttatttgctttgtctattgatttttcggtacttgtttgctcattttttaggtatatgtaaccggtttcatatgtgcaatttcatcaaaacaaacaaaaaaagtatccattttcactttatcttaataaagcgttggatacttttttaacaaatatattgtaatcactattactttattcctgctgtttctttttatcaagctccgcctttatttcattaaatacggccttggttatgtggtatctgtaaagcgcatagcacgatgccgccataaatattgcaggaacaaatgtagtacagttttctatccattcaagcgccgcagcggactgaacctgctgagctccgtcaaagcctgcaagctgaagaattattccaagcatctgagtaccaattcctgaggctatggcctccaccagaccctgaagagacactatggttccctgtctctgatttcctgtagtatactggtcatattcgcatacgtcatatattatcgcaggcattatctgccagtacgccgcagcccctactgcaatgcagaatatgaacacatacattccaaaagtcccatgcacaccggctattttttcgacagttatgaggactgcgctgagccctatgagaagtataaggcctgtacgtttgtctgtttttttgcatatggcagctataaatggaatgaatgtcattgaaataacggctctgaaaaacagaattcccgatatttgtcccgatgacatcccctgattgtaggtgcagtaatacactatatcagacataaacataccatatgcggtaagaaaaaacaggctcgcaaacagcaggcatttcataggcttcagcttcagcacctgaaaatattctctgaacatctttacaatgctcactctctgcctgtcctcagctgcctgcagcacatatttatccttatgcctggcgcttctaaccgtaatcattattgatacaaatacagctgcggcaataaaaattcccgtaaccgaccacgccgtctgcgtactgatattcctgctctgcatcagttcaaccatcattgtaggaagcgacattgatatcacagaacctatcaggttgaaaaacgaagcgtatgaccttagcaccgttctttcgttatagtcctgcgtgtattcggctccaagcgcaaggtaaggcacaaagaaccctgtgtatgatgtccagaatatgattacgcctaaactgtaatacgaggtaacgaaacattgatttcgtcaaagtccgtttttt

SEQ ID NO: 886 - DNA, 30221 bp, Unknown
  16S sequences of unknown bacteria
gtatgcctgtagacaagcaccctaagctgggtatacctgcagttgaggtaatacacacggtacttcacgccggcggtaaattcggcggaggaggatacaaggtttccggaggacttcacggtgtaggagcatcagttgttaatgccctttccacccgcatggaggtcgaagtcaaaagagacggcaaaatatacagacaggcctatgaacagggcaagactgtaagtaagcttgaggttgtgggcgatactaaaaaaacaggatcaaagaccaccttctggcctgacgccgagattttttcggaaacaactgaatacgattatgacactctgcagcacagactgagagaaacagcttttttaaacaagggcatcaaaataactcttgaggacaaaagagaaagcaataagaaaaaagaagtatttcattatgaaggcggtatcaaagagttcgtaaagcatatgaaccagaacaaagaagcgcttcataaggatataatatattttgaggtaaaaaaggcagatgtgtgcgaagcagaagttgcaatgcagtacactgacagatacaacgagatgattttatcctatgccaacaacatcaacactgttgagggcggtactcatctggttggcttcaagtcagcgctcacaagagtattcaatgactacgcaagaaaaaacaaattcttaaaggacagcgatcaggctctgtcgggcgaggacgtaagagagggccttacagctatcgtttcggtaaagcttgccgaacctgaatttgagggtcagacaaaggcaaagcttggaaacacagagatgagaggttttgttgaaacctcaacaaacgagaaccttatggctttccttgaagaaaatcctgcgcaggcaaagatcataatggaaaaatgtctgagagcagcaagagcaagagaggcagccagaaaagccagagagcttacaagacgtaaatcagtcctcgattccaactcgcttccgggcaagctggcagactgctcctccaaggaccctgctgtttcagagatatttcttgtcgagggagactctgcgggaggcagcgctattgacggaagagacagaacacgtcaggcaatactgccgcttcgaggcaagattttaaatgtagaaaaagcaagacttgacaagattttaaattcagatgaaatcaagaatatgattacggctttcggctgcaatataggcaatgactttgatatcgaaaagctcagatatcacaaaatcataataatgaccgatgccgacgtagacggagcgcatatcagaactctgcttctgaccttcttctacagatatatgcctgagcttatcagacagggctatgtctatgcggctcagccgccgctgtttcaggttaagcagggcaaggatatttattatacctactctgacagagaacaggatgcgctgctggcaaagcttaacggcaagggcaagatcaatattcagagatacaagggtcttggtgaaatggacgccgagcagctttatgacactacaatgtcatttgagcaccgtacattaattcagattacaatagatgatgcgaccagagccgatgagattttctcaactcttatgggcgacaaggttgcaccgagaaaaaaattcatcgaagaaaacgctaaatacgttaagaacatagacatttaggaaaggaggagcagatgacaactttattggaagaccagaaaatgctgcagcatgagatatatgatgaaatgaaaaattcatatattgattatgccatgagtgtaattgtcggaagagctcttcccgatgtaagggacggactcaagcctgttcacagaagaatactctttggtatggacgagcttggggtaactccggacaagcctcacaagaaatcagcccgtatagtcggcgaagtaatgggtaaatatcaccctcacggcgacagttcaatatatgatgcaatggtaagacttgctcagccgtttaacatacgctacagactggtagacggtcacggtaacttcggttccgttgacggatatcaggcggcggcaatgcgttatacggaagcaagaatgacgccgtttgcactggaaatgcttagagaaatcgacaaggatacagttgactttattcctaactttgacggtgaggaaaaagagccgacagttcttccatgcagatttccaaacctgctggtaaacggctcaaatggtatagccgtaggtatggccacatcaattccgcctcacaatctgggagaggttatcgatgctgctgtcaagatgattgaggataaggaatgtaccaacgaggaccttatcaaaatcgtaaagggaccggattttcctaccggcggcattatcatgggcaagaacaatgccaagcaggcctacagaacaggtcagggcaaggttataatcaggtccaaggccgagattgaagagtccaacagaggcaagcaccagattatagttactgaaattccttatcaggtaaacaaggcgagaatgattgaaaaaatcgcagaccttgtcaaagagaaaaagctggagggtatttcagatatcagcgaccagtcaaacagagagggtatacgcatagtaatcgagcttaaacgagatgtaaatcctcagattatgctcaataagctttacaagcacacacagcttcaggaaagcttcagtatgataatgcttgccatagtcaatggagagcctaagcttctcacgctctatcagatgcttgacgaatatctgaagcatcagaaagacgtggttacaagaagaactcagtttgatttaaacaaggctgaggcgagagctcacatactcgaaggtctgcgcattgcgcttgacaatattgatgagataatagctacaatacgttcaagctacaatgacgccaaagaaaagttaatggaaaaattcgctcttacggacatacaggctcaggctattctcgatatgagactggcaaggctgcagggtttggaaagagagaagatagaagctgaatatgcagagctgatgaaaaaaatagcatactacaagcagctgctttcagatgaggatatgcttatgggagtaatcagagacgagcttcttgaaatcaaagaaaaatacaacgacaagagaagaactaaaatcgttgccgatgcagctgaaatggacgaggaggatcttattgaagaagaacaggttgcagtaactcttactcaccttggatatatcaagagaattcctgccgacacatacaagactcaaaagcgcggaggcaagggcatcacaggacttactacaagagaaaacgactttgtaaaagacctgattatgacctcaactcttgattatctgatgttctttaccaacacaggtaaggcgcacaagattaaggcatacgaaattccggaggcaacaagaactgccaagggaactcctgcggtaaacttcctcaatctgatgcagagagagagaataactgctgtaattcctattcaggagtttgctgaggacaagtatctcatagccgtaaccaagcacggtacaatcaaaaagaccgctttatcaaactttgataccaacagaaaaacaggtcttatcgcaatgaacttaaaggacggcgatgagcttatcggtatcaaggaaaccacaggcacaaacaatgtaattattgttaccaagatgggtaagtgcatctgcttctcagaggaagatgtaagacctatgggcagaattgcaggcggtgtcagagccatcaagcttgagggcgatgacgaggttgttgctatggagcttgttgaaaaggatcaggaagtgcttgttgttacagaaaacggatacggcaagagaacaaaggccaaggattacaagatacaggtaagaggcggcaagggtcttctgacttacgacaagggcaagttcaaaaagacaggtccgcttatcggagctatggttgtagatgaggatgacgaggttctccttatcaattccgacggaataatcataagagttaaagcctgcgatatttcaatgctgggcagagcaactcagggtgttaagattatgaaagttgaagaaaacaccaagcttataactatggctaaagtaatcagagaagatgaagaagaaaagcctgataccaaaaaagaagcaggcaaaaatgaagaacagcttacgttagtttaaaagaaaggcaatagaaatgaaaagagtattttcaggcgtacagcctacaggaaacattcatctcggaaattatctcggagctttgaagcagtttgtggatctccaggaggatcatgaatgtatttactgtatcgttgatgaacatgcgattacagtacctcaaaatccaaaagagcttaaagaacacatacttgatgtggcggcgctttatcttgcaataggtgttgatcccaaaaaatcaatagtatttgttcagtcagatgtatcgggtcacgctgagcttggctgggttttaaactgctgtgcaaacacaggcgagcttttcagaatgactcagttcaaggcaaagagcaacggtaaggagtcggttggcgcagggcttctgacatacccagttttaatggctgctgatattctgctttatgatacagatgtggttcctgtgggtcaggaccagaagcagcacatagagcttacaagagatctggctataagggttaatcatcattacggcaagacatttgttgttcctgacggaagatttatgaaagcaggtgcaagagtaatggcgcttgatgaccctacatcaaagatgagcaagagcgcagaaaacatacacagcagaatttcactgcttgataatgatgcaaagattaagaaatcaataatgaaagcaactacagactctgacggtgttattaaatatgatatcgaaaacaagccgggagtaagcaatcttctgagcatctacagcgcgcttacaggaactcctgttcctgaacttgaggcaaaatatgagggcaaggggtacggcgatttcaaaaaggatttggtgcaggttacaatagatgcgcttaagcctatcaaggaaagatacgaagaaataaggcattcggattatctgatagaagttctgaaagacggagcagaaagagccaatgctattgcaaagaaaacaatggcgagagttaaagaaaacttcggactgggactgtaaattaaagagtgatattatagaggtttgttaaggcagacctctatttatttttcaaaaaaagaacattaacacaagaacatatgttttataaaatgtatgtatagcaggaataattcttgtgggaataggagtaacctttgaggttaaggctgatataattgtgcttgcaggcgaaggccttatacttgccatatgctttacgtttccgattaagttcggaacaatgaaaataatatttgatgtgtctctggtagcagcggcgtgcattacatcacttatatttgtaggcggcattacaggagtcagagagggtatggcagcagcggcgctgcttgtcggctgcgttgtaaaaatcacgaacaaggttatagagaagataaaaacagaggcttcaggcaggatgcactcagcaggaagtatagaaaagccggggaattattccccggtatttttaagagcagcatcaattcctttcgaaataaaagtcaagacaccagttaggctttattttattgaaggcagatgatataatcaataataaaattaagtgattaaggaagagatttggtcgtgacgcatctttatatttttatatatataatttcattctttacaggagtagcctgtttgagcatacttatgctgtacaaaaatgattttccgaaaatgtttggtcttgattttaatttgatgagaaaatttttggttgcatttttttctttctttgccgttaattttcttattttctacaatgaatactttattcgggaagcaattatgaaatctgttctgcttgttatatttgatattttgcttatactttctgtttattatgtaataaagcttaactgtatcggaaatgaaggtctcgttgaaaagatttttctgattacaggtataatatatatggttatgtggacgcctgtatacttttttgaattcagctggtttccaccattgaaacctataactgaatttattgcagatgcaatactgtcatcggttacatcagccattcttataatttattctttgtatcagcataaaagaaactgtgacctttgggagaaaaaatatctgataacgcttaatgttattatcagtgtttatacctgtatgctttattgtgcggatttatttacagaactgtcgcgtgcatatgtttcattggaggcagaatatccttatctgtatgatccgatatttataatcttcattatagtgaatgtctatactgcggcataccttattatcagtgtaaagcaggtcagaagcaccggatttacagaaatatttgaagttcaggagacagaagaaaaagcagatatattagaaaaggtatctgcaagagagaaagaagtaatagaacttattattaaaggtatgaacaatactgaaatagcagaggagctttgcatttcagtctatacagtcaaaaggcatgttaataatatttttaaaaagcttgaggtaaaaagccggtttgagcttttatgtcgcatacaggaattgaaatagcagtgaattatactgcatagcacccaggtaccaaaacctgatttggagcctgagtgctatttttatatttttcagaatattatataatcgacatcgatgaatataatcacaactaaaagaaagaaaggaaaattaaaatgaaaaagaaaacaggcaagattttagtgctgctattttcattgacattaatccttggaatgatgtccggctgcggcagcaatgacagcgcggcagatcagatttttaaaaacggtaaaatctataccgaggatgctgacaataatattgtaagtgcagtagcagtaaaagatggcaaatttgtatttgtcggtgatgaaaacagtgaaggacttaagaaccttgaaggaaagaatacagaagttatagaccttgagggtgctatggttattccgggaatgatagatgctcactcacatcctgaatcggttgcgctggactcgtggagtataacaatgccgtggacttatgatgtagaagaaatgcttaaatttgtgaaagagtattgcgaagaacatccagtagaagaagttccgttctttgtaggtaagtactatccatcagacttattcggagcggaaggacctaaagcctcaatgatagatgagtatgtatccgacagacctgtaaagctggttgacttttcggatcactgctgctggttcaattcaaaagcaatggaacttatggggatagataaaaacacaccggatccagaaggaactgctgaaattgtgagagataaagacggaaatcctacaggttggtttaaagaaggcgactcatacagcccttatcttgaaaatatgtataaggcgatagactggtatccgcctgaaactgttgatgatgaaatgtggaaaacggttattgactattatcattcacagggagttatcggtatgggtgatgcgataatacaagatgaaagcaatctgaaagctatatatgatatggataaggccggagaattaaatatgtattacagtgcaatggtactgttaaacggctacaaggatattgacaatgctattaaaacagtaaaagattatcaggaaaaatacactacagaaaatataactatagatactattaagtatttcgttgacggaactaatgaaataggaaccagctatgttgtggaaccgttcagcaatgatccggagggcaaaaatcacggcagcatggatatgacggaggatcagcttaaagatataatagttaagctcaatggagaaggtattgacctgcagatgcacgttgtaggcgacggcggatttagaaccatatgcaatgcaacagaggctgcacagaaagaatgcggagatgactggaaaattcagattgaaatggttcactgtgagcttattaatgatgaggataagttaagacctgccgagctgggcatcatagttaactggactcctcactggaccggcggatatttcggagatgctgctattgaatggcttggagaagaaagatttgactctatgtacaatcttcagcctatgattgaagcaggcggtattgtaaatatgggaagtgacgttgtttcgcagtatgaattccacagagcaagtcctttcttcggaatgcagactgctataagcagagtggatcctgaattccctatggatgaagaaaaatatccgggaagcgtaagacctgaaaagggcgcatgctatactatggatcagatgcttaaaggatataccataaattcagcgatacagtttagaattgacgatgttgcgggatccattgaagaaggaaaatttgcagacttatgtgtaataaaagaaaatctgtatgatgtagatgtcaacaaactgtcagaagtggagcctactgctgtaatgtttaaaggaaagatcgtatcaggagaattttaaacacttaatcatacatataaaaaagccggggaattattccccggtatttttaagagcatcatcaattcctatatcagcgacaattatttctcccagataatccttggcattacggcagaaatgtataggcttttttctgtgaaaagctatggtatagtcggcgctgacaggtatgttttcaatcttttcgcctgttacggtatcgccgtttaagcccgatggaatatccaccgaaaatacctttgcggattttctcatactgttcataagataaaccgcaaccagtccctcatcgtttaacttgccgtgaaagcctgtgccgtatacggcgtcaacgataatatctgctgatggattgctcattgactcaacattatgtatatccattatttttatagggtgctcgctgagcagcctgtaattggtaatcgcatcaggagtaacgggctctccgtctgtgaggataacagtaacaaacatattcatatctgaaagaagtcttgcgattacaaaaccgtcaccgccattgttgcctttgccgcagaaaaccgcagcttttttgcctgttgtaattccagacttatctatgataacatcagccacagctttgccggcgttttccatcatagtataatacgaaagcccggcggcatctgctttttcttcaagctgtttcatttgtttacaagtaacatattcgttcataatcaacctctttatatcgtaagatattcatatttatttaaaaatccggttacccttgatatgatttcatctgctccgccctgcctgtcagactccacgttaaaaggcataagcgggtcgtgcagggattttcgaagcaggcaccagccgccgtcaaaggctattctgacaccttcaaaattaggctttacaacctgcatatcctgctgctcttcggcccattcctcaagctcacccagtatattgtccgcatatgaggcaaaatcctcacaggttatagggagtcttaattctttggcttccagcggtgttttgagtgtgtcgataacagcgtcaagggttttgccctctgcggccagctttgccgctttaattactatcttagttgcaagatatgcgccgtcatcgaggaagtagttctctttgagcgcggcgtggcctgaggtttctattgcaagccagcattcctgccctgcggcgttgagctctatgcctttgttaatgacatttttatagcctctcttaaatctgagatgcttcatacccagcttgccctcaataaaatcagtaaggtgtgtgctggtgatactgtcggtaaccactgtggttgcaggatgctcctcggcaaccagtgcagcagccattgctacaattccgtttcgtgcaatctctctgcctctgccgtctactgcggcggacctgtccacatctgtgtcaaagataagaccgaaatccgcgccggtggatattacctgtagggatattgaagcaagcgcctctttgtcctccggattaggcgcatggtttgggaaagttccgtcagcttcaagatactggcttgaagaaatatcagcgcctagaggtgccagcacatctctggcataaaacccgccgctgccgtttccggcatctacagttattttaagtcctgcaagaggtctttcccttttgcctactccgtctatgataagctgcctgagatgactgcagtaaagctccataagattgcatttttcggatgcatatgtttttttgcccataacggttatggtattatccgcatattcagcttcgccaagacctgcgccgtctgcttcggcaaactctattatctgagaaatatcgcttttgtcaagaccgccgtctgcggtgaaatatttaaacccgttgcgttcataaggcagatgtgatgcggttatcataattgctccgtctgctttgatttcatcaaacactgtagacataaacattgcaggggtcgaagccagtccgcagtcaagaaccttaactccatatggagcaagtccgttgattatgccatatagcagcatctgtcctgacatacggggatctcggcctaccgcaacagtaagctcatcggtgcgctttcctgttttattacaaagccataagagaaaaccctttgaaagcaggcaggcttcggcatccctcagatttggaacaccgcttccgccgacacctgtaagggaaattcctcttatgtcgcttccgttctgtagtttttttaaattgtattcattcattagttcgctctcctgagatttctgtatatatatattatacttgcaacgggcaataaaagcaataatatggaaaccacataataaattattatttattaattttttacaaaaatcgactgaaaaaattataaaagaaacagttgaaaaatgtcgaaaaaccgtatatactatagaagtattgtatatatttaattaaagtaccctctttgattatataaactcaatatgtatacaacatataatggagaggagtttgctatcactcctttccattatccccccctaacatttacaggctgccttacgggcgccttttttatttcaaaaaacaaattcgggccggttattattccgacccgattattatattctcctatttccagaaatcagtgtcctctttaagacctatatcagcagccttgaaatgaggattcttgccctcttttctctgcttgcagtagtcgctcagacatctcattgccggctttataagtatcagtattacaggaatattgattacaaccataaagccctgaagcatatcagctgtatcccatacaagacctgctgttgcaacagcacctaagaatactaatatagtagcaataattctgaatacgataagtcccgtcttgcttacttctctgttcagtatgaatttcagacagccctcacagtatgagtagtttccgataagtgttgtgaacgcaaacagtgtcattgaagcagctatgaaaactggtccgaagcttcctactgaagtgctcagagcttcctgaacgtaagctgcgcctgctatatcctctgtaggaacaacgcctgtgctcaggcacataaatgcagtagctgtacatataagtagtgtgtcgatgaatactgaaagcatctgtacaaggccctgctttacagggtgggaaacatcagctgtagctgcagcattaggtgcggaacccatacctgcttcgtttgagtacagacctcttttaattccgtacattatacatgagcctgcaaagccgccgaatattgcgtggaaatcaaaagcgttgctgaatattgaaccgaacattgaaggtacgtttgtaacattaattcctaagataacaaaggacatcagcacatagatgatacccataataggaaccagaaatcctgtaacctttgtaagtctttttgctccgcctataacgataattccaaacagcactgcaaggataatacctattaaagcaggagtcttaggaccgtagaaatcaaacacttcaaatgttgactgcagattgtatgatgcaagcatattgtagcctacagcatatgtaagaattatgattactgagaagataacgccgagccatctctgcttgagagcgtcctgcatatagaaagcaggtccgccgtagctggaaccatcaggatttttcttcttgtaaacctgtgcgagagttgattcgacaaaagccgaagctccgccaaagaatgctgtaatccacatccagaaaatagcgccgggacctccgcagcagatagctgttgaaacacctatgatgtttcctgtgccgactcttgatgcggttgaaaccattaatgcgccaaaagatgaaataccattttcattctttggtttttctttgataactttgattgcttccgggaacagacgaacctgtacaaattttgttgcgaaagtaaaaataagacctccgacaataaggaatacaggtaaaaaccacggccgatataagacatcgcttatatgaagaataacgccgtcaatctgttttactagcgtagggttgttcataaataagtcactccttttatataaaatagaacaaaaaaatctgtgggggaatgcccacagactctaatattactacaattataagattttgtcaaagtttacttgacctgcccctgtccgtcaaacagcggaagctctcctaagaatatgatatcatctctgtttttggcgtcaccctcggctaaaactgtcattttgcccactgtgataccgccggcttctttaaccagctcctccatagccgcaagggactcgcctgtgctgataacatcatctataataaggacttttttgcccttgattttcgaaacttcattatctcccagatacagatgctgaatatgatctgtagttattgacttaacctctacggaaagcacgttttccatatataccttgacgcccttgcgcgccacgatatagtcattcataccggcctgtcttgccatttcataaatcagaggtatgctcttagcctctgctgtaagcataatatcaaaatcaggagccttttcaagaagctttgcggcagcgtgctgcgtgatttcaacatcgccaaaaagtataaatgcggcaatatccgtattttcacctacctcataaagttgaagatttctttttttgcctgcaatgtctatttcataatacataaaaatttctcctttgtaactgatgctgcaaaaaccaacaaatagattttagcacaataacagaaaaaaaacaacactgcagtcaggcagaccgcagcgtgtcaaactatgcaattattatgttataaaaggaaatgcttctatattataaaggaattacctctgtttctgatgtaatgtcaagcgctgccgcataagcaagatacttgtcacattcttcatatgtaagcatatctgatgaaatcagacctgtctgagtgtagtcgtcatttacaaacatctttgtaaacagtgaaccgcactgacctgtcatatactgctcgcctgtaatgcctgctctttcaaagctttctacgcagcccggagcatatacatatgtttcaaccagaactttcttgccgtcttttgtacctatagcttcggatacaaatgcgccctcgtccttaaccagaccttcatcaaggatttccttgatttcatcgtggtatttaggtgcaggcggaatgtgagataaaatcacatcaaacggtacaaatgtatgtcccttgtaggtttcttcttctctgctcagaagtcctgctctgtaaagaggagttgagaagtcaatgcctacaccgccgtatttaaagtttatattcttggctcccttgaaatgagtatccttgtttattcccatgtatactgtttcatcgtgcgcgtgttctactaatgtaacttccttctgacagcccttgaagtgtcttgttacaggaagtgaatgaggttctgtttcaaccataacaccgtccctgagtgcgaatgtagggtctgtcatatcggataatgctgtaaacggtgaccaccagaaaggcagaaatctcttagcttcaacaccttcgtataccatcataagaatgtcatcgcaggtatcaagaagctgcatgttcttcttggttacaacgcacattaatcccggtgccgagcctgtgcccattattgccattttgccgatttcagcgaattttttgccgtagtctgtataaagctgctgtacacagtcaggccaccattcgtaccactgcccgttgagtacgtctgttgctgcaaagtcctgataatttgctttaactttaagagccgcctctaaaacattctgtccaaactgaataggaagagcgtttacgataaggtcaacgccttcacctgccttggcgatactgtcaatatcgttagcatcaatataagtaccttcagcttttttaagaattttaactaattcatctacagccttatggtctgcatccgcacatatgattttttcaacgttcggttcttcgtccattctctgtgcaactgttgagccctgtgctccaacgcctacgattaatatctttttacccattttactttacacctcacttaattttgaaaatggttttcggaatatttttaattgagcgccctttgttaataatattatagccatatgacgatgaacaaaaccatagacgttttatcgcagttttgatataattatataaaaaaacgactataaatgaggattttatgttaatatcacgagaaaaaacagatttaatcgagggaactccgatgggttttaaaatctacgaggctgttcacgaggcggcgcattttcacagcgactgtctggaagttgtgttctgcgtcagaggcaatatcaacatcagaattgcatacgaggagctgacggtaaaggaaggagagataatccttatagatacggatgatgttcactgtatattctctgatgaggagaacctgctgatttccttctatatagaccagacctcggagctgtttggaaacagcgatcttgtaaatatgtcatttgtatgccacaagggagagatacatccttcaatggaaaaaaagatagactatatgcataagctgctgctgactatgttttatacctacatttcgccaagatacggcgaggatgagaagaaaagcatcatcaacagaactgccgtgcagattatgaacatagtggaggagaatttctcggtgttttactggatgaacgaccccaatcagtttcccgacgatgccaagaccagattcgagcatatatttgcgtatatctataagaacacccgaggacgtatgactatagaggaactgggcgctttagagcatataaaccccaattatctgtcgcagtttctgaagaaaacatcgtttctgggacttcgcgggctcagaacatatatcagagtatacaaggcggagcttttgcttctcacaacggatatgagcattaccgatatatcctatcagagcgggttttcagatcccaaatatttttatcgtgcattcaaacagtggtacggacacactccgcttaaccaccggaagctttacagagaatatgctctcagcaatgttgccaacagggaaatagatatagcggagataagagatgagcttgatgatctgatttcatattatcaggcggagcttcagcttaaattgtcagacatcaaataatgccctgttaaatctcaaggatatgtgatatactttttgaaggaaacttttttcaggagaagtaaatgtttttatcgagtgacttttataatttcctttatattgcagtaataattctgagcggaatcacattttcgctgacattaatactgagtgcaagagagaaagacgaaaaacacaaggcgctgtatctgtttacggcggcggtgtttgtttttatgataatagatttcatagtatactattatcttgacggaagcacctccggcggaattgtgtttgcaatgattacggtttccgatattatgttctgcgcagttgttacggcgtgggtctatctgcttgtggtgcaggcggatatgagagagcagatatcgatgaagcttgtcatagcggtttctgtaatatatgagattttatcgcagatactttcgcttatgctgggcagatatgactcatttatgcttcacgttcagagcgggattggcaaagtggtgcttcagattttaaatctgtcatacaatatagctataattgctataggcattatctgcatggctgctttttttaaaaaattccaaaagagcatcggcagggcggtaaaccttattctttcagggattcttataggttatatgatatggattatttactgggactacagtgtatggtttgaaacagaggaaaatcttatgtcgatatatgcactggatccgcttattcttatcactgcggtgttcagctgtgcgctcatatattatttctacaaaaaagatccgctcaggctcagagaaaaagagattgcatcagtcgatgcaatagccgctatatctgacaaatatggactttctcaaagagaaagagaagtcatagagcttcttaatgcaggactaagcaatccgcagattgcagagaaactgtttatctcagagaataccgttaaacgacacatcaacagtatcttcaaaaaaacaggaacggcaaacagacatgaggttctgttcaagattgcaaatataaacaaagtgaatatatagtccaaaggctgcccccaaaaggcggcctttaaaatttttcacaaagtataaaaagcagatgagccttgattttttaatgaaaagcggtagggattgctgctgaaaaagaggtgacaagagcgaactgtgcgaaaaaaaagaattgacagaaaacttgatgagtgatactgttgttagagaaaacagctttgattttaacgaggaggaatggaaatgaaaagaaaaggattggcgttaatactggcgctgacagtgacaattgtgatgtgctttaccggatgcggcgacaaaggtgtaagcatagactcggacctgtcaatggcagcagatgttgagaagtatgtaaatgcaatagatattgaatatgcatacgatctgacagaaaaacttgcatatgatgaggaatactgggactgcgaactgggctggagaactgcaggctcggatgcagaacacagatgtgcagatttccttgcagaagaaatggagaagatcggacttaccgatattgaaaaaattccgacaaaagttgataaattccagttcaatgattcaagccttacagttgacggaacagaaatagatctgacccctgcggcatatcagtgctcaggtacagacaaggacggaattacagcagaaatcgttaatgtgggcacaggctttgaggcagactatgacggtcttgatgtcaaggataaaatagttatcgcacaggttgaccaggccaatgagtcatggattgacggctacataagacaggctcacgaaaaaggtgctgcagcacttgtaagttatgcaaacagcggctacggcgaacttaatgaagatactgcaaatgttcaggatatatgctgcgcagaccttatccctacagtagcaataagctataatcaggcacaggacgttcttaaagccattgaagcgggcaacaacaaggcgactcttatggtagatgccgagtttgaacctgataaaggcacttcctataatgtagttggatatatcaaaggtaaatcctcagatcagcagattatgctgtcaggtcactacgataaatactggtacggcttccaggatgactgcgctgcaatcggtatggatttcactatagccaaggccatgatagactcaggatatgttcctgaaaacgatatcgcagttgttgcgcacggcgcagaggaatggggttcaacagacgctcagtttgactggacaaccggcgcatggggaatgatccatacagaaaaacctgaatgggccaagaaaacaatagcaatgcttaactgcgagcttcctgcttttgagccacaggacaaaactcttagagtttcatgtgttcctgaatttgctacaatgagcaaaatgcttataagcgagtccggacttgttgcacagacagacataaaactggatgcagagtcagttgatgcaagcaatatggaagatggtgtatcctacagatggcacggcgtgccgtatatgttaaacggcttcttaggcgacaaatttatgtgccagagataccatactatagatgacgacaaagacacatggtcagaagaaacaatgctcggcaacctctactggttcggaacttatgcaatctatatcgacaagactcctgcgcttgagcttgatatgactcagacatgcgatcgtcttgaaaagaacctgaatgaggagcttgcaaaggatgctgatgttgatacagaaggctacaaggctgctcttgcagacatgaaggctgcagcagaagcttacaacaagaagattgctgacattaatgcggcttatgaaaaagcaatggcagcaggagatgatactgatgcaatcagagcagagggtaagaaattaaacaagcagacactcaaggtatttgctgaaatccagaaagcgtttatggaaacaagccctgatgatgttgcatacggacatcctacaatcaacaccaacgcggaagtcctgcagggagcaattgcagctcttgaaaaagaagaactgtacaatgacgacgaaacaggagctcttgatgtgctttacaacctgaacggtgttattgaatataactactatatattcggagtaaagcctgctactgatattatgcagatgtacgaccagaaatatatctcaacagataagacttattggggaacagatgcaatgccgccgattgtatatacaggtgaaacaactcacaagctggcaagagatgccgaagcagaaaatgacatagactacaaggcagtgacaaatgtatatgagagtgctcttgcagacactatgaagaacatcaagctgtatgctgacagagaagtcaaggatatggcaaaggttgcaaagctgatgaaataaggaaataacggcaatatacaggaaggctctttcacagggcctttcttgaaaagataaaagatattaccttgcagttggcgcttacagacttgcggaaattatgaatttttagataattaacacccttgtgctattgcaaaacaggataaataggtgctatacataggtataaacgttttgagtgccctttcaattcgttggcagagcaacatagaaatgctctgcattgcatttatcttattttatattttttggaggttaacaaatgagtcagcagacacaaggtgttgcaggactgaaaaagcatgacattaaagtatcgggaatagtgtttatgctgtactgtcttgttggcgcgggagcgtttggtattgaggaaataatacctgcatcgggtcccggtatgacattaattcttttgatggtattccctataatatgggcatatcctatcagtaatctggttgcagagtgcggcgcggttcttccgtcagagggcggagtctatgtatgggccaaggaagccttcggcgagttctggggatttcagaccggctggtgggctacagtatccacatacatatgcaatggtacatatgttgctcttgtagcaggctatgtgagccagatgatacctatgagcgatattgccgttcaggcagttaaaataggtatgatccttattttcacaatcatcaatctgctgggattaaaagaggttggacaggtaagtacaattctttcaatcctcatagttatggcatttgcactggttgcaatagtaggctttatcaactggcagacaaatcccatggagcctgtgcttcctgaggactacagcatcattgacggtgtaggcggaggaatctgcatatgtgtatggatgtactgcggatatgagtgcatatccaatatgggtggagaggttaaaaaccctcaggtaatccctaagggacttatgatagcaatgccgcttgtagcacttacatacatactgcctactttaggcggacttgcaagtcttcctgcaggaagctgggaattctggtcaacagacggcggcttcagcggcgagtcaataggctatgcgacaatccttacaacacatctgggtcaggcatggggctatgtattccttgtagttgcaatcgtatcgcagtgcgcgatattcaatacatatcttgcatcaggctcaagaggcttcttcgtactggcagacgatcacctttgccctcagttcctggtaaaggtttcaaagaaaagaggcgtaccttatataggagttttatcactttcagtagttacactgatactgtgccagtcagattttacaacacttgtaagtatggaggttgtatttatccttgcaatttatataattattcctcttgcagtgcttaaattaagacgcaagcttcctcttgaaaagagaaaggaaagaggactgtactatatcagaggcggcaagggcgcaatggtattctatgcgggatgcccgatggtaatagcggtaatcgcgctgcttatcaacggtaccgactatctggctgtcggcctgcttgccttgctcagcggtcttgtggcatactttatctttaagattgcattcggcggtcttgcggttacagaccctgaaaatcaccctgtaaatcctaagacgaagctggctgcaggagatacagtgagagtcggtgtattccttatatgttcgggagctctctcattcttaggtcagttctggctcaagtggtatgaggttgattacggtgaatggggtcctgatgattacgatatgttctcagacagtatcccgcaggtgcttgaatatctgaaatggctgggacttgcagctgttgtaataggcatagttcttgcgattatcggcaggaagaaggatgctccgattcctgaaaaagaagcagatattgatgcgcttatggataaatacctgaacgaggaaaagcacgatttataacaggcataaaatacataatagatgacagcaaaactgcagctttacggctgtggttttgttttttggtttgtgtgagcagcgagatgaagtgaaaattcactgaatgaagtgaacaaaatgtaaaaaattgtttatacattcaggcagatttgtatatacaaaaaatacatatgctgattgaatgctatctgcaaaaattttataatatacttaggagtaatgaaaaatatgaaaggggaaagataacggtatgaaagaagtaaaatcaccaaaaaaaccattaatttattattacggaatagcgctgctgcttatattcctgtttaatatactcgtaatgcctttgattgcgcaggaaaaagtcaaagaagttgactatggtacttttatgagcatgacagagcagaagaacataggcaaggtagaggtgcaggattctcagattatatttacagataaaaaagacaaggcggtttacaagacaggtactatggatgacccgacgcttaccgaaaggctttatgagtcaggggcgaagtttaccaaggatatacagaagacaatgtcgccgcttctcagcggatttctcagtattatacttcctctcatcatattcataggactggggcagtatataagccggaagtttatggacaaggcaggaggcagcaatgctctgtcctttggactgggcaagagcaatgccaagatttacgttcagtcaacagaaggcatcagctttgatgatgtggcaggcgaggatgaagcgaaggaaagccttgcagagattgtggactatctgcataatcctaagaaatatacagaggtgggagcctcaatgccaaagggcgtgctgcttgtagggcctccgggaacaggtaagacaatgctggcaaaggctgtggcaggcgagtcaaaggtaccgtttttctccatgtcaggctcggaatttgtggaaatgttcgtaggtatgggcgcctccaaggttcgtgacctgttcaagcaggccaaagaaaaagcgccttgtattgtatttatagacgaaatagatgcgataggcaagaagcgtgacggtaatttcagcggcaacgacgaaagagagcagaccttaaatcagcttctgactgaaatggacggctttgaaggcaataccggagtaattattcttgcggcaaccaacagacctgagtccttagaccccgctctgacaagaccgggaagatttgaccgccgcgtgcctgtagagcttcctgacctcataggcagagaggctatactcaaggttcacgcaaagaagataaagactgcggatgatgttgatttccatacaattgcgcgtatggcggcaggcacctccggcgctgaacttgccaacattataaatgaggcggcgcttcgcgcggtaagaaacggacggactacagtgcagcaggcagaccttgaggaaagtatagaagttgttattgcaggataccagaagaagaatgcgattatgactgacagcgagaagaaggttgtggcttatcacgaaatcggacatgcgctggttgcagctatgcagacagagtctgctcctgttcagaagataacgattatacctcgtacatcgggagctctgggatatacaatgcaggttgagcagaacgacaaggttcttatgagcaagcaggagcttgaaaacaaaatcgctacatttgcaggcggcagagcagccgaggaggttgttttcggcgaaatcacaacgggggcagccaacgatattgaacaggcgacaaagcttgcccgcgctatgattacacgctacggtatgagcgatgactttgatatggtggcaatggaaactgtaaacaataaatatctgggcggagatacctctttggaatgtgcggaagaaacacagagagaaattgacgaaaaggttgttgaactggtaaaaacccagcacgaaaaggcaaggcagattttacaggaaaaccgcagcaagcttgatgagctggcaaaggttctgtacgaaaaagaaaccattacaggcaaagaatttatggaaattcttaataaatagcattaaaaaaggctgcttcggcagtctttttctatggataaaatattagctgaaacttgatatttttgagtaaatgggataaaatattagctatgatagttattaaaagaaaaacaccgagagagatgcagacagatattgcgctgcgtattagagaaataaggaagcggagaaaaatttcacagcagagacttgccgagaagtcgggagtgagccttggctctgtcaagcgctttgagagcacaggtgaaatttcgctgaaatcgctgattaaaattgcaattgccctggaaatagacgatgagctttcagagctgtttgcagaggtgccgtttttatctatagaggaaattatcaatggacagaaatagacagctaaaagttaattatgacggaaaaaccgtaggcacactggcactttacaaagagcatattgcagcttttcagtacagtgaggagtggcttgccgagggattttcaatcagcccgttttcactgccgatgagccgtaaactttttgttcctaaggttttgccttttgacggactgttcggagtcttttcagacagtcttccggacggctggggcaggctgctggtagaccgcctgcttctcaaaaaccatattaatccggcggaagtggagagtcttgacaggcttgcagttgtgggaagctctggtatgggagctcttgagtatgtgccggaatataaccttaaagggaataaaatgaccggtaatctggactacattgcaggggaatgcagcaggcttcttgcaaccgaatatactgaaagccttgatgagcttttcagcctcggagcatcttccggcggagcaaggcctaaaattcttactgaatttgagggagacccttggattataaagttccctgcgcctgaggacaaaaaagaaatcggcagacaggaatacgactatgcggtttgcgcagggcagtgcggtatcgagatggcagaaaccagactgtttgcatcaaaaaaatgcgagggatattttggtacaaagcgatttgataggagagtttcagaaaacggaactacagagaaaatccatatgatttcagtttcaggtcttttggaaacttctcatcgcgaccttgctcttgactatgatattctgatgaaggcaactttagagcttacaaaggactttaatgaggttgagaagctgtacaggcttatgtgctttaacgtttttgctcataatcgtgacgaccatgccaaaaatttcagttttctttacgactttgatgaaagcaggtggaaactttcgcctgcatatgatctgacgtacagcaattctctgtggggagagcatgcaaccagcatacatggaaatggaaaggacccgaaagaggaggatttgcttgcagttgctgatatgatttgtatgagcagaccgtatgcagaaaaaatcataaggaatgttaaaagttgtgttatggagatgctggggaaatatctgagataacaaataaggcaggcaccaatcaaagtgtctgcctttgctgaaattatctgctgcgtatatcctttgcctgcggcatcatttgtctatagtagaattctgctgctgtcggagagtgtgtagagtgtgccgctgctgccgttgatatcgactgtttcttccgatctgatgttttcaaaggaaacctgaccgccctcgcccgcggtttcataaatgtacctgagttctgctccttgcggattttcatatactacagtctgcattctgttatcgtattctgaaacaaatacctttgtataaccgtcgggaatgcattcaggatagtaaaatccaagctccagctttgcatcatctgtttttgcaaaatcaatttccgtagtctgtccgtaatcggtacgcttcatttcgatatgagcatttatagcggcaaatgcggttgcggcaagcaccgcaacgagcgctgcggcgataaggcctatgcgcatagtgcgcttttttttgtatgtcattatataatctcccttctgagccttgcaggcttcgtgaagattattgtaaatggcttcatcagcttctttcgaaagggttatgctgtccatttcttttgtgtatttttcaaaatatttatctgacatttattcttcctccagcctgtttttaagatgttttcgggctctctcaagccttgaggttacagcagatcggctgattttttgtatttttgctatttctgctgtagagtagccctcataatagtagaggtatatgactgtacgttcttttacagacagtgacattaccgcatcggtgatttcaagtgtgctgccggaagtatagggaatatcttcgggaagcttttcgcttgcgtggcgttttagaaacctgagtctgtctttgcaaagatttgcggtaacggtcataagccacgcgcgctctttgtctttgcagacggaagctctgttctggataagccgcataaatacatcgtgacagatatcctctgcctcacctgtggaatgcatatatgtcagtgcaagacgatacactgagtttttgtgttcattgtaaatctgtgaaatgttcaatactatacctcgcttttgagtactcgtatattaaacgaactgacatatatgtttatctcatacaaattaaaaaaatatataataaaaatgccggacacggaattgcagccgctgtatccgacagaaaagctatttatgcgatttaggagctcgcttgcgaacaggcagcgccagatcctgaaaggttcttcccagcttatcgtctttggcgatcaaaagcaggtcgctgtccatattatttaatgcatgcagaacagctgcatatataccgattgccactgacggatcgcctttttcgactttccatagagttgcccggcttatatctgctctctctgcaaccagtgccgttgacagactcctgcgaagtcttgcaagctttatctgctctcccattgtttccagtatctgcggtacagccggccaaacaatagcccgaagataccgtttagcaaaaagcatcttgcaagcaacataggtgtaagcgctccaaaagcagtagccgttgcaggcagatgtcctgctgcaaacagcagagcagagatgatattggccgatataaaaattatatcaggaagcttattctttggcgtgcttctgaagaaaagcttccatagaataaatgcaataagggacatgaggaacaatttcataaggatttcttcgacgataccgccgtaaagaacagcagctccaaagcctgcggcagacagtcacgctcctgttatggagctttgaattaaaggctcacatgttccgaaggtccagtaatccagactgaatacaagtcctgcggaggttgccagcgcaatggttttaaacagtttgtccctttctatatacagtggtatccaaagacctgttttgtctgcaagaatatatccgaaaaaacagcatactgcaacaagcaggctgccctgaactgctgagagtataatcagcgctgttttgcttccaagctgatttatgtcacctgcgataatatctgcgggataaagctgcatctgataaaaagctgtcagaacaaccgcaggaatgataaccggaagcattgcagccgaaaaaagaaacggctttttaaattttttcatctgccgcctcttttccatatatctcaacacagtaacccttgtggccacattccgggcatttcagttttcgggtcgcaggtgtgtgagctgcaaaaaaagcctccttaaagacaggtctgaaaatcctctgacattccggacagatatacagagtatttctgaaatagtacattgaaatccatactcctaaggtaattataacaggcagtccggctgcaaacggccaccatatcccctttgaaataccaagaatgagagttccgatttcaattatgtccattattactccaagtacgatcattaccgcatgcactttgcgcagtttttttctgttgtccacagtaccggctatatcacttattgaatcggcagagaaatcgcctgcaagctttatgccctgcctcagatcttctataagggcaagttttttttcatttgcttttatttcactgcggagagctgtctcctgctgctgcaggataagagctataacctgctccggatgagcctcgtcaagaatttctctgatagagtctatagacagaccaaggcttctcaggaaacatatggttttcatttttctgagatcatcctctgagtagagcctcctgccgccctctgacagccggctgggaagaagaatactgcgggagtcgtaatactgcacagttctgacagtcactccgcaaagcttagctaattctcctgttgtatacattgacatagccttcacctcctttctgtatgaggttattatagagtattacgcagcgtaatcagcaagtggtatatacgaaataatggtttgaatctgtaaaatcacatatattaggtaagagaattatataatatatcataattgcagggggaatatttgtacagggaagaatatattctgaaggcttgaattatgatttcaaaaatgatataatcggtatataccgaaaataaaggaggcttattaatgccaagaccgcagaaatgtcgcagaatctgtaatgtgccgcagacagacagctttcgccctgagaaacacagaggggaaatccccattataatgacagtagatgagtatgaggttattcgtctggtggacctagaagaaaaaactcatgagcaatgcgcgcttcaaatggatatttcgagatcaacagtacaggaaatttatgaaaatgcaagacgtaagcttgcagcctgtattgtttacggcaggaagctggttattgcaggcggtaattatcgtgtatgcgacggcagggagaattgccgatgcgaacttaaatgccggcaggcagataataagaagagaacagagtcagaagacagaaacaagggaggtttcattatgaaaattgcagtaccttatgaaaacggacagatttttcagcatttcggacatacagagagatttaaactctatgagactgacaacgcagagattattaagtctgaaattatagaaactgcgggcagcggacatggagcgcttgcaggatttctgatgaagcatggtgcagatacactgatatgcggcggtattggcggcggagcgcagaccgctctggctgaagccggcatcagattatacggaggtgtaagcggtgatgcggataccgcagtgacagaacttctgtcaggaaagcttaactataatccggatgtacagtgcagtcaccatgagcatcacggtgaaaataactcctgtggcagtcacagctgtgggaataaaggctgccactgatgacaaataaacgcatggagataacgaggaagtcttttgagcagattcctttctggacagaattaacagaagaagaaaaacagcttatacaaagaaatgcttttttgcgcagatatgaaaaaggtgcttttgtttacggaggcgctgatgaatgtctgggaatgcttttgctgcttaagggcaggctcagaacatctctgctttcagatgagggccgggaggttaccctgtttaatctgcatccgggagaaatctgtgtgctgtctgcttcctgcattataagtgagattacttttgataccggcatgactgccgagaaggtcagcgatatacttgttatcccgtcggggacaattgactgcctgcagagcagaaatatccatgtgaaatgttttttatatgaactggcgattgggagattctcggatgtcatgtggtccatgcagcagattatgtttaaaaggctcgaccagcgtcttgcaggatttcttgttgaggagtatgaaagaaccggagtaaagaacatatatattacccatgatcagattgcggtgcatatcagctctgcgagagaagctgtggcccgaatgctcaaacggtttgctgaagcaggtctggtagagctgaagcgtggagaaataaagcttgaaaacatagacgaaatcaaaaagcttctgtaaatgagcagctttacttcgtatatataaagagaagaaaaagagtgatattaaaatgaggatgttgctctttttattttttgaaatttttgatgtaaagtgtgaccaagtcacagtaaacggatttcttatgggttagaatgaatgtaacataaggaggtgcagcagatgaaaattacactgaacaaagataaacagatagttgatgtgataaaagaaggacttgagcatacgggcggatattgcccctgccgtacggagcgtacggaggaaacaaaatgtatgtgccgggaatttaaggagcagattaaagatcctgaattcgaaggcttctgtcactgcatgctctattataaatcaattaaggattaacggaggggtaaatggcatcaggaaaaactgctgtggtgaataagaaaagatgtgtggcatgcggggcatgtgaaaaccaatgccctaaagctgcaataaaggtatattgcggctgttatgcggctgtaacagaagataactgcgtggggtgcggtatgtgtttaaaaatatgtcctgccggtagcataagcttaaaagagaggtgaaactttgaagaaaaaacactggtatgattatttatggatatggtctgttctgttttttgctctgggctttttcaatatattgtttgcatggcttggtatgattgattttctgctgcccctttgtattgcggttattggcggaaataaatttttctgcaatcatctctgcggacgcggacagctgtttgccagactgggcggagaattgaaactgtcacgatttaagcaaacccctcgctggctgtcatcaaaaggattccggtacggcttcctgattttctttttaactatgttt

SEQ ID NO: 887 - DNA, 4399 bp, Unknown
  16S sequences of unknown bacteria
cgccgctgccgccttctccggtgccggcgttgccactgttgtcgccgccgccttccccggtaccggtattctcatccggcgtttctggctccacgggtacatctggctccaccggcgtggtagtgtcaggatccactgtctgcgtgtgattgttgctaggccggctgccgacggaagcgttggccttgctgtcctgcagccggccagaggtgcagccgatagtgccgtcggaattgacgtacataatatcaagttccgaggaggtcagttcatccagatatgggttaaagctttcattgaccacctgcaccagctcgtccacattgggcaccacatagctcaaattggcatgatagcttcggctccatacgcttttcgtcgcgcagggcatcgtaatgaagttaacgttttcgctggtcaatccgccgaaaatcgcctgctggccgaaccaagccagattattgatcgtcaggtccgtagtcacctgctctgtaaaaatgcgggcatattcaaagacctttgtcattttatcaatttggagacactgctcgatcaacgctttcaggaaaccctgctgggtttcaatccggcccagatctccgttggcatagccgtttttcccttcgcggaagcgcaccacacccatagcctgctcaccgttgagcttttggtagcctttctgcacatggatggacaaatcctgagaaggatcctcataatccatgttgcggggcacgtcataccatacgccgccgatggcgtccaccagctcgcccacggcctcccattccacaaccacgctgtaatcaggcacaaaacccaccagctcgctcacttctttgtacagcgccttaataccgtcatcaccgccgccattaaagttgtatacggagttgatcttcttcacatcccagttgacgttcaccatggtgtcgcgggggatactcatgacattcatttcctgatttttcacatcataggctgccaggagcacggtatctgtgttgccgccgccgccggtgtcgcggccgatcaccagaaaggtaaaaaagtcctctttccggtcgccggacagcttcgggccggtcaattcaccgaattcctcttcttttgtgaccggatccggcagttcaggccgctggaaaaaggctactgcagccgccgttgcacacaacacggccgcggccagcgccaaaacgaccagcagaattcgccgctttttctctttcggcgaaagaggctttttggctcgtttcgcccgtttctcgccgctcgccgccgccgcgcgggcgccggcttctttcttgccaaatgccatatctatctttgtcctttcagaaagtgcagggcttccaacgtcctctcatgcacaggactgcccagtttctccatgcgctccactgtgcgctgcaaacacaactccaaccccttgtccaggctttcttctgtggcccgccgcagtgtctccacaccaggatacttccggctgggttcaatgcagtccgccacataaatcaccttctccaggggcgtcatatccgctttcccggtggtatgccagcgaatcgccccgtacaccgcatcgctgacgccaaatacatcccgtgccagagcagcgccggttttggcatgcaacaactgatcctggctgcactccactttgtctgcggtaaggccatagcgctcacacagtgccagttgttcttcccggctgcactttttggtgcagtcgtgcagcagagccgccgtgcgggcttccttttcatcgatgccacagcgccaggccaaacgaaccgcttcctgctccgtacccagcacatgagccatgcgcgtgcatttgagataagacagcgccacgctccgcagcgcatccagcggaagatgccggagatcggccttcgttccgtaaaggtgttcccgctgaatgtacccccacaccggcgggctcagcagctctgcccctccaccccgtgccagctgggcacggatctcactggacgcggcttttttcgcttccatgggaatccggcgtatcgtcgcatggaaattgtgttccaacagcgggagcatacgcgcaaatatctcctgttccccagcactgtcccgagcaaacgtcccgatattcgccagacgcatcagcgtctccggctcgtgccacaggtgcaggatgttcagcatatcgctgcccatcagcagccacaactccgcgtcagggtattgcgcatgcactgcgcgaaccgtatccacgctgtaactcttcccctccctgcgcagctccaggtcggacacctctgcacagggcactgcgccgaaggccaagcgcgccatttctaggcgctgcgcattgtcgggcgaaccctccggtaaagttttatgaggcggcacattgtccggaacgatcaaaagtttatccagccccagcacgcgccccgcttcctccgccgcatgaacatggccaatatgcggcggattaaatgtgccgccatagataccgattcgcatgacgtcgccttccttttcctgcttatttcttcttcgaccggggcagttcgatcttgcgcttggtcttgtcctgctgcacgcggaacaacacgaaccgatttccgatcacctgtaccacttcgccgtgggtcgccccggcaatggcctgagccgcttcccgcgcgctcagtgggctgttttccagcacattgcctttaatcaactcccgtttttccaaaacgccgtcggcctgggcaatcagattttcgcccacgccatccttgccaacctgaagcaccggctccagcgtattggccaaaccgcgcagatatgctctttgtttacttgtcaacatgaatatttttctccctgcaatatttttcgaattcactgcggaaggccgacaaggccttggcgcggtgagaaatgctgttcttttcctccgccgtcatctgggcgaacgtctttcgcagcttcggcacaaaaaagataggatcatagccgaacccatcttcccccataggggcaaaggcaatggttccgtcgcatacgccctgggccgtcagcacttcgccggcggggaacacgcaagcgatacagctgtaaaaatgggctgcgcggttggtctgcccggtcaaggcagagagcagcagccgatagcgctcggtatcgctgagcccttcgccgccatagcgtgccgtatacacccccggcgcgccgttgagcgcatccaccatcaggccggagtcatcggaaatagccggcatccgggtggccttcatcacagcctgggccttgagcagtgcgttttcgcgaaaggttgttccggtttcctccacttcaatgtgcatccccagatcgctctggagcaccagctctacgccaaaagccgccagaatggcgctcatttctttcatttttcccggattatgagacgctaaaacgattttcacagttttcttcctttctttctatttttcttctgcaatgcatccttttggcatcagaaatgtccacacgcttcagctttccaacagcctcttctgcgctgcaatcagttcgtccacacctttggcgcacaggcgaaccagttcctgctgctccgaaagcgtaaaagcgcggccctcgccggtaccctgcagttcgatcagctcccctgcatcgttcatcacgcagttgagatccaccatggcatggctgtcttcggcatagcacagatcgagcagcgcgcagttatccacgatgccggcgctgacgccggccacataacctttcaaaggccactggagcagcacgccttcctccatcaagtgccggcaggccagcgccagggcgatataaccgccggtgactgaggcagtacgggtgccgccgtcgccctggagcacgtcgcagtcaatggtaatcgtgcgctcgcccaatttttgcatatccaccgccgcacgcaggctgcgccccaccaggcgctgtatctccgcgctgcggggactgagcttgagcttggaaacatcccggcggctgcgctcccggttggcccggggcagcatggaatattccgctgtgacccatccctctcctgccgccacatggggtggggtacgctcctccacgctggcgcagcacagcaccttggtatggccgcactcgatgagtacgctgccttcggcaaattccgcaaaccccggcgtcagtttcaccggacgcagagcatcataggctctttggtcgattcgttccatctggaaatctcctttgtttcgtattccaatccttttgcgcagggtgcagttcacaccagctcccgcacataggcctctgcgtcaaagggctgcaaatcttccatgccctcgcccaagccaatgaatttcaccggcacctgaagctcccgggcaatcgccacaacaatgccgcctttggc

SEQ ID NO: 888 - DNA, 3666 bp, Unknown
  16S sequences of unknown bacteria
ttccggaacagacgcatatgcagcaaaatcaacagttttaagtggaacaatgctctttagattatttgtaactatttcaacaggataagaatattcatcatccactaatactcgtgttttaaacctagataaaaaattcatttcgaatgttactgtattcttaattgttcccaagaagacaatgtagacattgtcttctttttcctccaaatttaaccctgttttttgttcattagccgcatgagtaataatactttttgtgatcgtaattatacaaaaatcctttactattgtatcgtttatatttacagattcaaaatcgtgattagtttttgcggaagatatctcttttgaagatgctttagattccgttttcgtattagcatttttgccacatgagcaagcagagacggcaagccctactactaacaataatgcaattatctttcttttccccatctcttttcctccaactttcaaatatatactcatccacctatttaataaatcgaccgattattgatttaacgctttttaacttccaccgctattgtacttcatattggaactcacgtcccttcgttctcgcttcctttgacacatcgtgcataagcgtgctcttgggtcataagctttcaaatcgttctctctgcaaaagactttgttcctttggtcaggtttgttttgataatggcaatctccaaggatgtgataaaagtgcgttcctgtgtttaagatgtattgcccgcccatataatcaccccctttttctactttttatctgagtgtaacacataagtattcaaatgtcaacaaatgtgttcgcccgcgtcccaaaagtatactatactcaaacaggggtatatttatggggcaaaatcaattgaatccctgcttggttggtcgcgtgatcgcgcggctgcgggcggaaaggggcatcacgcaggaagtgttgagcggactttcggatatcggcaggactcacctaagtgccattgagcgcggcgagcgcaagccgacattggagacgctctaccggatcagcaacgccttcggcattccaatgagcacaatcgtggtagagattgaaaaagagatcgccaaaagcgaataacgggcaagcgcgtagtaacgccgcttgtccgttttcatttttatcggctccccatagtaacgcacacaatcgccttttccccaaacttttaaacaaatcatgaatttctcccatctgcattgcaagtggtgggaaagtatgctaaaatatttcttgtgaattttcataacaaaagcagcggctgacgctgcggaaaaggaacggaatactatggcattttgtaaattttgtcaacacgaattggacgagggcagtccggtctgtccggcctgcgggcgggacaatgcggccgaggagctgacctccgctgtaccggaagccgaagcgccggcagaagctacgcagccgctcacgggcagtgcaccggccgatgccgccgcaccggaggcagacgcagccccggcagctgacgcagatacggaacccccggacgcaaccgaagccgatggcgcggcagatgcggacgaggctgcgcccgccgatggcgagcccagtgcagaggccgcaagcgatgcggcagacggcgccgacgctcccctggacgagaacaccccggcgtattttacgccgccggagaaaaagaaacgctctaccggcgcgctggtcgcgatctttatcgcggtcgccgtggtcgtcggtgcgatcgtctacatcgccctgaattggagtaccgtctttggcggcagcgccagcacgatcgacgcccgcgattcttacaccgcctccgttgatgaattaacgccggacagcgccaagatgcaggctgctgttgcccaggtgggtgaccacaagctgaccaacggccagttccagatctactactggatgcagttctacaacctggccaacacctacggccagtacctgagctacatgggcctggatacgacgaaagccttcgccgaccaggattccaacgctccggtggacgagaacgccgacacgacggactctaccggcagcgaagcccccgccaccctgacctgggagcagtacttcatccgctccgccatcgcctgctacaaggaatacaccgccctggccgacgctgcaacggacgccgggatggagctctccgaagaataccagtcctatctcgactccctggatgacgacctggcgacccaggccgaatccagcggccttgactcggcggaagccttcgtccaggccagctttggcaccggcgtgaccgtcgatgactaccgcagctatatgcagacctacctgctggccgcgacctacgccaacgccatgaaggacgtctcagactacactgctgacgatatcgaagcctactacgacgagaacgcctccagctacgaatccagcggcgtcctgaaatccgaccagaacaccgtcaatgtgcgccacatcctgatcaagcccgaacaggacgaggattccgacggtgacggcaccaacgacgcctcctccgacgccgcctgggaagccgccaaggccaaggccgacgagctctacgccaaatggcaggaggacccgacggaggacaacttctccgccctggcaacggaaaactccgaggacaccggctccgcctccgcaggcggcctgtatgaggacgtttaccccggccagatggtcaccgatttcaacgactggtgcttcgacgcagcccgccagcccggcgactccggcatcgtcaagacgacgtacggctatcatatcatatactttgtcagcaccggcgagcacccctactggtatatcaaagccgaaagcgactacaaagacggcatttataacgaccgggtcgacgccgtcgtcaaggacgtcgaagtctccgtgaattacaaaaacatctacgtcaactccgtcctggatatgaccaagaattaagctctcgatatgcacatcgccaggcagtgaatctctcactgcctggcgttttttgcgcgtgatactcctaacgccacgcacccggacggctcctttgatgctttgcagccggaaaacaacggtgcaaacgcaaaagccagcaaaagcgcgcctcctgacggaggcgcgcttggagtttattggggttttatgctgttttgcagcttagtccttgtacagctcgaccagcttcatcaggtgctcgtagcgctccttcgccgcttcttcgttgcgggcgaagaggtcgctggcgcgatccgggaactcgcgggtcaggcggctgtagcgggcctcgttcatcaggaactcctgatagccgcccttcggctgcttggagtcgagggtgaacttgccggtctccttggacgggtcgaagcggaacatgttccagtagccgcagtcgacagccttcttcatctcttcctggcagtgcatcatgccgcccttgatggagtgcatttcgcacggagcatagccgatgatgagggacgggccatgataggcctcggcctcggcaatggccttgagggtctgagcctggttggcgcccattgcgacctgcgcgacgtagatgtagccataggacatggcgatctcggcaaggctcttcttcttggtctccttaccggcagccgcgaactgagcgacctgac

SEQ ID NO: 889 - DNA, 8439 bp, Unknown
  16S sequences of unknown bacteria
tgttgccattttgttgccacagcgggcactcatggcgaaaaagccttggtatgactgggctttttccgggatgcaatcattcccactcaatcgtcgccggcggcttgctcgtaatgtcatacacaatccggttgatgtggtccacctcgttgatgatccggctcgaaaccttctccagcacctcataggggatgcgtgcccagtccgccgtcataaagtcagtggtcgtcacgccgcgcagcgccagcgtgtagtcataggtgcggaagtcccccatcacgcccacggaacggttgttggtcagtacggcaaagtactggtgtaccttgcgggaaagcccggcctccgccagctcctcgcggaaaatggcatcggcgccccgcaggatctccagcttgtccttggtcacttcgccaatgacccggatggccagccccggtcccgggaacggctgccgccaaaccagatactccggcaggcccagctccaggcccagccgccgcacctcgtccttaaagagcagccgcagcggctccacgatctccttaaagtccacatagtccggcaggccgcccacattgtggtggctcttgatgaccgcggcatcccccgcgccggattcgatcacatccgggtaaatggtgccctgcgccaggaaatccaccttaccgatcttcttcgcttcttcctcaaagacccggataaactcctcgccgatgatcttgcgctttctctccggctcggtcaccccggccagctttgccaagaagcgctcctcggcgttcacgcggataaacttcatcccacgcccggcaaaggccgcctccacctcatcgccctcgttcttgcgcatcaggccgtggtccacaaagatgcaggtcagcttatcgcccaccgcgcggtccagcagggcagccgccacactgctgtccaccccgccggaaagcgccagcagcactttgccgtcgccgatcttctcccgcagggcttccaccgtgctgcgggcatagtccttcatgctccagtcgcccttggcatggcagatctcatacaaaaagttcttcagaatatcattgccgaactgggtgtgctccacctccgggtggaactgcaccccgtacaggtttttctctttacactggatgcccgcgttggcggtggctgccgtatggcagatggcggtaaagccctccggcaggcggctcacatagtccacatggctcatccagcagatggcctcctgcggcatccccttaaagagcaggctctcggtatcgtagcgcaccggcgtcttgccaaattcgcgggtcggcgcgcttttcacctcgccgcccagcacctggctcatcatctgcagaccgtagcacagtcccaggatgggcagtccctgatggaataccgccgggtccaccttgggcgcgccttcctcatatacgctgttcggcccgccggtaaagatgatcccgatggggcagagctcctttatcttctccagcgcctttttgtaggggtgcacctcgcagtaaacgcccaggtcgcgcacccgccgggcgatcagctcattatactgcccgccgaaatccaacaccaaaactgtctcgtgtttcatgttccacctcgtttattcttcgcagccgtttcggctcaatatcccagtttctcgtctatcagcaccactatggtctcccccacgcctttcatgggccccatgtggatggtcataccccggcagatgcgctcggggctctggcagtcatagcacttcattacctcgcttagggcacagggggtcctgcggttcagccgcttcgcgttcagcgggctggcgatgttcctcgcccgccatatcgctgcctccagcgtcggggccagcttattcagccccacgataaagtacaccttctcgggtccatacagcgttgccgccacccggttgccggtgccgtctatgttcaccagctcgccggtttccgccacgccgttggcgctgctgatatacaccggagccgtcacgcccttatcggtgtcctttctatcccagctgcggccccgggcgtaaacggtacaccctgcggcctccagcttttcgggcaggcccagctgggcggcggtcacgctgcctcccatcccgatttcctgccccttcagctcctcgcacagggcctcggcggcttcggcgccggtggcgtagcgccgcacggtaaagccccgtttcttcatattttcagcggttttctgccagtccatatcgtcctccgttttgtttaggcgcggtgccacttcaccccttcgggggtatcggtcagcacaatgccccgggcggtcagctcatcacggatgcggtccgccgttgcaaagtccttatttttgcgggcggcctgccgctcggcgatcagcgcgtcgatctccgggtcgctttcctcggccgccggcgcctgcttcttctcctggtgcttagccgcctcctcaaagagtcccagccccagcaccgtctcaaattcccgcagcagcatggccttggtcttatcgttggtcttggccttcagcacatcgtacaccgccgtcaccgccagcgaggtgttgaggtcattatccagcgcgtcggtaaattccttccgcagcgccgcggccgcctcctcatcgatggcatcgctctccaccggcttcagcgccgccactctcgccaccagcttatcataggcctgctcggcgttatccaggttctcgtagctaaagaccagcgccttgcggtagtggctctgcaggcagaaatagcggtacgccagcggacggtagcccttctcttccagcagagaaacagtgaggaattcacccttgctcttgctcatcttgccggtattggtattcaggtgcagcacatgaaaccagtagttacaccacttgtgaccgagatatgcttcactttgggcgatctcgttggtgtggtgcgggaaggcattgtcaatgccgccgcagtggatatccaggtcctcgcccaggtgcttcatcgaaatgccgctgcactcgatgtgccagccggggtaacccacgccccagggggaatcccacttcagctcctggtcctcaaacttgctcttggtgaaccacagtacaaagtccgccttgttgcgcttgttctggtcctcttccacgccctcccggacaccgacggcgagatcctcctcgttgtggtcgttaaagacataatacttctccagcttggaggtatcaaagtaaacattgccgcctgctacataggcgtagcctttttccagcagcccctccaccagcttgatgaattcgggaatgcaggcggtggcgggctccaccacatccggggtcttaatattcagcttgcggcagtcctcaaagaaggcgtcggtgtagtatttggcgatctccatcaccgttttatgctcgcgcttcgcgcccttcagcatcttgtcctcgccggtatcggcgtcgctggaaaggtgccccacatcggtgatgttcatgacccgctttacattgtagccgcagtaccgcaggtacttttccagcacatcctccatgatgtaggtacgcagattgccgatatgggcaaagtggtacacggtggggccgcaggtatacatcttcacgatgtccgggtggttgggcacaaattcctcttttttgtggctcaaactgttataaagctgcataatattactccttgtattgcaattcgacgcttaccggtcgctgtaaagctctttgttcttcagcatatagttggcgccgctcagcaccgtcgtcgccaccactatgcccatcagcaccacaaagacagtatgggcccagcccgcttccgggaacagccacagcatcagcagggtgtagttcagccatatcatctggctgatggtcttgatcttgccccatttatcggcggcgatcaccacgcccttaccggccgcgatgagcctgaggctcgtcaccataaattctcttgccagaatgaccacgaccacccataccggcacccccgccacggggataaaggcgaccagtgcgctcatgaccagcagcttatcagcaagcgggtccatcagcttgccaaagtcggtcaccaggccccggctgcgggcaatgtgtccatccagcgtatcagtaaagcaggcgatcagataaaccagcagcgcccacaggtagtgcagcgggatgctctccaccagcaccagcaccagaaagaccgggatcagaatgatgcgcagcatcgtcagcttattgggtaaattcattttgtatcctccttcgctttcgccatgccgatgaggtcatagccgtcggtatcggtgatgagcaccggcacatagctgccgggctctatttcgtcctcactggtaaagtacactctggtatcaatatccggggcgtccatgtagctgcggccgtagtattggccgtcctcccagccctccgccagcacctccagcgtacggcctgtgcaccggtcggcaaagtcgaaagccgcgctcatctgcagctccataatgatctcggcccggcggcggcgcacctcctccgggatctgctccagctcggcagcgggggtatcctcctcctggctgtaagcaaagcaccccagccggtcaaagcgcacctcctccaccagcttacacagctcggcaaagtcctcctcgctttcggtggggaacccggcgatcagcgtcgttctcaacaccacatctgggatcttctcccggatcttttggcacagcgcggtgatagatctccggtcgccccggcggttcatatcccgcagcacatgggcgctggcgtgctgcaccggaatatcgaagtaatgcaccgccttgggctggcgggctatggtgtcgatcagcttatcggtgacccggtcggggtagcagtacaggatgcgcacccagtgcaccccctctatctcgcacaccgcgtcgatcagctccggcaggcggccctcaccgtaaatatcctcgccgtagcgggtggtatcctgcgccaccaggttcagctcggtcacgccgcgggcggccagctccttgcattcctctatcacattttccatgggcctgctgcggaaccggccccggatgagcggaatggcgcagtagctgcaccggttgtcgcagccctcggccaccttcacataggcaaaccacggctcattggccagcatccgttccccttccatcgaaagggactccttctcgccatattccgtaaagtgctcgcccattacagctttccgtatcgcctcgcctatctttccgttgctgcctatccccagcaccacatccgcctcagggatctcccgtgccagctcctcacggtagcgctcggccagacagccggtcaccgccacgcattttaggctgccctcgcccttggcggcgcagcactccagtatcgtgtcaatggattccttcttggcgtcctcaataaagccgcaggtgttcacgatcaccgcgtcacactcggtcatgtcattgcagatcgtaaatccatctccggccagtatcgccagcaggcgctcggcgtccacctggtttttgctgcaccccagcgagatcattcccactttaatcgccacggcagttttcctcctgctccagtatcgtattcatcgccgcctttatcgcctccagcgggtagccccgccggtacagcgccgcgatggtcttttccatcccggcccggtcagccatgttcttcgcgtatttcttccggatgagggcaagcagctcctcctgcccatccccggtttccggcgtttcctccggctccggcgtttctccgccctccggcagagcttccaatgtccggctcaccgcctgccgtatcaccccgtaggagaatccccggcgctgcagggcggctttcactttatcccgctccttgcggtcccgcagcttcccacggtacggcccctccagcaaacggcaggccgtttctatctcagtctcctcggtaatatcggccagggcctcctcgatgacttccgccgggacgccctttttttgcagctccatggcgatccttctccggggccatccccgcagattcaccgcgtccgccgcataccgccggccgtagtccaagtcattgatgagctccagctcctccatgcggagcacagcggcctccacggcctcctcgccgtaccagcgcagcagcttttgccgcagggtaccgctggtttgctccgccgccgaaaggagatccaaagcccgttcccgggcgctgcgcagttcgtcctcctgccgcagagtttccagccgctccggcgacacctcggcccccttttgcagccaggggcacagcaggaaggtatcccggtgcagcgaaaaggcaaattcgccgtccaccatcagggcgtaacggccctttttggtggtttctatcccggtgacgcgcatggtttttgttcccccttcgctaatagttcagtataccataatcccgcccggtaaacaatgcacaattcgcataaaatccgggctttccggcagcaaatggccgggtccctgccgcatcccggccccggcgcccgcagggcagcccgccgcaggcgggctcggcggcctccggccgccggttccggcttcgccggaacgccctgcgggcgccccgtgccttccgccggccctcccaaagcccgcccgccggataacaccgccccggagcaaaagacctcccgggcgcgtggggcgccgggaggcagaaattcagttttgcggggcccggcagggggctccatcgccgggtcgtcacctttttgcgggccgcggtccatacggcaaaaagcggcaaatcttctggcccgaccggcttattcgtcctcgtccacctcggcggtcaggtttacctggcccagctttttgggggcggcggccgcggcggtacggcccatcagcttatcggcgttggccattaccttggcggcgatctcctcggccagctcggggttctgccgcaggtattccttggcgttatcacggccctggcccagccttatctcgccataattaaaccacgcgccggatttctgcacgatatccagcttgctgcccagatccaggatctcgcccaggcgggaaacgccctggccgtacatgatatcaaactcggcctccttgaagggcggggcgaccttgtttttgaccaccttgacacgcacccggttgccgatgacctcgccgccggctttgagctgctcggtgcgtcggacatccagccggacggaggagtagaacttgagggcgcggccgccgggggtggtctccgggttgccatacatcacgccgatcttctctctcagctggttgatgaagatgacgatggcattgcttttgccgatggcgccggtcagcttgcgcagggcctgactcatcaatctggcctgcaggccgacatgggtatcgcccatttcgccctcgatctcggccttggtgaccatcgcggccaccgagtcgacgaccacgacatccaccgcaccggagcgaaccagcgcttcgcagatttccagggcctgctcgccggtatcgggctgggagaccagcagctggtcaatatccacgcccaaatttttggcgtaaacggggtccagggcatgctccacatcgatgaaaacggcggagccgccgcgcttttgggcttcggccaccacatgcagggccacggtggtcttaccgctggattccggcccatagatctcgacgattctgccgcggggcaggccgccgatgcccagtgccatatccagcgaaagggagccggtggggatggcttccacattcatggtggcattctggcccaggcgcattacagcccctttgccaaactgcttttcgatctggctgatggcggtttccagggctttttgcttatcgctgggggcgggggcggtttcctttgcttttttctcgatggccatgcaatttcctcccaaagtgatggtattctgattccattgtacacgatttttgccgggattgcaagagggaaacgaaaatttgttcgcggttggggcaaaaatttttaggcagcgatttttcggccgtccggtgggatttttctcccgcgcgcgggcaggtgcgcgcccatcgcgtacccatatatacgcgtacacgcgcgcgtgggggatttttacaaattgggaatttgtgcattttgcgactgatgtgtggtcgccttcggcggggagatgcttttctgtgaagaaaagtgggcaaaaggatttttaggccaagatagtgggcgcctggcgacggggtagagtcaccggagggtgacggccggtacgcctgcccggcggggggttacttttctatgaagaaaagtaactaaaagtcactcggggagatccccgagacccccaacgcgtcggagccccccgcccgaaaagccaaaggacggcttcccggagcgggatta

SEQ ID NO: 890 - DNA, 6635 bp, Unknown
  16S sequences of unknown bacteria
tatgcctcgtctctgccgcagcattttttatactttttgccgctaccgcagggacaggggtcgttgcgtcccaccttttgggacttggtcttgacgacggtgcgtcccttgacgtcgccgccggaactttcggaggtcaccttggccacctgctcgcgcttaacgtcctcctcgcggcgaattctcaccgtgagaataagcttggcggtgtcctcgcatatggcctcgctcatggcgttgaacatatcatagctctcgttgcggaattccacaatggggtcgtgctgagcataggcgcgcagatgaatgccgtttctcagctcgtccatggcgtcgatgtggtccatccaatgggtgtcgacacatctgagcaaaatgacccgctcgagctctctcatgacgtcggagccgtattcggcctccttgctttcataaatttcgcaggcacgctcgtaaagggtgtcggcaatgctgtcgggagtggcttcggcaagctgctcgggagtgaattcaaaatcgtcgggctttgtcagccagccgaggaagtggtcgcgcagccccttgacgttccagttgtcgtgaaccttggggtcgttaagataaagcgcacactgaccgtgaatggtgtcctttatcattttttgaaccgattccttaaggttttcgccgttaagaacctgatcgcgctgggaataaatcttgtttcgctgctgattcatgacgtcgtcgaattccagcgtgctctttcgggcggcaaagttgcgggactccaccttttgctgagcgttttcgataacgttggtcagcattttgctttcaatgggctcgtcgtcggggaacatggacatattgcccagcttgtcgccgccgaacagacgcatgaggtcgtcctccatggacaggaagaaacggctgcgtccggggtcgccctgacgtccggcacgtccgcgcagctgattgtcgattctgcgggaatcgtggcgctcggtgccgccgctctgaccttttcggcctcgggggcgatttcggccttgtgcttttcaagcagatcggcaaaggtcttgcggagggaaaggatttcctcgtcgtcggtttcatagtagcttgtggcgttgtctatctgctcctcgtcaaagcccgcctttctcatgtcggattttgcgagatactcggcgtttcctccgagcatgatgtcggtgcctcgtccggccatgttggtggcgatggtgacggcgccgaatttacccgcctgggcgattatctgggcttctttttcgtgatacttggcgttgagcacctcgtgctttatgcccctgcgggaaagcagcttgctgagcatttcggatttttcgatggaaatggtgcccacaagcacgggctgacccttttcgtgagcggcaatgatctcgtttatgacggcgttgaacttggcctgctcggttttgaaaacccagtcgtgctcgtcaattcttgcaaggggcttattggtgggaatttcgattatgtcgagattatatatgctgttgaattcgtcctgctcggtgagggcggttccggtcatacccgaaagcttggtgtaaagtcggaaataattctggaaggtgatggtggcgagggttttggactcgtgctcaaccttaaccccttccttggcctcgattgcctggtgaaggccttcgttatagcggcggccgaacatgagacgtccggtgaactcgtcgacaattatgacctcgccgtccttgaccacatagtcgacgtcgagatgcatgatgccgtgagccttaatggcctgatttatgtggtggagaagggtgttgttttccatgtcggaaaggttttccacgttgaaatatttctcggcctttttaacgccctcgggggtgagtgtggcggttttggccttttcgtcgacgatatagtcgccgtcatatttctcgtcgatgtcctccttggtgtccacctctttgattttggtcatgcgaagggtgcgggcgaatttgtcggcacgctcgtaaaggtcggtggatttctccccctgtcccgaaatgatgagaggggttctggcctcgtcgataagtatcgagtcaacctcgtcgacgatggcgaaattgtggcctctctgaaccttgttctgaagctgaaccaccatgttgtcgcggagatagtcaaagcccatctcgttgttggtgccgtaggttatgtcggcggcataggcggctctgcgctcgtcgttactgagcccgtggacgataagacccaccgaaaggccgagatatttatagacctttcccatccattccgagtcgcggcgggcaagataatcgttgacggtgacgatgtgaacccccttgcccgaaagggcgttgaggtaggcgggaagggtggcaacaagggtcttgccttcaccggttttcatttcgctgatacgtccctgatgaagcacgataccgccggttatctgaaccgggaaatgcttcatttcaagcactcgccaggccgcctcgcggcagacggcaaaggcgtcgggcagaatgtcgtcaagggtctcgccctttgcaaggcggtctttgagcacctgcgtctggcctttaagctcctcgtcggccatggccgaatatttttcgtcaagctcaagcacctttttggttatcggctcgacctttttaagctctcgcttgctgtaatttccgaaaagtgacgctaatatattcatgtttttttctcccgaaaagtttatgaggatacaagtatccaagataatatccttaattatactacatttgtatgcacattgcaagttttttgcaccaaaatgaaaaagtcctatgtaaaatttccataggacttttgtcttgtgaaagaatttccgcgccgattttctatatattcaggaaattggtggcgagggtgaaataaattataagggtcagggcgtcgacaatggtggttatcatgggcccggccatgagggcggggtcaaggtgaatgagctttgcgagcatgggaagtgaacagccgatacattttgcggccacaaccgagcacagcatggcggcgcacaccacaagatacatcttgaaattttccgaaacgtcgccgttcaaaagcgccatgcggccgaagttgaccacggcaagagccacgccgcaaagcagcgccacccgaacctccttgaaaagcaccttgaaatagtcggtcagatgtatttctccgagagcaagaccgcggattatcagggtggaggtctggtttcccgcgtttccgccggtgtccatgagcatgggtatgcaggcggtcagccccaccacggcggcaagcatattttcataattttctatgatttttccggtgaatgtggccgacaccataagtatcataagccacagaatacggcgttttgcaagggtgaacacgcccgttttaagatattcctcgtcggaaggggacaaaagggccatcttttcaaagtcctcggtggcctcgtcctcgatgatgtcgacgatgtcgtcgatggtgacaatgccaacaagacggttttcgttgtccacaacgggaaccgacagcaggtcgtattttcgggcgatttcggccacgacctcctggtcgtcaagggtgcccaccgaaatgatgtgctcctcgtcggtgatgatgtcggaaatcttggtctgctcgtcggaaaggagcaggcgtctgagcggaatgacgcccacaaggtgccgaaaatcgtcgatgacatagcaggtgtatatggtttccttgtcaacgccggtctctcttatgattttcagcgcgtctttaacgtttatgcggctgtggaattccaccatttcaatggtcatgacgctgccggcggaattctcgggatatttcaaaaatctgttgatgatgttgcggcgctcggggcttgcgttctgaagcacgcgcttgacaacgcttgcgggaacctcctcaagaaagtcgacggcgtcgtcaacgtaaagctcctccaccaaaagtcccagctcgacgtcgtttatggaggagacgatggaggtctgggtctcggtttcgagataggagaaaacgtcggcggcaaggtccttgggcagaattcggaaaacaagaataagcttgtcttcgggcaaatcggccataaattcggccacgtcggcgctgttcatttccacaagagtggagcgcagctctctgagcttgttgtcgtttaaaagttgatttaactggtcaaaaaaaacagcttccatattgatacctcatttctttaggcagaaagacaacaaagcatcaaaacaaaagctgtcgcaaaatccgaaaaatcaccccaaaaagggcgcaatacgagaggggacgagcgcttgttttgctgctgtgtgtatgttttccgccgtgatacttcgcggaacggtcgtttcagggctttccaaaacaatgctcacctcttttatgttctttatggcggcaaaagccgaaatcggggctttttcccgctaacttataatactctaaaatccccccaaagtcaacaaaaaaatagcattgaccgccccctcgttataatatataatatgtaatgacaaaagaggagtgagggaaacatgaaaaagacaatatcgcttgtgctctgcgcggttttcgccgtggcgttttatacctatgcggcggcaatgcccgagcgttcgccgcgggttctcatgaccgaggaggccgccgaggagctttactacagcctgccctttgacgacggctatgccgaggcgctgggcatttccgaggaaaaattcaacgagcttcgcaatcggctctacaccgccgccgaaagctttgaaagcaccgcttacgtcgaggatctcgccattccctacagccgtgccgtgctcggcaccataggctcgctgctttacaaaacgcccggccgccccgagctttttcaggtgcagtcggtttcctgtaactattatcccggcggcagccttgccgagatcataatttattataaccgcacggccgagcaatatgaaagcgaccttaagacctgtgaggcggcggcagaagcacttctttccgacataaaaaatttcggctataccgaccttgaaaaggctctcctcattcacgacagaatagtcaaatacaccgaatatgtcgaccgcggctcggacgacgaccacaacattttcggccttttgaaaaacaaaaccgccgtttgcgagggctatgcccaaacctattgctacctgctttcaaaggtcggggtggacagccgcatggtgtcgtcgtcggcgcttatgcacgcctggaacatcgtcacgataaacggcaaaaaatatcatgtcgacgccacctgggacgaccctcttgccgatgtggacggcagggcaagacattccaatttcatgtgctccaccgccaaattccgttcggccggcgcggcccttcacaacgcctccgactataattccgagccctccgacacaacctatgacaattatttttggcaggactcggattccggctttgagctttgccgcgggcaaatttattacatcgacaaaagcggcgatacggcaaagctgtgccgttttagcgaacacggcgggaccgaggagctttttgacatttcagaccgctgggtttgcaaaaagaacggcgcctactaccccgggaattacagccgccttgcaaccgacggcagttttttatactataacaccgccgcaaaaatcatgagatacgacccgaaaaccgaaacgacctctgaggtttattcccccgacctgaccgcgctttcgtcgggagaggacgtggccgcgatctacgggtttaaaatcgaggacggcaattttctcataacccccgccgtcagtcccaatttcaccgaaaccaccaaggccgaaaaccttatcacggccaaaattcccgccgaaaaagttttcaaagacgtttggttcaaaacccttcaaaccaaaaccgtctattatatcggcgatgacttcgacccgacgggcatggagctttttgcccgctataccgacggaacggaagagccgctttcgctttccgatttggacataaaatacgatttttcggccgagggagagtcctatgtgaccgtcacctatgtaaaagagggctacggcggcacattttcggtcaatgtcaaaaagccgtcggtgaagttttcctcctcggttcttgcgggggaaatcggaaagtcgctcacccttcgcgccgcctccgaccccgaggggctcgaggtcacattctttaccgaggacaaagagaaggccgaaatttcgggaaatctgatcaccccactttccgagggaaaaatcaaaattttcgcgtcgataacatataacggcgtcacctataccgacgaggctgtgctctcggcaagcgaaaagccggttctcggcgaccttgacggcaacggcagagccgacgcggccgacgcgctgaccattcttcagtattcggtcaaaaaaattacgctgctgcccgagcagacggccgtggccgatttgaacggagacggcagggtaaccgtcaccgacgccctgctcaccctcaaggcctccctcgccgcataaccttctaaacacaatccaccgcatcatcggctcccttgtaagaac

SEQ ID NO: 891 - DNA, 18287 bp, Unknown
  16S sequences of unknown bacteria
aaatacaagagccgggcacggcagtgcccggaacgccgatatttgcgaataacgcgcagcggggcgggccgcctctggagtcgccgtgccgccagctttctttggtactttctttcgcttcgaaagaaagtactgcccccctcggggcggcagccccaccaaccgcgccgtagtcggcgcgtcaggccgctccgggacaggggtatgcgcctgcgggcgcaccaaagggctttcctcggggcaaacaatcggcgcggttcgcactgccgtgcgctccgcttgttgtttgcctgaactccgggtcgctaaccgccttcggcggttgtatccactggatacccgcttcccttcgttcccctttggaaaccttcgggcaccgaagcttgcgggaaactcatgggtctgtaagccagacttctgcaccctccgtcggcgcgtcatgcttcatcggggaaagacgggtcttgaccatcctctctcttagtttccccagaaaatcgaccgctcgttctccgccagactctctaccacgccgtcttccttccgctcgccgccggtgaaaaagcttttcacactgtcccagaagccggtggaaagattcgcctgcgccacctgcaccgactgtacgccctccagcaaaacgccgttgttcagcagctccgcgtgaacggggatcacccggtatgtatagactacgcccgctttggcctgcatgtccgtgaaataaagcgtctccccggcggaaccgtatagttccgttagaataaaactttcgcccaccgcgtcccgctggacccggtagagagccgtgtccgccggttgaaggatcagcacgggataacccgcctcgctgtgggaaacggtgaagctgttcagcgcccggggcggcgtccatacgtcgctttttttggtgggatggttgtcctcggcgaagtactcggtgtaacggtaggtttttggggtcagatcgttggccagcatgggttcgcctcgccatttgatggcctgctggtcgatctccagcgcaataatgccgcccggccgggtgaattgcggcttgtcccggttctggtacagtgccttgaaatagttccgggccatggcggcggtgttgtcgccgccgctgacccagccctgcaacttgtgcttctgatcgggttcgtcaaagcccatccaaaaggcgcaggaaatttcactgttgtagcacgccatccagatgtcccggttgcccccgccagtcatgttgaccgtgcccgtcttgcccgccacgggcgtgccagcgccggacagcttcgcgccggtgccggaggcagtgacggtctgcagtaggctggtcatcagataggccgaggtggccttcaatacacgggagccgctgtcccggttctggtagagcacccggcccgacgggtcggtgatgcggcggatcagatggggcgcgttgtaggtgccgccgttgccaaagggggcgtaggccgccgccagctgcaccggcgaaacgccgtaggtcatggcccccagccccagcgccagattcgcgtcccggtcgtccagcggaatgccaacgctggccatgtagtcccgcccggcattcacgccgatctggttgagcagggccacggtggagacgttcaggctgtttttcagcgccgtgcggatgctgacgttgccgtagtaggtgtagctggaattgcggggcttgtagccgttgaaattggtgggctcgtccttgaggacgctgcaggtcatgtagccgtagcggtcgatggcgggggcgtagaccgccagcggcttcagggccgaaccgggctgacggcgaagccgggtggcccggttgaagccccgccgcacgtcgtagctccgcccgcctacgatggccagcacctcgccagtgttggtgtccacacaggccgctgcgccctgcaccttggtgccgtcgctggcgtttgccgggaaaatatcggcggtgaactgcttgtccagcaggtcctgatgggtgcggctcagcgcggtgtcgatcgtcagtccgccggaaagcacttcttcactggtcatgcccagcaggctctcggcttcgtccagcaccgcgtcggcataccagccgtagggcacttcctccggggggacctccgccaataccagcgtttccgccgccgcttcgtcccgggtctgctggtcgatcatgccttcttccagcatgatgttgagaatatagtttcgtcgggaacggttgtgctgggcgctgacgtggggcgcgtaatagctgggagccttgatgctggccgccagcgcgcaggcctgcgtcagggtcagatcccgcgcgtccacgccgaaataagtttgagccgccgcctgaatgccgtaggcaccgttgccgaaatagatgtagttcagatacatggccagaatgtcgtccttgctcatgcggcgttccagctgccatgccagccagatttcctcggcctttcgggaaagggtcttcttcgtgctcagatggctctgacggatcagctgcatggtgatggtactggccccctgcgaatagccgccctcccggatgttggctgccagcgcgccgaagagccgcaccatgtccacgccatggtgacggtaaaagcgcaggtcttccgccgccagaaacacgttccgcgtctgctctggaatatcgtcaaaggggatcactacccggttctggctgcctttgatggtcatgatgagctggccttcgccgtcgtacatgcggcccgtctggggcgcggcggtgatgcggctcacgtccagcggctgccagttgggcacgtccagcacaaagaaccccgccgttcctccgaaaacgcccagaaagagcagcaccagcagcgccgtccgcaggggatgccgccgcaccggcaggccggtctgatagcggccgggcgtgcccaactgccgggccgcctgcttccgctgccggaaaagccgctttgccgcccggcggccgatgtcgtgctcccggtgaagcagatcgtctgccgcctgcttctttgcccggcgcgcctccttctgccgggctttttccgcccgccgcgctgcacgccgttccctcgcagtgaccgtccattggggctgggcggcttccgggcctgcttcttcggcgggggagttcgcctgcgccggttcctcggctggctctgccgaaagctcctgaaatttttcggcttgttcgccgcttttttcttcctccgggaagggctggcgctgggccgcggacggctgctccgcttcctcggaggggggagttgtttcttctgcagccggtaatttttcccgcacctccgcggccggtctggctttctgctttttctttttcacgccgcatccctccgtttgcaaaccattcaaaaatatccgctgatactttgcgctttctgtcccgtctgatacgctggaaacgcggacaataagtaccatttacttgccgtatggaattcctgtatactttcacccgacacgatttttctcaaacgtcggcgctatggcgaaacatgcccgtttgggaacctgaggtgatggtatgcgcgtttcacaacaaaaggcgatacagacgatgcttctgggcgggatgctgctgacgatgattgtttcgctgctgatccggggcggggaaggccttcgattcgggctgacgcttctgtggctgctgccgccggtccttctgctgctgcgtcggcgggagagggcgaaaagcggcgttgccgagattccaagcaccggcgatgggtcagtacccgacgtgcgcttttccgatgtggccgccaacgaagaagcgctggaaagtatgcgcgatctggtcagcttcattcagtcgccggagaagtacagccgtttcggggcaaggattccccggggcgtgctgctgtacggcgcgcccggcacgggaaaaacgctgctggcccgggcgctggccggagaggcgggcgttccgttcttcgcggtcaacggcgcggattttgtggaaatgtacgtaggcgtgggagccagccgggtacgggcgctgtttcagaaggcccgcaaggccgggaaagcggtgatcttctttgatgagatcgatgcggtgggcaaaaagcgggacaaccgcagcgacgagcgggaacagaccctcaacgcccttttgtcggaaatgagcggatttcgggaaaacgacggaattgtggtgctggccgcgaccaaccgagccgatacgctggatgaagccctgctccgtgcgggacgctttgaccggcagatcgaggtgccgctgcccacgctgcgggaacggcagaaaattctggaagttcacgcccggaaaaagccgctggccccggaggtctctctggctttgctggcggcggagaccgcgcttttctccggggcgaagctggagagcctgctgaacgaagccgccatctgcgccgccaagcgggatgcggaggaaatcgcccgtcaggatgtggatgaagcgctgaaccgaatgctcttcggcatggaacgcccgaatgacggagagcagaaggccgaacgggagctgaccgccgcccacgaagcggggcacgccctgctgacggccctgcttctgccggaaagccagatccgccgggtctccatcatccccaccggcaagggcgcggtgggctacagcatggccatccccccggaaaagctctttcaccgcagacaggagcttcttcaccacatggcggtggcgctggcgggccgggaagccgaagccctgtacctgggcggctatgaacaaatttccaacggcgcttccaacgatattgaaaaggcggcgctgctgtgccagcgcatggtctgcgaatggggaatgctgcccgccggggatgaaccctatctgttttcgcaggggcagcgggaagccgcccagcagcaatggctgtccatggcccggcagctggccgcatcgctgctgcgtcagcaggaagccgcgtggctgcggctgacggaagcactgctggaaaaggaagcgctgaatggggaagaagtccggcgctgcatggaagaaacggcttagaatagaaaacgggagccgatgcttgagtgcatcggctcccgcagagtgtcaaaaaagtggaggtgcaggaggcactgcctcctgccggggttataggggcggagcccctaactcttgtgccgcagcactttccccgcaaaccagcgaagcgctgtttgcgggcgcgggcggccaacttggggtttttcgacagactgcggaagccgatgcttgagtgcatcggctcccgttcgcatgccatgaaccaaacttttactcgcagtcgaagatcgctttcttttcgatcatcccgccgtagacttccttccagcggtgatgggcttcgctgccgtcataggcctccagcgcgcccttttccatgcacaggaggatcagcaggtcgtagcggttgggacggtcgatcacgttgggatgcagctccacgctctcaacacccggaatggccagcgtttcctggaacagctcccggatgggctccaggccgggcttgcacccttccttccatttgactaaaatatgatgtctcatcttaataaacctcccatggcggatgaatggggaaaaccgccgtcagaataccacaggaacgcggctttttcaaccgcggggacggaaacgaagaaaacttttcgaaaaacgggaaaaaacagactcgacttccgtcttacgagtgtacaaagcaaaccccacgaaagaaggaggggatacggatgttccatgccatggtacctggcagggacgaggaagaagcggaactgacccgcatgatggacgaatggggcgggctggtgctgggcctgtgcgccgtcaccctgaaagacggtcatctggcgcaggacgcggctcaggagaccttcgtcaaggcctggagccatcgggccgactggccgaatcttcagaaccggcgcgcctggctggcccgcatcgcggtcaatacctgccgggacatgcagcggggcggctggttccgtcacgtgacgcggaaacagactctggacgacctgtccgggctggcagccccggagacgtcccaaagggaagtaatggaggccgtgaacgccctgccccgggagcagcggcagatcgtcctccttcgattctggcagaacctgagcggcgaagaaatcgccgaatgcctcggcctgagccgctcggcggtctaccggaaaatggacaaagccaaaaagaaccttcgattgactctggaaggagaggatgttccatgacggaaaagcagcttcgggaagccttgcggaactgtctgccggactctctgccggaagcgcagcagcgggccgttctctcccggatccgagaaaggaaacagcctatgaaacgaaaagtctctctggcgctggtactgacccttgtcctgctggcgctgggcgcggtggcctatgcggtggtgagccgctactccgtggccgactacagcggcgcggggcaaatgacggaggaactgcagaacagcatcgtcgatattgacgagacctacgaaaacgcctacatgaccatgaccgccaacgacgtgctctacgacggcgagaccgtcaccatggccttcaactttaccaccaaggacccggatatgcacctgtatctgtatccacgactgacggcggaggtggacggccagacctatgtggcggatgtggaaagcttcggtgcgggcgacttcatgagcggcttcgtgtaccccttcctgcccggccacgatctggcggcgcagggctacggcttcgggctggatgcggtgctgctggacgacgactgcaatctgatccgccctgcgggcgaggtccgctggacgctgaccatgaaggtgttcaagcccaactttgaggtggaatacgccgatgtggtctttgacggcacggaatccgaggaagaaatgcagcaaaagatggacgtctttgcacaggccttccgggaacacaagatcctcgtgaccaacgatacctcgctggcggagtgggacagccagatccccgtcccggacggcatgacggaggaagaatggtataccatggagcccttcgaaagcctgaccatttccggggcatatgacctgatggacgtggtgaaaatttccttcaccacacaggtaccggaaaacgctgtgagccaaaccggcctgaatttgaccgtccccacggaaaaaggccccctgacgctggaagaactgagcgtcagcttccaaaccgtcagcttccgtctgtccctgcctatggaggaaggcgaaacggaaaacgacctgtgggaacaggtgtggcagtatctgaaaatttaccctgacggcaatgatacgccctgcggagaggactccacgtggtacgagaagcaggaaaacccggacggcacgttccgctgcgttctggtgggtcagcgacggctgaacgacggcgttacgcccgaaaggctgacctttgacgtgggcggcgcgcgtttcaccgtgtcagtgccggaaatggcgctgattgagaagaacgccggggcgtaaacagctctcccatgggcaaaaatgtatgataccgcccggcttcgggcaaagtaaccccatcttgacgaaacttcttttcgaaaggatggggtttttcatgtccgtaggaatggttctgctgaccgccgccgccattctggtgttcttcggcgtggcccagcgggtgctggataagatgtacttaagcgaccgggcggcgcttctgttgatcgcgctgatgtttttcggtacgctgatccccaatctgaagctgggcgcggtggaagtaagcatcggcggggcgctgatcccggcgggggtgtgcgtctacctgctgatccgggcaggcacgtggaaggaacggatccgggcggtggtgggggcgcttttgaccggtgggatcgtcttcgccgtctcggcttatctgctgccggacgagccggagaccatggtcatcgaccccatgtatctgaacggcatcatcgccgggctgatcgcttacgtgctgggccgttcccgccggggcgcgttcatctgcggcgtgctgggggtgctgctttccgatatcattgtggccatcgtcaacagcgcccggggaatttcccaaacgctggtgctgggcggcgcgggcgtattcgacgcggcggtcatcagcggcctgatcggcgtgattctggcggagctgatcggcgagattgccgagcgaattgtccggggcagtaaaaagcccgtgcattcagccgtgcgcaatcccgtgcgagacaaggagaaatgaaccatgaagaaagcgattgcggttattttactggcggcgctgtgctgctgcctgccgggcctgagccgggcggaggagccggaaatctacacgctgctgtcccctaagggcaaggtgctgacccgctatcagggccagtgtgaaaagggcgacgagtatatttccggggacaacaagcactaccgggtcacggaagtggacgaatccgcccataccgcccggacggagctgatcggcgacgcggatatgcctgacgtgggctggctggatcaggtggcggacgcaacgcccgtcagcgccgtcgcccggaagatcgccctgtactgcacccacagcgatgaaagctacatcgagggagatggcacgcagagcagcgaaaagcggggcggcatttacgacgtggcggcgaaattcggcgcgcggctggaagaactgggcgcaacggtggaacgcagcgaggagacccatcatccccacgacgcgggcgcttaccgccgcagccgccagacggcggtgaaactgctcaaaagtcagcccaacgccattttcgacctgcaccgggacggcattcccgacccggaggaatacgccgtcaccatcggcggggaaaagatgagcaaggtgcgcctgctggtgggcaagagcaaccagaacaaagaagccaacctcagctttgccaagcagatcaaggccgtgggggataagctgtaccccaaactcatcaaggatatttatatgggcaagggtacctataatcaggacttggccccacgatcggtgctgctggaattcggcacccacaccctgtccaaggaacgggtgctccgttctaccggccctatggctgaggtttgctacaaggcgctgttcggcggtgtgaccggctcagcgggagccagcgacgtcagcggcagcaaaagcgcggaaaacgttccagccgaccagtccaacaaaggctccggcgcagcggtgtggatcattctggcgctgctgttgggcgtgggcctgttcgcgttcctctccaccggcggccggggcggcttcagcaaatggaaggactcgctgggcgaaatgacgggcggtttcttcgggggaagacggcgggataaataaaaagacacggaaaaattctgtgtctcagattgctgaaaaagtggaggtgcaggaggcgctgctgccactcaatcgtcgcagggactactgccgtagtccccgctcgtttcgtgacacacctgcgggtcgctaaccgcctacggcggttgtgcccactgggcgacggtgaacttttcaaattctatttgaaaagttcagtctgccaaaggcagaccgggttgcccaagggcaacccgccttgcgccttccctgcggtgcctgccggggttttagggcggcgagaaggagcgggcatccagtggatgcaactgccgaaggcagttagcgactgacagccgtcaaccgaaacgaggatttggcacggcagtgccaaagacgacgattgaggttgcggaacggagactcagtgccttatgccgcagcactttccccgcgaaccagcttaagggtgcgcagcaccgaggacgaggacagccctgaaagggctaccgcagtccgaagcccgcgccacgtaggggagcgggccgcagagcgctgttcgcagacgatggcggtcgatctggggtttttcgacggcctgagacacagaaaaatttctgtgtctgaaggaataaaaagttgagaagccggggaccgcgcctttcgccgagggtgaagggcggtcctgagtcttgcctttcctgcttttcgcaaaacgactgaaggccacgaaaaaaaaggaggactgcggcgaagcacccgttaacggggctgagcgcaagaacaagtccaacacgggcgagtgattcttaaggcagcgcagtttccttagtgaacagcatcacgccgcctttttccagcgccgggccgtaaaggccggaaagacgctccgtcagggcctcctgcccgccggcgccgatcagcagaacggcgcgcccctcgtcggcttcaaaggccgcggctccgccgtcctcgcagaccagcgcgccgtacagctccgcaatgaagcggtcgccgtcctgccagcgggtcacgtgaacgccatccgccgtttcgccgtactgcacgtaggcatgaacgcccgcgtctgtttcgcggtgaagggcgtttatcatcatttgctggtaattctggcggtagtttaaattccgaacataggacaggcagtccagcgagcagaccgtgatcagggcaacggaaacgccgagacaggccagcgccttccagcttttgccgccgaaacggttcgccagctgctgcactgtccagcccagcagcgccgcgcccgccgtcagactggcgtatacgtaccagcgcagcttgaaggggatcagactgaaaaacagcacagggacgatcagccacagcagaaggccggtcaggtcggctttttcttcccggcggagacggccgttccccgccagcagcggcccggaaacggcgcagaggatcatcgcgcccgcaaacatgggctgctggaacagatactcgatgtatagataccagtagaaatccgtgcccagctcctcggcggtcagtccggcccgctgggcaacgtccgtctggaacatggctttcaggaaagtgaacccgtcccgctgccagcgcaggacggcccagggcaaaatcacggccgctgccacggccagaagcagcagtacccgcttcggcgtgatctctcggacgcgcccggtcagcagcaggtacagcagatagatcagcgggatcagcgcggcgtggtagcttttggtcatgaaggccagcgcaaagaagaacgcgccgccgtagtggaaccgcgcgtttctccggctttccagcatacagagcatggaaagggtgaaaaacagctgaaaaaacgcgtccagctcgccatagcgggcgtaatggtaaagatacactgccttggtggctatcattgcgcccatggagagcagggaagtcagcgagccataccggcgaagccacagccccagaatgccgatcatcagccaaaggctcagggcgctgaaaaagcgcagccccagcaggttatacccgaacaggcggtagcccagcgtgatgatccagaggcccagcggcggcttgcagttgtagtagtccgcttcgccgtggtacgtatggacgatgtaatctccgctctggagcatttcataggcgttctgaccgtggcgcagctcgtcatagtcctccagccgggcggcggacagcctgccgaacagaagaacgcccgccgccagcatcaggcagacaaagcagaaccagtacagcagccgggcagtcttcctgttttgaagcagcgccgtttgtttttccacgaaagcatcctcttttctgaaaattacgggtcgtatacgagcgtgcagccgtcgccgtagtacagacaaagcccctgattccgccaatcctgcggatcgccggtgtacagccagttggcgttgagaatatcgtcctggggctgactagcactgtggatttcttccccgggatgggccttgatctccgcgaccagcgcgtcatacgcctgactgtaccggctcatgctgccgtccagcagacgggccgcgactttgaccggctgcagggtgcagtcaaatcgcagcggagaaaaggtcatgttcggcagggaaagcgccccgatcaggaaaagcagcgcggcgcccatgccaaaggcggcgcggctgcttttgggggaggagtccggggctttcggctcatagcccgcccggcgcaggaaccagcccagcagccagaaagtattgaccggcagaagaacgcacagcagaagaaaacacaggtctgtgtgccggggagcccaatagctgcactggtacaacactgggaacatggccgccgccataacgcagacggacgcggcgaacaccagcagcggcgcacggaaggaaaagtgtgtgcgggtgtagatttcccgaaagaccggcagcagaaagagcaaaaacagccagtatcgagcgtcggagaagaagtagaggacactgtgctggaaggaggacagaaacgcgctgataaagccgacgttggcattcatcgtttcctgacgggcagcgttgccgggagccaacgccgccgtggcaaagcccagcagcagaaacagatagggcagcagcagtcgcttcgggcggcgggtaatcagaatccagacggccattgccccgtagagcacgatggaggatgcgggggtcatccagttggtgccgcccagacagaaaaatccgacgcaccacaggcagagccgccagaccggcgcttttccgtccagcgccgcccggaacacggcggaaaacaggagcatggccagcgccgacatgacggtgtagttgatggctccgccaaaccagtagatcgattcgtgataatccggcagaagcagcagcgccattagccccagcagcagtcccgcgcagcggacggcctcctgcgaaatgccgcggcacaggctttgcagacatccggccacccgccagaagccgtagagcatcagaagaatcgtcaaaagggcgttgactcccaccaaccagttcccgccgaaaacggaaagaggcatggcgaacagcagcatggagaaaaagatgccgctgcgtgtctggtagtcccgcgccatcatctggaaggccttttgaaacgtctgcagcagagaaccgctctcccgccaggcgcggaccgcgtccagcgactggatcagttcgtctcccagcggcctgtcgtaaaagcaggcgaccgtcagggggagcagcagcaggatcagcaccgctgtcaggatctttcggtagctccacagaaacgcttcgttcatcctcttactccttgcatgttcaagtaaaaatgcgaagaaacaaaggcaaaaagccttttcgtggaaattctatcatatttgattcctgccgtgcaacctgattttcccatggccgccaggccgggatgcagccgtttcctgtcttttattcttcctgaaaatgtgttatactattatcaggagcaattttgctatcataagcggaggatgaaaccgtgtttataccccgataccaaagcgagcagaccgacctgctgatgcgggcgctgctcgcccttgaaaccacggaggaagcccagcgctttctggaagatgtgctcacggtgcaggagcttcggagcattacccagcggctggaagtggccgtgcttctccggcagaaggtgacctatcaggagatcgcccaccagacgggcgcgtctaccgccaccatcagccgggtgaaccgggccctgcagtatggggcggacggctaccggctggtgctggatcgtttgcagaatcagtcagacacaccgatgaaacaagatgagggcagcgaaaaatgaatttggacggattgaataaggaacaacggctggcggcggaaacgctggaaggcccggtactgattctggcgggcgcaggcagcggaaagacccgggcgctgacgtaccgggtggctaacctgatcgaccacggcgtagcgccgtggcatattttggccattacctttaccaataaagcggctaaggaaatgaaggagcgcgtctccgccctcaccggcgaaaaaggcgaagaggtttgggtcagcacctttcactccatgtgcgcccgcatcctccgccgggatatcgacaagctgggctacacccgctccttcaccatctatgacgaggacgaccagtccgccgtgctcaaggagcagctgaagcatttcaatatcgacgataaaatgctgtccgtccgggaactgaagggcaagatcagcgacgcgaagaacaagctgctcagccccgacgaatggttccgccagagcgagaaggacttccgctgccagcagatccacgatatttacgacggttacgaaaagcggctcaaggcctccaacgcgctggatttcgacgacctgctggtgcgcacgctggaactgttcgccgatcatcctcccgtgctggagagctaccgggagcgctttcagtacgtccatgtggacgagtatcaggataccaacttcgcccagtacacgctggtgaagctcatcaccaaaaacagccgcaacctgtgcgtggtgggcgacgacgaccagagtatctacggctggcgcggcgcggacatccgcaatattctggatttccagaaggatttccccgacgcgaaggtgatcaagctggaacaaaactaccgcagcaccgccaatattctggacgcggccaatcaggtcatcgcccataacgcgggccgtatggaaaaagccctgtggacggaactgcccgcgggcgaacccatcaagctgttcgccgccggagacgagcgggaagaagccgcgtgggtctgcgaccgcatcgcccagcagcaccgccgtcaccgggaatacagcgatatggccgttctgtaccgctccaacgcccagagccgcgtgttggaagaaatgctggtgcgggcgggcattccctaccgcatctacggcggcctgcgcttctatgaccgcaaggaggtcaaggacatcgtggcctatcttcgggccatcgtcaatccctccgacgacgccagcctgaagcgcatcatcaaccagcccaagcgttccatcggcgacagcaccgtggcggagctgagccgctacgccgccgagaaggacatgcccctgtacagtgcgctggtggatattcccgaaagcctgtccgcccggccccgcaagtgtgtcagcgactttggcgagctgatgaacgagttggtgctgacccgggaggacatgggcgtcagcgagtttgtggagcacgtgctggaacgcaccggcctgaaggaaatgtacgagcgcgacctgtctgacgagggcaaggcccggatggaaaacgtacaggaatttctgggcgcggtggccgaatacgaaaaggcctcggataacccctccttggaggactatctggaaaatatcgcactggtcaccgatctggacaacgccgacctgaaatcctccaacgtgacgctgatgaccatccacagcgccaagggcctggaatttcccatcgtgttcatggtggggctggaggaaggcatcttccccaacggccgcagcctgcacgacgataaccggctggaggaggaacgccgcctgtgctacgtggccattacccgagcccgggagatgctgttcatcagctacgcggcccagcggatgctgtataatcaggtcaattacaacgcacccagccgcttcctgaaagaaattcccgaacggctgctggacgatcagtggatcagtcagcgggaaaagagcttccccggcgtgatggacgcgtactcgcatcccgcgcccaagcgggcgccccgccacaccatgggctccgggctgggcacgggccgcagcgcgctgggcgttcccggcgtgcagaagggcttcaccccctcggcggcggccagcgtgcccaaggacgcggtgcccgcgatctttgaggtgggcgaccgggtcatgcaccggaaattcggcgagggcaatgtgctggaaattcgcggcagcggcagcgacgcacggatcgttatcagctttaccgcctacggcagcaaggaattcgccctgtccatcgcccccattgtgaaggtggtcgactgacatgacgcagcttgaaatgcgcgctctggtggacgagcttaaccgggcgtccgttctctattacacccgcggtgaaagccccatgagcgacgcggagtgggatcaaaaatacaatcagcttcttcagatggagaaagagtcgggcatggtgctgcccgactctccttcccatcgggtgggcgcggagccgctgaaaaattttgagcagcataagcacatcagccgcctgtggagcatgggcaaggtgcagagcaaggaagaactgcgggactggatcgcccgcacggagaagctccacgctcagctgtccgacggccgggaagaacctctgccgccgctgcaatacgcggtggaatacaagctggacggcctgaccatcaacctgacctacgatcacggccagttgattcaggccgcgacccgcggcaacggcgtggtgggggaggccattctgccgcaggtcagaaccatccgctgcgtgccgctgtccattccgtggcagggccttctggaaattcagggcgagtgcatcatgcgcctgagcgtgctggaagcgtacaacaaaacccatgacgagccgctgaaaaacgcccgaaacgccgccgccggcgcactgcggaatctggatcccgccgtcaccgccgaacggaagctggacgcgtttttctatcagatcggcaccatcgaagatccgccctataccgacatggagggcatgatggccttcattcgggaaaatgggtttcccacggccaattttgaccgaaacgccgccgattacgacgaaatttccgctctgatcgaccagatcgaggaaaggcgggaaagtctggatttcctcatcgacggcgcggtggtcaaggtgcgggatatggccacccggcaggccatgggctatacggacaagtttccccgctgggccatcgcctacaagtttgcggcggaggagaacacctccaccctgctggacgttacctgggagctgggccgcaccggcaagctgacccccgtggctcatctgaccccggtggacatcggcggcgtgacggtgcagaacgccactctcaacaattatgacgatattctgcgcaagaaggtggccgtgggctgcgatgtatggattcgccgctccaatgatgtgatcccggagatcatgggccgggtgggagagcccgggccggacgagcggcccattgagccgcccatggtctgccccgcctgcggtcagccgctggagcgccggggcgcccatctgttctgcatgaaccgaaagacctgcaagccgcaggccgtcgcccggctgagccacttcgccagccgcaacgccatggacatcgacaccttttccgataaaacggcggagctgctctacgaccggctgggcctgcgggactgcgccgacctgtacagcctgaccgccaacgatctgctggcgctggacggctttaagcagaagcgggcggagaacctgatcgccgccattgacaagagccgccgctgcgcgctggacgcgttcctgttcgcgctgggcattcccaacgtgggccgcaagaccgccagagatctggccgaccgcttccgctcgctggacgcgctgaaagccgcctcgcaggaggaactgacggccattcccgatgtgggggagatcgttgccgccagcatcacggaatatttcagcttcccggagaacaaccagatgatccagcgtctgctggacgcgggggtttccccggtctacgaaagcacggtgcagtctcatgcgctggacggcatgaccatcgttgtcacgggcactttgcccacgctgagccgggacgaggccgaagcactgatcgccgcccacggcggtaagccttccggcagcgtcagcaaaaagacggcctacgttctggccggggaaaaagccggcagcaagctggccaaggccgaaacgctgggcatccccgtcatcgacgaggcacgttttcgggaaatgatcggagagtaaaagatgattttgcaggggagggacttcttttgcaaaagaagcccctcccctcagcctgtcgaaaaacccctgaccgaccgccatcgtctgcgaacagcgctctgcggcccgctcccctacggggcgcgggcttcggactgcggtagccctttcagggctgtcctcgtcctcggtgctgcgcacccttaagctggttcgctggaagaatgctgcggcataaggcttaggggctctgttccgcaacctcaatcgtcgtctttggcactgccgtgccaaatcctcgtttc

SEQ ID NO: 892 - DNA, 32759 bp, Unknown
  16S sequences of unknown bacteria
aagatactgcactatcaacacactcttaagtttgcttctaagtcttatttccatactcgctcttaatacaatatagtgtacctcgtaatcttcttgggcaagagctttccatggctccaaaaaccatggcccgacaatcccatctacaattacatcatatccgccacgagcatatcgctttgcagcctctaaaaaggcttcaatgacaaccagattttgcttgttggattctggcaaatgtggtggtattgcgcctttgcttaagtaatgaaaaaagtcatcggtgtgcatatgcactgatttatccatatctgattcctttgcgacaattgacgcagttgttgtttttcctgtccccggtgagcctgtaatcacaataattcttccttgattcatctatattttccctcacaatttgaatttatcactttgttcctgcctgctcaatcatcttcttcgccaactgctggaacaggtcggcagtttctttgtccatcggcgcaagctgtccgatctgtccggctatcatcgctgttacatcgtcaatggaaagcgggttttgtttctgctccgccatagtgtcccgcatggcttggaacatagcggcggtcacagcttctcccggctgttccccgttgtcaatgtctttcttaatgtcccgcaggatagccaggaacacatttttgattttttcaatctccgcttcatgttcccccatcttctgggcgttcaaaagctgtaaatcctgctttgcttccgcccggtgttccgggtgttctttcatcaggtcggacagggaagccgttgccatctcgataagctggtttcgtgccattatcccctttgccgccgtgtcctgaaaataaatccgtatcaaatctatcagcttgggaaaattcctgtgttccagtaagcgattgagtatttgcacatcaacagcacccgtcacaagccccctcacggctccctcggacaagcctaattcagaaatatcgtagcttttacggacgctcacggtagacaagcccagtatgtagtctgtcgataccttaaattcctttgccacacctatgagaatatcactgctgaccgttctcgtttcgccgctgacaatgcggctcaactgggaagcggaaacgcctatcttctccgcaagttccttttgtgtgatatggttcccgttgcataaatcggaaatccgctgtccgggtgttccgggtaaagccatagatacgcacctcctccgcatacttccattatacagaatgattgcaaaaatgcaatttccaaagtgtaaacttcatcaaaatgcaattctcgcaaaattccggggattgcatttttttcgtgtagacttagggtagttcatcgatggacagcaccttgaaaacagaatgaccgtccgaaaaggaataccccggctggggaagcaccgcaaggaaccggacttcgggacaaaatgtcccgaagctgcggggagcgtgccaaagctggaaatcctttcggggaaaacggcaacggaaagcaaaatggagggaacgcatgagaaataacccctataaagacttgccgccgctggaacgcaggccggacggttccctttaccgcatgacaccggcacagaggaaacaggcggccagcctgatacgccgggagtgctgttgctgtgaggacggcaactgcattgtccttgacgatggggacacctgcacctgcccgcagacggtttctttctcggtctgctgtaagtggttccgctgggcggtcttgccgctggacgggacgctggaagcggagattttccgggataaggacttgaaacgctgtgcggtctgcggcggcgtgttcgtccccaaatccaaccgggcaaaatactgccccggctgtgccgccagagttcacaggcggcagaaaacagaaagtgaacggaaaaggaggtctgctgtggacagttaggagcgaaaaaagccttgatttattaggctccgcaagccccaaaccggggcaggtggtataaagtatcgcccgccccggaaaacgggcttctaaccgtccacaaaacgcactatgacaaataccatctatatccatcagccggaaaaggcgttcagcttcacccggctcccgaatttcctctttgaagcccccacattcaagcccctgtccaacgaggcaaaggttctgtacgcctttatcctgcgccggacagagttatcccgcaagaatgggtgggcggatgactgcggacggattttcctgtattaccctatctgcgaagtggttgacctgctccactgtgggcggcagaaagcggtgaacaccctgcgggaactgcaatacgccggactggtggagatccagaagcagggctgtggaaaacccaaccgcattttcccaaaatcctatgaagcggttccaaacaccgacttcaagaaatcccgttctggtacgccggaggactgaaaaccgtacccatgaagtacggaaaccgcccctcttgaagtacgaaaaccggacggtatatagaaatacaaagattaaaatgatttatttatatccattccattcctatcgtatcagagataattccggcgggattttccctgtggaaaaccccggataggaaaggaatggggaaaggagcagaatggcacaacacgcaattttgcggtttgagaagcacaagggcaacccggcaaggccgctggaagcccatcacgaacggcagaaagaccaatacgccagcaaccctgatattgacaccagccggagcaaatacaacttccatatcgtcaagccggagggacgctattaccacttcattcagagccgtatcgagcaggctggatgccggacgaggaaagacagcacacggtttgtcgatacgctgataaccgccagcccggagttcttcaaggggaaatccccaaaagagatacaggcgttcttccaaagggcggcagatttcctcattggccgggtaggacgggaaaatatcgtgtcggcggtggtacacatggacgagaaaacgccccacctgcatttgacctttgttccgctgacaaaggacaaccgcctgtgcgctaaggagattatcggcaaccgggcaaacctgacgaagtggcaggacgattttcacgcctatatggtggagaaatatcccgacttggagcgtggggaaagtgccagcaagacaggccggaagcatatccccacccggattttcaaacaggcggtttccctctcccggcaggcaagagccattgaagccgcccttgacggcattaacccgctgaacgccggaaagaaaaaagaggaagccctctccatgctgaaaaagtggttcccgcagatggagaatttctccgggcaactgaaaaaatacaaggtcacaatcaatgacctgttagcggaaaacgaaaagctggaagcaagggcaaaagccagtgaaaaaggcaagatgaaagatacgatggaacgggcaaagctgaaaagcgaactggacaatttacagcggctggttgaccgtatcccgccggatatactggcggaactgaaacgtcagcagcggcacacggtaaaggaaaggtgatagatataagcagaaattttcgccgcctctgtgcggcattgtaccttgaaaactgaatatggaggacactggatggcaaaaagcgaaagcgatatttttacgccccggacagggcaggtcatacaagcagagaacggcacgcagtattttgtatgtgggaacaaccgtataaaaatctccgaacacttcgccgcaggcgggaagcccctcggtgatctgattgtagatgtggtgcggcataccgcagaaaaagccgcttcaacctgatagcccatcattgataacacgcccacgcttatgatataattgccatagagcaaaagtattgtaagcgtgggttgtttctttagaaggaggatttttacggtgaaacaaccttacaatactacgatttacaacacggcgctttatatgagattgagccgggacgatgaactgcaaggagaaagcgggagtattcagacacaacgcatgatgctccggcaatatgccgccgagcatggcctgaatgtcatagatgaatatatcgacgatggatggtctggaacgaactttgacaggccggattttcagagaatgattgatgacattgaggacgggaaaatcaactgcgttgttacgaaggatttatcccgcttaggcagaaactacattctgaccggccagtacacggaaatctactttcccagcaaaggcgtccgctatatcgctgtcaatgacaatgtggacaccatcaacggagagaatgagcttgccccattcctcaacattctgaatgaaatgcacgcccgccagaccagcaaaaaggtaaaggcggccatgcggacacggttcgcaaatggcgcacactatggagcctatgctccgcttggctatgtcaaagacccagataagaaaggccatcttctgattgacccggaaacaaggtggattatcgaaaagatttttgaccttgccgttcatggccggggagccgccagcattacacggattttggtcgaagaaaaagtacctactcccggctggctgaatttccagagatacggcactttcgcaaatatctatgccggagcgccggaggaaaaagcctatgcgtggacgatagcgcaggtaaaaagtattctgaaagaggaaacctatatcggacacagcgtccacaataagcagaccaacatttcattcaaaaacaagaagaaagtacgcaagccaaaagaggaatggtatcgtgtggagaacacccacgaagcgattatttccgaagatgtgttccgtcaagtacaggagcagatttgcaacaggcgcagacggcagaagaacggcacaacgcagatattttccgggctggtaaaatgtgcggactgcggctggtcgctggcctatggtatgaacagccagaacaaaaatccctatgcccattatcattgtagcaagtatggacagggcacacgccaatgctccatgcactatatccgctatgatgtgctttacgcctatgtcctctcccgtctgcaatactggtctgtgctggcacagcaggatggggacaaacttctgaaacggctacttaacgccagcgacaaggaacgcaatactgcaaggaagcggcagacagccgaactgaaaaaggcggaaaagcgcaaagcagaagtagacaccctgtttgcaaaaatgtatgaggactggtctgccggacgcattacagaatacaatttcaatatgctgtccgaaaagtatcagggcgaacagcgagaattggacgcaaaaattgaacggcttcacgaagcgatggaggccgccgcccagacagcggttgacgctgaaaagtggataggtctgatgaaacagtatgtcaatcccacagaattgacggctgaacttctgaatacgctgattgaaaaaatccttgtccatgaagcggtcaaaagtgaggacggaagccgggaacaggaagtggaaatcttctaccgctttatcggcaaaatcgaatgacacatcttgagatacccaacaatatctttaactaagggaaacggggcaggccatgccggaccttgaccgcgtggtgcgaatgtcggagctgtttggcgtaagcacggacagcctgctcaaggatacccccgagccggacaggtccgtgcaggaggctgcgcgagccgtaaccatggaggaagccgaagccttcctttccataaaggaaacgatggcggaccgcattgcctgggcagtgtttgcctgtgtgctggcgcccattccgttgcttatgctgagtgctctggccgaggcgggccggctctctgaaaatgtggcaggcgcggtgggaatcgcagcgctacttgtgctggcggcgggtgcggtggcggtgttcatgtcctgcgggatcgcctccgaacgctacgagtatctggaaaaggaaccgattcaggccgcacgcagcgtgatccagatggcccgtgaacagcaggaaagcagccgggagcgttacgggcgatggaacgttgtgggcgtgagcctgtgcatcctggccgccttgccgctgctcattgccgccatgctaagtgaaagcgccgtggcggtgatcgccgccctgtgcgtgacgctggcactggcagggcttggaactacgtttttgattcgcgtgggcatccgctgggaaagcctgcaaaagctgttggaggaaggcgattacagccgggaagccaagcgcaggcggcacggccatggcagcataagcgctgctttctggcttggaacggtgtccatctatctggcctacagctttatcaccggcgactggcggcgaagctggattgtgtggcccgtggcgggtgtactctatgccgcgctggccgtggcgctgtccggcaggcgcgggcgctgaagcggcgtttccgcgcccgcggggtggggatagccgcgggtcagccgttgcgggccggacttgccgggcgctggagcagcgcctgcgccgcctgcgccgccgcacgcatggcggtgggcaggggcagggcgcgaagctcctcccccgaaaccatgcggccaccgcaggcttccaacgcctgcggcgagggctcgtcctccagagaaaaatgccatagctgcatctcccatacccgatgggtgaagacatgacgcgcccgccccaaatcctccgtgaaccggcagggcaggcccgcttcacgcaacagggcttcggcgcgctccgggcgcgtttcgtcctccagcagacagaacacgtacaggccgcccagcatgcgttcatcccgccgcgtcaccagcacgcggcgcttccatgtcaacaggcatacggctacgtccacccgcttgggagggcgctttttttcgtgcacaggcaaaagtgccgcgtcgccctcgcgcgccgcatcgcaaagcccgcgccatgggcagtcgtcacagtcgggttcgcccgggtggcacagcgtggcgcccagctccatcaaagcctgattgtaatcgccgggacggtccgcgggaatatcggccgtcaccagattgcggatgcggcactgcacaaccggtcggcccacgtcctcccgtatgccgtaaaagcgtgaggccacgcggtacacgttgccgtccaccgccggtatacacagcccgaaggcgatgctgccgatcgctcccgctgtatagggccctacgcccggaagggacagcagcccctcgtagcttgtgggaaaagcgccgccatacacgctcataatgacctgcgccgccttttgcaggttgcgcgcccggctgtaatagcccaggccctcccaggccttgagcacctgctcctgaggggcgtgtgccaggtctgccacggtgggaaagagcgccaaaaatcgattgtaataggactttactgtctccgtgcgggtctgctgcaacatgatctccgaaagccagatgcggtaggggtcgcgggtgtggcgccacggaagatcgcgccgtacggcatcgtaccaggccagcagcggctcacaggcgggcatatcatcctctcctttcgcttgccttgctattgtaccacagggccattcttgcgcatgaattgaatctaagagaaaataaaagaaaaaagaagatattaaaagataattcgagaaatcaaatcatcatataataatagaaacctttttttcatctgcatagccgaaaaacaggtgaacagcggcttgccacttggcaggaaataacgtatagtaaggactgttgttagcactcatttagcatgagtgctaacaaggctgaaactacaatcgaacggatagggaggatacagtgatgaacgttaagcctttgggcgaccgtgtggtcatcaagaacgttgagatggaagaaaccaccaagagcggcattttgctcaccggcaccgctaaggaaaagccccagatggctgaggtgctggccgtgggccccggcggcatggtggacggcaaggaagtcgtcatgaacgtgaagcccggcgataaggtgatttactccaagtatgccggcactgaagtgaaaattgacggtcaggagatcatcatcgtgcgtcagagcgacattctggccaccgtggaatgatccatttttgagcgacgcaatatagaggaggaacatcattatggcaaagcagattaaatacggcgaggaagcccgccgcgcgctggaaaaaggcgttaacgctctggcggatacggtgaagatcacccttggccccaagggccgtaacgtggtgctggacaagaagttcggcgcgcccctcatcaccaacgatggcgtgaccatcgccaaggaaatcgagctggaagatccctttgagaatatgggcgcccagctggtgaaggaagtttccaccaagaccaacgacgtggccggcgacggcaccaccaccgccactttgctggctcaggccatcatccgtgagggtctgcgcaacctggccgcgggcgccaatcccatggtgctcaagcgcggcatcgaggcgggcgtgaacgccgctgtggaagctctggccaagctgagccagcccattaccggcaagcagtccattgcgcaggtggccagcatctccgccggtgacgataccatcggcaagctgatttccgaggccatggaaaccgtgggcaacgacggcgtgatcaccgttgaggaaagcaagaccatgcgcaccgaaatgaccaccgtggaaggcatgcagtttgaccgcggctatgccagcgcctacatggtcaccgataccgagaagatggaagcggtgctcgacaacccctacatcctcatcaccgacaagaagatttccaatattcaggagatcctgcccgtgcttgagcaggtggtgcagtccggcaagaagctgctcatcatcgccgaggacgtggagggcgaagccctggccacgctggttgtcaacaagctgcgcggcaccttcacctgcgttgcggtcaaggctcccggctttggcgatcgccgcaaggaaatgctgcgtgatatcgccgtcctgaccggcggccaggtcatcagcgacgagctgggcatggaccttaaggaagctaccattgatatgctgggcagcgcccgccaggtgaaggtggacaaagagaataccaccatcgtggaaggcgccggcagcaaggaagacatcgccgcgcgcgttgcctccatccgcagccagattgaggacaccaccagcgattacgacaaggagaagctccaggagcgtctggccaagctggccggcggcgtggccgtcatccaggtgggcgccgctaccgaagtggaaatgaaggagcgcaagctgcgcattgaggacgctctggccgcgacccgcgccgctgtggaagagggcatcgtgcctggcggcggcatcgcgctgctcaacgtgctgcccgctgtgcaggctgaactggccaactatgccggcgacgccaagaccggtgtggaaatcgtggtgcgcgctctggaggagcccctgcgtcagatcagcaagaacgccggtatcgacggcagcgtgatcgtggagaacgtcaagaacagccacaagaacggctatggctatgacgcgctcaagggcgagtatgtggatatgatcgagcgcggcatcatcgatcctaccaaggtgacccgttccgcgctgcagaacgccgcgagcgtggccgcgatggtgctgactaccgagagcctcgtcgccgacatccccgctcccgaacccgctgctcccgctggcggccccgctggcatgggcggcatgtactaagccgaatatcaaacggaaaactggcccgcacggcatctgccatgcgggccatttcctgttgtttattttatcgaataacaataaaaattaattgacaaacaataatacctgtgatacgatcttattattccaatccagaaggaggtatttttcatgaagaacacgacggtggccggactgctgcgggcggcgctggcattgtggacagccgctgtcttgacggcagcagcctactttgttcccgtattcatgcggcacatctgcgccgttcggccggaattggcaggttggtacggctggggtgtagcctttggatggctgctggcggccatgatgctatgggcgtttatgctgttgtggcgggtgatggggaccgtcgcacaagggcgggcatttgtgcgcaaaaatgccacgcgcttcaggcgggtgtggcaactgtcggcggctagttttacgctatgcgcgggactgggtattttcatggtcctgaccaatatccttccgccctttctggtgttgacggtcacaggccttttgctggccacggccacggcagggctggccagtttcgccctcagcggcctgtgtcaaagcgccgccctgctgcgtgaggaaagcgaaatgacggtataaaggaggcagccatggcaattcaggtcaatttagacgtcatgctggcccgccgcaagatgaccctgagcgagctggcatccaaggtggacatcacgctggccaatctcagcgtgctcaagaccggccgtgcacgcgccatccgcttcagcacgctggacaggctgtgccgggcgctggactgccagcccggggatctgctggcctatgtgccgggggagacggaataaggattgtcgacgcgtgggatgagcttccatgcgtcgatgtcattttcataagaatataaatacttatatttacataaaaataaaaaacttgaattataaccttacaataccttataatgatccatattggtatggtttaggaggagatgatatgacgcacgaagccatgcgtatgaagcggtttgttgtggatcattttataaaactaatagggatcagtatcttcttttttcttgtctggggaggatggctttttcatctgaatcctaggattgacacagaatatcggatcaatacgccttacactgatagtggatggcttaccattggccggcaaggggcaatactgacagaaatattgtttcaccttcgttggttcaatccatattttgcatcactaatggggtattctgtgctatgtgtcacatctctaggcatgggatactatttgataagagcacatcaggggcgaaactgcacctggtcaatctatggatggttcgggatcatttgcttttctcatccgattatggctgagatggtctactttgatttacaaattattcagattgcatgggcatacatgctttcaattgcagcagccgctttgacccttgtctgggcttttcgaggataccgcctggcggcacctctttcgatgctgtgtatgatctgggctttttcaacataccagacctttgtcacaatatatattgctatttgcgccgccgggtatatactgcactttcagcgtgttatcaaagacggagtccataatgagaatgcgtttataatcgcactgaaaatcgtgtcgctgtttctggcaagttttgcaattaatcaatggattacaagcatttggttttacagcagcgactatctgaattacaagttatcatggacaagggtatcgcttagagaaggtctgttgagcgtcatacggtatattatctcatctcttacggggaacaattcggtttttcattctgcttggtatctgttttttgccttgggtgctgtaatttgtacggtgataaatgctgcgcatgcaaaagagaaaggggtaaatcgttggatgtatttgctggcaatgtttgtgctgcagatatctcctttcgcactcggtatttatctgggcgaagcgcctccgatacgggctcagctcgtctatccgattgtgatggctttcaattgcctgttttgcctcgaattctgcggaaaatgtaaatggaggctagcatactatggatgtacattgctgatgctggttatgctttttatgcaggttcagaccacgacaagacttatttataccgatcaagtccgtgcaaaggaagatgtcaatataatcggaagcataatgaaagaagtaaaattgatcaatgatgacaaacctgttgcctttattggaagaagacctgccacactcaatcacgcttgccttaagggggatcttataggaaaatctgttttggattgggacacctatgcgtatccgttgtatattcactcaactgcaagaattgttggggcagcaaatacgcttggctatgcgtgtattggcgtttccgatgagagtatgatggagagggcatgtcaagtagcgcagaacatgccgacttatccagcaacaggttcggtttacgatgccggcgaattcgtggttgtgaaattatccgagtaaagcaaacgatatttgcataatcccattaatggtagaaaacatagacgggcataaccgcatgtactcaagtttcatatctataagggacaaaattcgagcagggggatggggagaacggttgtccgttactgtttacagaaaaacagtaagcaaacttgaaaaaggataagtgaatcaatactccttgtgctcgcacacccgcaccgacgcgaggacagagcaggccagcagcacaagcgccgccaggaacagccagccggtgccggcgggcagggcaacagggaacacatcgggaaacatcaccgtcaacgcgacaggcagcagcaccaccacgatcatcaccatgcgtcccttctgtacgccaaagcggaacaacagtggcagcatgatggaaatcatgcacagtccagctgcaagcagcagtccgatcgtggaaaacacctcgtccggcgtggcgcccatcatcagcgcgcagaccgccgacagcagggccattgcccctgcacccaccagcgccagcagatacttgctcaaggcgagatcgcgccgcgtcacaggcatggtaagggcgtaggcgtcccatttgcagttttcgtcataggccagcgcgttgaccgggagcagcagcaccatcaccgtcagcatgctgctgatataaaccgggctttgctgggcaaagccgatcacgataaacagcgccagcagcagggcccatacgcgtatggtctgcttgaggttgagcaggtccttcatcagaagtcctttcatctcaatgttcctccttgatgtgatagagcatgatgtcctccagtgtggccggctgatgcgccataccggcaggcagggcgctgcgcaggatgagcgcctcggccccaaagcggcctgcgcgtacgcccacgaccgccgcggggtccaggcggcgcagctccgcctccggcgctttggccatcacataacggtccatcagctcgtccttgggttcggacaaaagcagacgccccttgtgcagaaaggtcacgtaatcgcataccttctccaaatcgctgatgatgtgcgaggacagcagcaccgaccggcgctcgtcctgaatgaaatcacgcagcacgtccagcatctcgtcacgcacgacagggtccagtccgctcgtggcctcgtccagcaggagcagccggctgtcgtgcgagagcgccgccgcgatggacagcttcatccgcatgccacgagaaaaggcctttaccggctttttgcggggcagctcaaagcggtccgcccagccctggaagcgcagcgtgtcccaggtgcggtagcagcggctcaaaatcgcgtccacgtcatgaagcgtcaggttttcgggaaagccgcagtcgtccatcaccacccccagatgctccttggtttcgcggtccactgtggcgcgggccagcaggcgcgcgcctccctcgtcgggatgtaccagacccaacatcagcttgagcgcggtggttttgcccgcgccgttttccccgatgaggcccatgatgcagccttcgggcagagaaaaggaaaggtggtccagcgtaaagccggggtagcgcttggtcagccccgtgatctccagggcattgttcataggtcctcctccttgtagagcatgcttagaatgctggtgaggccgtccagatccagaccgcacaggtgcgagagggatactgcctcgcgcagatggtcctccaggcgccgctggtgctcctcgcggatgagctcggtattcgcgcccgccacaaagctgcccttgccggtaaggcttacgatgaagccctcgcgctccagctcctcataggcgcgcttggtggtgatgacgctgatgcgcaaatccttggccagcgcgcgcaaagagggcagcgcatcgccttccttgagcttgccggagagaatctgcgcctttacctgcgatacgatctggtcgtagatgggctggccgcccgcattggtcaggataatatccatggtgtgcctccacttaagtgtgcatgtacattatacacagtataaacgatttgtcaacaggaaaatagcggcgcagagccgccagggtccggtcaggggcggaacccctgataaatgcgccggatttcttccaatacttcgggatggttgaaatcgtcctgataaaccacattgatttcgcgcaccatgcgcatcccctccactggaagcgctaccagacggccgtcggcagcctcctcgcggcaggcgctgtgggcgatgatggtcacgcccagattggcggccaccagctccttgatggcgttgatgttgtccatctccaggcgcacgtcgaagttgcggatgttttccatatggccggtcaggctgctttcaaacaggcggcgcgtgcctgcgtcctcgcgccggaggatgaggctttcggccttgagctcttgcaaggtgatggcagtgcgtttcgccagcgcatgccggggcgacatcaccacgcacaggtaatccaggtccaaaagctcagtatgacagtgcttgagcgacaccgagccgtccacgatggcgaagtccagctcatagctgcccaggcggtcgcacagctgctccatggtgtcggtgacgatgctgatgttggtgtggggatgcgcgctgcaatagctgctgaacacacgaccgatgagcgcctcgccgcagctgggggtgatgccgaccgtgaaatggcgcagctgctgcttgacgtcattgagggcacggcgggcactgtcgctgatggcctccagccggcgggcatacttgatgagaacctccccttccggagttaatgtcaatttcttttggtttcgataaaaaattcttatgttgagttcctcttccagctgacgcagatgatagcttaccgccggctgggacagtgcgagcgcatcggcggctttggtgtaagatccttcttttacaacgcatagaagcgtctttagctttgtatctatcatcgtttacccctcccctgtatgctggtgggcgcagataaaccatcaaaaaacctgatggtatcattcgttttcatcatttgattttatcatgcttcgctgttacaatcaaccccatcatccagcgggtgatggaacatatggtgggaaggatgatgaaacatgagggatgtatttttgacgctcagccccgcagccaggatcctggcagcggtgacgattctatggctggcgggttttctgatgtcgcgcgtaaccaaggtgctcaagctgcccaatgttacgggctatattcttgcaggcgtggcgatcggtccctacgcgctggcctgattccttccgatatcgtaagcggcatggaattcatcaccgatatcgcactggcctttatcgcctttggcgtaggccgctatttgcggctggaccggctcgagcagcagggtaccaaggtgattgtgctcaccctgatggaggcgctggtcaccgcagccgttgtcacagcctttatgctggtggtctttcagctgcccctggcgttttcgctgctgctgggcgccatcggctccgctaccgcgcccgcttccagcctgatgaccatccggcagtaccgggccaagggtccgttcgtcaacaccctggtgcaggtggtagccatggacgacgcggtggccctgctggctttcagcgtgtgcgcggccatcgcctccagcacggaaacccctgtggtggactggcaaagcgtgatcactccgttggcggtgaatgcaggcgtgctgctggcggcctatctgttgggacggctgctgtgcgtgctgctcaacggccgctcctcggaccaccggctggtgctgacgtgcgcgtttgtattcttcatcgcggcaggctgcgccgcgctggatgtatcgcccctgctgggctgcatgctgctgggcgccacctacgtcaacgtgcgcggcgacaagacgctcttcaagcaggtcagccgggtaacgccgccgatcaatgtcatgttttttgtcctgagcggcatgcaccttgatctgaattccctgaccaccgtgggcatcatcggcgcggcatatttcgcggtgcgcatcgcgggcaagtttctgggctcctggatgggcgcgcgcatcacgggcatgccggtgggggtgcggcggtatctgggcctggcgctgattccgcaggcgggcgtgagcatcggcctggctgtgctggcccagcgcatcctgccggaggaatccggcgcgctgctgagcacgatcattctgtcgtcctccgtgctctatgagatgatcggtccggtgtgcgcgcgcaaggcgctgttcctatccggcgcggtgcccggcgtgcagggcgcacctctggcggataggccggcggagaaagcggtcaaggccgataagatagcggaaaagcccgtcaaggccgacaaaaaccagaaggctgacaaggcgttgaagtccgataaggccacgaaggcggaaaagcctataaaggcgcagcgcgacagcagggaaagcgataaggccgccgccaggaaaaacaaaaaaaccgtcctggacggacggcccatgccccttccggagccccagccgaagatccgctgggcgggtgcaggcgagcggatgtgggccatgcggcgggagcagggcagcttccaccggggataagaaacgcggcgcggcttccagggaggaaaccgcgccgccgctttatcggtagacgatgcgcgcgccaaatggcgacagcgacagccgcgccagcttgaagcactgcatgccgaagggaatgcccaccaccgtcaggcacaggagcaagccgttgatggcggcggcaagggccagccacaggccgctcaccagcagccagatcacgttcatcagaaaggagggcacgccgccgccggcttccacatcccgaccgaagggacagaaccacagcgcggccagcttgaagcactggcggcctaccgggatacccacgatggttatgctccataaaacgcctgcaagcagccacccgattccctgccacaggcccgcgaaaagaaaccagatcacattgcctaaaaagttcatcattcttcaccccgcatcagtatagcattggatcagggtcaagaaaagcgatctttccttttctaatgaaagcctcatgctgctccaatgctgcatgataaaaaaaggggcgtggggaaaaacttccttttccccgcgccctttcgcacggaattacaaggtttccatcgtctgggcgatggcgtccaaaaatgcgtcgctgttcaggcccgtggcctcgccctcataaagggccaccagatccttggtcatgcggccgctctcgatggtggccagggtggctttttccaggcggtccgcaaaggcctgcaggtccgcaagaccgtccagctcgccgcgcttgcgcagcgcgcccgtccaggcgaagatggtggctacagggttggtgctcgtttcctcgcccttgaggtagcggtagtagtggcgggtgacggtgccgtgcgcggcctcgtactcgaactgtccgccgggggagacgagcacgctggtcatcatggccaggctgccgaaggccgtggcgatcatgtcgctcatcacgtcgccgtcgtagtttttcagcgcccagatgaagccgccgcggctgcggatgacgcgggccaccgcgtcgtcgatcagcgtatagaaatactcgatgcccgcggcctcaaaggcggccttgaactcagtttcgtacagctcggcaaagatgtccttgaagcggtggtcataaattttggaaatggtgtcctttgtggaaaaccacaaatcctgcttgaccgacagggcgtagttaaagcagctgcgagcgaaggaagcaatgctgcggtccgtgttgtgctggccctggatgataccgggcccttcaaactgcataatggtctgccggacctcggagccatcctcaccggtgaagcacaattcggcctttccggggccgggcacgcgatactcggtgtttttatatacgtcgccgtaggcatggcgggcgatggtgatgggcttttcccagttgcgcacgcagggggagacgcctttcaccaccactggcgcgcggaacaccgtgccgtccagtatggcgcggatggtaccgttggggctcttccacatctgcttgaggccgtattcctccacgcgctgggcgttgggggtgatggtggcgcatttgacggccacaccgtatttcagggtagcctcggcgctttccacggtgacgcggtcatccgtctcatcgcggtgcttcaggcccaggtcatagtattcggtcttcaggtccacatagggcaaaatcagcttgtccttgatcttctgccacaggatgcgggtcatctcgtcgccgtccatctccaccagcggcgttttcatcaaaatcttgtccaaaacaatcccgtcccttttgccattgtattcgaccgcacggagggtccaaggctattgtatcgggtttgcacgggcttggcaatacgcggtacagcaaaagaacagcgcgcttgtgcggccgcggggtttgtgctatcatcgaggtacgctgccggcacacctgacaaagcgccgcgaaaggagagtttccatgacccgtgaacaacgcctggcccgtaccgctcttttgatgtcccccgcacagatggagcggcttgcacacgcgcatgtgatgcttttgggcctgggcggcgtaggcggccatgcggcggaggcgctggcacgcggcggcgtgggcaagatgaccatcgtggaccacgacacggtttcgccctccaatctcaaccgccagcttgtggcgctggaaagcaccatcggcctgcccaagacgcaggtgatgtaccgccgactcaaggatgcggctccggacctggacctgaccgccattgatgccttttacctgccggacagccccgtgccgatcccggaggacgcaaccgtggtggtggacgccatcgatacggtgtcagccaagctccatctggcacgggtatgccgggaacgcggcgtgccgctgatcagctgcatggggatggggaaccggctggaccccgcgcaaattcgcgtgggcgacatttttgaaacctccggctgccccctgtgccgcgtgatgcgacagggcctgcgcaagctgggcgttccgtccctgcgctgtgtgtattcgctggagccggcccgccatccgcgggcgggggagggggctgaacaaaagggcgggcatcctgcgcccggctcggtcagcttcgtgccttcggtggcgggcatctatctggcagcggaggccattcgccttattgccggagaagggtgagaaagttcggcacaggtgtggcgttttttcgcattccatggtaaaatagcacacagatggcgcatagagcgccgcaacgcttggagggttcatattgaaaagggacatcattatcatcggcggaggcgtagtgggctgtgccgtggcgagactgctgtcgcgctatgaagcggacgtcgccctgctggagggcgccagcgacgtgtccgagggcgccagcaaagccaacagcggcatcgtgcacgcgggcttcgatgccaaaccagggacgctcaaggcaaagctcaatgtagagggagcgcggatgtacccggcgctgtgcgccgaggtggacgcgccctatggtcagcccggcgcgatggtgctggcctttacggaggaggagcgcgccaacatccaaacgctgtacgagcagggcgtggccaacggcgtggagggcctgcgtgtgatcgagcgggaggagatcctctcgctggagcccaatgtcaaccccggcgtggtgtgcgccctgctggctcccaccagcggcatcaccagcccctatgagctgacctgcgccctggcggaccatgcagcggtcaacggggtggattttctgctggatacctttgtggagtcggtgtgccccggcggggcgggctacctgctggaaacgacccgtggccccatggaggcccggatcgtgattaactgcgcgggcgtggactcggcgcggctgcataaccagctctgcccccaaaagccgcttaccatcatcccgcgcaagggcgaatactacctgctggatcataccaagccccttgccttctctatgaccctgttccagacgcctaccaagatgggcaagggtgtgctggtcagccccaccgtgcatggaaaccttctgctgggtccctcggccatcgacgtcaaggacggtaccgccgtggaaaccaccgctcaggcgctgaagctggtggcggatgcggcgcgcaagacctggccgagcgagagcctgcgcggggtgattaccacctttgcgggtatccgcgcgcatgagaaaaatggcgactttgtcatcggcgcagtggaaggcgcgcccggcgcctatgagacggtgggcattgaaagccccggactcacatccgctccggccatcgcggagatgctggtgaagcagatcgcagaggaaaacggcctttcggaaaaagcggaatggaagcccgcgcccaggcgtgagaagcccttctacgccatgacgctggaggagcgcgtggccatcgtgcaaaaggaccccagctacggcacgctggtgtgccgctgtgaggaggtcaccgaagccgagatccgcgcggcgatccgccgcccggtgggtgcgcggaccatcgacgcggtcaagcgccgcacccgtgcgggcatgggccgctgccagggcggcttctgcagcccgcgcgtactggagatcctctccgaggaactgggcatcgacccgaccgaggtcaccaagtgcggcggggaaagccgcctgctggtaggcaccatcgccgaagcggcacgaaaggaggacgcctgatatgttgagccaggaacttcgcagccaggtgcaatatgtggacgtgctggtgatcggcgcgggcccggcgggcatggcggccgccatcgctgcgcgtgaggcgggcgtcagcaacctgctggttttggaacgcgaaaacgacatgggcggcattctgcgccaatgcatccataacggattcggcctgcaccgcttcaaggaggagctgaccggccccgaatatgcccagcgcgacatcgaccgcgtgaaggagatgggcatcgaggtgcgctgcggcaccaccgtgctcagcgtggacggcgaccgctttgtgaccgccgtgagccgtgaaaagggcgtgcagctctttgaggccggcgccatcgtgctggccatgggctgccgcgagcggccccgcggcgcgctggcgacccccggcacgcgctgcgcgggcgtgttctccgccggcacggcgcagaaattcgtcaacctggagggctatatgcccggcaagcgtgtggtcatcctcggcagcggcgatatcggcctcatcatggcccgccgcatgacgctccagggcgccaaggttctggcctgcgtagagctgatgccctattccagcggcctcaaccgaaacatcgtccagtgcctccaggactataatattcctctcatgctcagccatacggtgatcgatattcaggggcgtgagcgcctcagcggcgtcacggtggcgcaggtggacgagaagcgccagcccatccccggcacggagaagcatttcgactgcgacacgctgcttctgtccgtgggcctgattcccgaaaatgagctcagccagcaggcgggcgtggagatgagcccgcttacccagggcgcggtggtcgatgacagcctgcaaaccagcaaggagggcatcttcgcctgcggcaacgtgctgcacgtgcatgacctggtggacttcgtcagtgccgagagcttcaaggccggaaaggccgccgcggactatgtacagggcagggcccgcaagggtgcgtatgtggccctcaaggacggcgacggcgtgcgcggcgtggtgccgcagcgcctgctcaagcccgaaggcgaggcgcagagcgtgcaggtgatgttccgtcccgcgggcgtgtatgagaacgccaccctgtgcgtgatggacggcgaccgtgaggttctccggcagcgcaagcgcatcctgacccccggcgagatggccgagctgaccctcaagccggagcagatcgcgtccctcagcggcgcggatgtgaccgtgtgtgtgaaacagtaaggaggcggccggtatggaacaacagatcacatgtatcaattgccccgtgggctgccgcctgcaggtggtggtggaaaacggcgaagtcaagagcgtgaccggcaacagctgcaaccgcggcattacctacgcaaaacaggaatgcgtcgcgccccagcgcatggtgaccgccgtggtgcccgtggcagggcgcaagtgccccgtgagcgtgaaaacgcgcacgcccattcccaaggagaagatcggcgcgtgcatgcatcagctggcggatctgaacgtgcagcctccggtacatatgggcgaggtggtgtgtcccgacgtgtgtggaaccggcgtggacgtgatcgccaccaagaccgtggagtaatcttcaacccgcataatgaatcaggcgcccggccaaccggccgggcgctttgattggtatacactttataccgtttggctatcctaccccttagaaaaggagggggaacggcatgaacgggctgatgacggaacgggaatggcgcaggcaggcggcgcgcgccaaaccgccccggtctgtctgctggggcgcgcagtgcgtgctgcccgcgaaaagacgcaaaaaactgcgggaggaccggtccttttctgtatttctgctgctgctgtcgctggcggcggcgctggcgatgcccgtgctgaccccgcggaccttgcggcagcagtatccagaggctaccacggcagaaagcccggagggtgtgcaggcccgcgcggtcagctccgtgagctatgagctgcccgaagggctggtgacgaaatccgttacctattcctatgaacggttgctgctgggagggctgatgctgctggatgaggagcatccgcttcccgatggagcgcctgcgcccaataccatgagcgtcgctacctatggaaagggcatggtgccggtgaacggcttaagcgtcaaaagcgggcgggacaccatccaggcgttggcggagctgtttgcgagcctgcgctcggagggcgtcagcggcctgtgcgtatggagcggtacactgacccggacggagcaggccgcctcgcaggcccaggcagcgcttcggtatgcagcccaaatgtctctggaggatgcggtgcgaaagacgctggcgcaggatacgcccgtatccgccgctgagcagcagcgggacgataccgtggaaatccggctgatcgcaggcagctcggaggaccccgaccctcgccccttggatgatacgcagcagggccgcgcactgctcaggctggcgtggcgatcgggattcatccgccgggaaccggaaggagaaggtgcgtccgccttccgcttccggtacgtggggaaggcgcacgccacagccatgacctacctggacctgacgctggaggaatacctcgagtggcttcatgaaaagggggtgctggccgtgcaggaggacggacggctgaaatacctgatcctgtgcaagcccctcagcggcacgcatgtcgcctttgacctgccgcaggaagccgccgttgaagccagcttcgataacgacggctatgccattgtggcctgtacctttgaagaaagctgaaaagaagacagcgaaagcggcgctctccggggccggatggccggcggaaagcgccgctttatcagcgcgcttttggggtggcgctccctgtgccgctcagttccgacggcacgcatgacaggctgcgcagccgccttcgcccgtctcacgcagcgaggaaggcatggcgtcgcctacatcgcgcatggtgagaatcatctcgtccagggggatggggcaggccacgcccgaaagcgcgagctgagccgcgctcaccgcctgcgacacaccgcccacgttgcggtacacgcaaggtacttccaccagcccgcccacgggatcgcacaccaggcccagcgtattcatcagcgcaaaggcacaggcatgcgccgccgcctccggggagccgccatagagttgggtgagtgccgccgcagccatgcccgccgccgtgccgcattcggcctggcagccgccctccgcgccgctgatggtggcttgcagcgcaatcgcacgtccaatcgccgccgctgcaaacagcgccatcaccagttcatcgtccgaaaaaccttccgcctcttgggcggccagcagcgcgccgggcaagatgccgcagctgcccgccgtgggcgcggccacgattttgcccatgcaggcattgtactccgcgatggagagcgcgtagatgcccgcccggcccgccaggccgaaacggccggcaaaaggcgattgggccagcaacgccgcctgcccacccaccatgccgctcacgctgcgcagcgtgggggagaggcccgcctgggcgctttcgcgcatcacgcgcagacgcccgtgcatcagcgccaggggaacagaagggtcctcgccccgctcgtgcgcctgccagtgaagcgccgccgcgcccaggctgccgtgctggcgcgcggcgtccagccattccgctacggtacgcatgctcattcctccttggcggccagataggccacatgatagacaccctgcaaagccgacagccgggcgatcagcgccgcgtccgccgagccgtccagctccagcgcgaccatggcgtcgccgcccaccgagcggcgaaacacccgcatggtggcaatgttgaggttggccgcggccagctcgccgctgatgctggcgatcatgccgggcgtatcatgatgggtgatgaccagcgtgttttcgtggccggagaagccggcctccagcccgtcgatggcgttgaccacgatttctccgccgcccacggacgaggcctgcacctggatgtgccgcccgtcgtcgccgtcaacgtccagaatgacggtgttggggtgtgcaccgcgcacatcggcattgtaaaacgagtattccagcttcgtctcggcggcaaggcgcaggctgtcgcgcaggcgtgaatcgtccacattcatgcccagcaggccgccgatgagggccttatcggtaccgtggcccaggtaggtcttttgaaaggagccatacaggccgatacgcgcgctcacggggcggctgcccaggagcatacgggtaatcttgccgatgcgcgccgcgcccgccgtgtgcgacgagctggggccgaccatcacgggaccgatgatgtcaaacagatccatagggcgttctcctttcgggctcggcagacgctagccgcttgatcagaatgcttgcgtgggagcgctttgcaccccacacaaggtccgtttcccctttgggccggtatccctgcgcctgccagaagccaagggcacagccgtcatagccgcccaccacgtcgatgcgcacggcttggcagccttccctgcgcatgcgttcttcgaacaggcggcagcatgccgtgcccaatccctggccctgatgggccttgtccagcatgagaagcgaaaggtaagccgttgggccgggacggtagtccatcacgcccgcaatccggccaccgtccgtctccagcacacagcacagaaagcccgcgttttccgcggctgcatggtcttgaagaagaaaggccgcgtccacagactttcgtcccagatgtgccgtgagaaaggcgggattgctgttatagatctccatgatgcgcgcggtatcctgctcgcatgcgggccgaaggatcagtccgctcatggcgtgtcctcctcccacggggcgaagcgctcctcctccttgagcgattcgacgcggccgtccgtcacgcgcgtcagctccgcaagcacgcgctcggtatcggcggccttcatgtccagctcaaagctcaccgcggcggcaaagtccgtgcccacgaggcgtgcgggcagggatttgagcgcatgctgcacccggtcccacaggggataggccacctcgaacagccagcgctcggtgggatgcatctggcacacgcgcgcggcgtccagcgccagcgcacacgtgtgcgaatacgcgcgcaccagcccgccggcacccagcaggataccgccgaagtagcgggtgactaccacggcgcagtccaccacaccccgcgccttcatgacctcgatgatgggcatgccggcggtgccggagggttcgccgtcgtcgctgtaacgcatgatacccgcgttacggccgatgatgtaggcgtagcagttgtgcgtggcgtcgcggtgctcctcgcggatacgcgcgaggaacctgagcgcctcctccgtgctgctcaccggcgccgcgtgcccgatgaagtggcttttgttgataaccacttcatcgcgggcctcgcgcagcacggttttatagcccttcaggctcatttgagaatcaggcggcaatagtttttcttgcccttgcgcagcatcaggccgtcggggccgatctgcgaagcgtcgatgcggtattccacatccgtcaccttctggtcggccaccagcaccgcgccctgctgcaccatcttgcgcgcgtcgccgcggcttgtgcacaggccgcaggaggccagcagggtggtcaggcggttgtcctcggccagcatggcggcatttacctcccaggtgggcacgtcctggctggcggcaccgcccgcaaacagcgccagcgccgcgtcggcagccttctgcgcctcggcttcaccgtgaatcatcttggtgacctcaaaggccagcacgcgcttggcctcgttgatctgctcgccgggcagcgcgcccagacggcgcacctcgtccatgggcaggaaggtaagcagccccaggaagcgctccacgtcctgatcgcccacgttgcgccagtactggtagaactcaaagggcgtggtgcgcgcgggatccagccacagggcgcccttttcggtcttgcccatcttcttgccgtcgtgcgtcatgatgagcttgcaggtgagggcaaaggcatcctcgtgctccttgcggcggatgaggtccgcgccggagagcatgttgctccactggtcgtccccgcccacttgcaggcggcagccgtagttcttgaacagctggagaaagtcatagctctgcatgagcatatagttgaattccaggaacgtaaggcccgtttccatgcggcgcttgtagcattcggcggtcagcatgcggttgacgctgaacagcgcgcccacctcgcgcaggaagtcaatgtagttgaggcccagcagccagtcgccgttgttgaccatgatggccttgccttcgctgaaatccaggaagcgggaaagctgcttctggatgccgcagacgttttcgccgatggtttcgcggctcatcatcttgcgcatatcgctcttgccgctgggatcgccgatcatggcggtgccgccgccgcacagggcgataggccggtgcccggcgcgctgcaaatgcgccatggccatgatggggatgtagtggcccacatgcaggctgtccgccgtggggtcaaagcccacgtagaaggtcatgggctcgcgctccagcgccttgtagaggtcctcctcaaaggtgacctgcgcgatgaagccgcgctccttgagcatgtccagtacgtgcataaatcatcgttcctttctttgtggggccccaatggagccgtcagcccagatgggcggcgaagagctcgcgcagcttgcccatcccctcgtgaatctgctggggggtggagttgctgaagttcaggcgcagcgtgttgtgatgcccgccgtcggggtagaaatgcgtgccgggcacataggccacgccgcgttcgacggcctcgccaaacagggccgtggcgtcaaagccttcgggcatctccacgaagatgaacagcccgccctccggcgcggtgtagcgcgtgccctcggggaaggaagaaagctcctcgagcatgagttccagcttttcgcggtagccggggatgatgctctggatgtgggagtccagcaggtcccggcgcaaaaactggtcgatgatggcctggttgaggttgggggtatgcaaatcggtgccctgcttgccgatggtgcatttgcgcagcagctgctcatgggcgagcaggtagcccacgcgcaggccggggctgaccagcttggaaaagctgcccagatagaccacgttgcccgtcgtatcgtagcttttgatgggcggcagcgcctggccctgatagcgcaggtcgcggtaggggtcgtcctcggccacgatgaagccgtacttggcggccagctccgcgatgggcttgcgacggccggcggccagcgtgcggccggaggggttctggaacgtggggatcacgtaaaacagcttgggatgatacctgcgcgccgcttcctccagcacatccagccgcacgccaccctcgtcgctttcgatggggatcagattggcctcgtagaggtgcatggtttgcatgttgccaaggaaggtggggctttccaccagcacggcgtcgccggggttcaccagcgccttgagcagcaggtccatgccgctggtgctgccggtggtgggaagcacgccgccgccctccatggagaagccgaagtgcgacttgagataggccgtaaggctctccaaaaagggcggatagccctcggttgcgccatactgcaagatgcgttttccgtcggccagcagcacgtcgcgcgcgagatcggcgcagagcctgtcgggcagggcatccagagacgggttgcccccggcgaagctgatcatgccgggccggcccagcaccttgaagatctcacggatggcgctgccggtcaccttgtcaaaccggcgggcgtaggtaacagaatccaccaaaatccctccttttgcattgccggactcctccggccgggaaaaagaaagccgcctgcctcccgcaagggaggaaggcgacggaaaatcgcggtaccacttccactttggcgcgcggacgcgccctctgcgggccttgcaggcccccgcgctgtaaacggcgcaccgtcggtccgctactgatgaaaaacaggttcacggccgggctcagggaggtattcacctggactgccgccgccttcttccacctgccgaaggctctcttgaggcgcacaggtccgggttacttggtcccgtcattgccgatggtggtattataggggaacggggcgggaaagtcaagcaagcccgtcactcgtccttgccgtcatcctccgcatccacgaagaagggcttgccgcagaattcgcacacggggctttcatcatagtcgatgtcggcagccttgaccaaaacggttttgccgcagtgcgggcagtcgaaggacagttcttcctcctcgtcgcaggaacagccgtcctcctcgtcgcagtcgcactcatcctcatcatcgccaaagagaacctcttccatatcgctcagatcggaatccagatcctccacgtactcttccagctcgcccacatcggcgtccagctcgctgaccttctgggccatttcgtccatcagtcccagcatctccagaagcagcttgtgctctttcttttccttgtccaggtccatgccctcggccagaccgcgcagatacgcggcacgatcagtcagattgctcatatacgctcctttttcgcctcagcagcgctccatatattcgcccgtgcgggtgtccacacgaatatgatcgcccgtgttgataaacagcggcacctgcagggtatagccggtttccagggtggcaggcttataggtattactggccgtatcacccttgaagccgggctcggtatcggtgatctccagttccacaaagttgggtgcggccacgctgaacgcgttgcccttgaagaacttcacggttacgttggtcccttccttgacgaaggggatggcctcctccacctgatcctgattgaggggcagctgctcgtaggtatccatatccatgaagtagtacaggccgccgtcgttataaacatactgcatttccttggtttccacgatggcgcggggcattttgtcggtggggttgaagctgcgctcgatcacagcgccggtcatgacgtttttgagcttcgtgcgcacaaaggccgcgcccttgccgggcttgacgtgctggaagtccacgatgttccacacgccgccgtcccattcgatggtaatgccctttttgaaatcgcctgccgtaatcatagtgatggttcctcctcgtttccgtatagatggtgatggaatggtcccggcttacaggatgatgagctcacggtcagggaacgtgagcacctcgcagccgccctcgcgtaccacgacggagttttcgatgcgcacgccacccacgccgggcaggtagatgcccggttccacggtcatgacctgaccggccttgagcacggcggtgctgacctggttaaagcgcgggtcctcgtgaatgtcgatgcccacggaatggcccagcccgtggccgaagcggccctcgtagccatggccgtagatgtaattgcgggcgatggcgtcgatatcgcggcacagtttgccggcagccacggcgtcctgcgccatcttctgggcgtccagcacgatgccgtagaccttcttcatctcatccgagggctggcccagggccacggttcgggtcatgtcggcgcagtagttgccgtagcgcgcaccaaaatccatggtaatcatgtccccgcggcgcaggcggtattcgccaggcaccgcatgcggcagcgatccgttggcacccgccgccacaatggtggaaaacgacggcttgctggccccatggctcatcatgtcaaaatccagcctgagggcaagttccttttcggtgacgccctccttgatatggggcaggatgcgctcaaaggcttcgcccgtgatgcggcaggcctgacggatgagggcgagctcgtcctcgtccttgatttcgcgcaggcgggcaatctcgctgcccacgaccttccactccacgccgcgcacactctcccgcagggcgttgaaggtgtgaacggtgacgaagtcatcctcatagtagagggtgtcaataccgccggaggcacacagggcgccggcaatatcctcgtgggatttgcccttttcggtcatcagcacctcaaagccgggggcctgcgcctgcgcctgctcggtgtatcggaaatccgtgatgatggcggaaatcccgcgcgcgaccagcaccagaccttcgcccgtgtagccggaaaggtagaacatattgctggggtcgtagaccaccacgccctcatgttcgccaagacgcatggaatcaagaagccgttttacacgttcagtcaatgtagatccctcacatacggtctttttggcacatagccattttttattttaccataaacaaaacaaccgcgctacagttttttgcattttgattgggaaaatgcttgtgttgtgaaactgcgatgccgattggagggcgacgaaaaaaagaggaaacctgaggaacccgctggcatcgttgcgttgcggaaccgatgcgaaaggagccaatgcctcatgaaacggggattcgggacatgaagcgccgtcagttcccgatggcgtatgcgaggaaaccgggaccgctgatagggtgcgctgtgcaggggtctccatcatttgggctttccagaaggccggaaaagacgggctgtcggacttttttggacaagcggaaagccggatgcccatggcacccggctcgtgttgccgcctcggaagaggcccagggaaggaggtcagccaagacccgcttcatgcccggctctcccgtttcgttcctccagaggaagacttacagatttttaaagaagtcaatggtcctcttatagtccctgggctcatgatgaaacagccctgaggagcccatcaccagcacgtttgcgccggcagccaccattttgggcgccgtttccgtttccacgtgcccatccaccatgatgtccacctttctgcctgcctggctgaaaagcgaacggacttttgcgatcttgtcaatggcggaaggaatcatctgctgaccggcaaagcctggatcgaccgtcattacgcaaaccaggtccacaaaatccgtcatataggcgagcggcgcaatgtccgtggcgggatttatggcgattcccgccttcttgcccagggaacggatcagtttcagcgttcgaatcggatgagtcagggtttccaggtgcggggtaataatggaagcaccggcatcggcaaaggcggatatgtagctgtccggattatccaccatgagatgcacgtccatggcagttgaagaaacttt

SEQ ID NO: 893 - DNA, 7074 bp, Unknown
  16S sequences of unknown bacteria
gtctgtataacaaatgtatatatacattattttgtgtatattaatccggataacgcccgccgatttccggtacaggaatattatagtcttttcatataaaaaaatcaatgcaaactttgtgacgcgggggtaaaaataatacggaaagacaaaaagaaaggaaaacgcaattatgaaaaaaacactgcacacactgacctcgcttgccgtcctcgccgcgctgaccctgaacgtctccgcgtcaaactggtatttcaagaaaaacgactctcacacccagccgccgataccgcccgagtattcctatattgaaaactacggcggatactatctcgaccgcgaccacggcgacgcctgctcagaaaaggtcatctacctcaccttcgacgccggatatgaaaacggcaacgtcgaaaagatactcgacatcctgaaaaagcacaacgcgaaaggctgcttcttcatcctcgaaaacttagtgaagcgcaacaccgacctcgtgaagcgaatgttcgacgaaggtcacaccgtagccaaccacacaatgaagcacaaaaatatgtcaaagctcggcaaagccgaactcgaaaatgagcttctcggtctcgaaaagctctgtctcgacctgaccggtcacaaaatggcgcgcctctaccgcccgcccgaaggcgctttctccgagcagaacctcaaagacgccgacgccctcggcttcagaacgatcttctggagcttcgcctacgccgactgggacaacaacaaacaacccgccccggacgccgcgctctcaaaactcctctgccacctccacaacggcgaaatcctccttctccacccgacaagctcaaccaacgtgaaaatcctcgacgacttcctgacgcgccttgaaaaggacggctggcgcttcggctcactcgaggagctgtgcggcgtatgaagacgcctctcatcccgctgctctcctgcgccgcgctcatcctgacgctcacgtcctccgcgccccgagccgacgccgggcagcaaatcacgcagtcatcagctcccacccgcccctgcgctgacgccgtctacagccacaaaaccgagaaaaaacgcgtagccctcaccttcgacgacggtccacactacagatacacctccgaaatcctcgacatcctcgacgaatacaacgccaaagccacattcttcatagtcggtgaactcgccgaacgctaccccgaactcatcctccgcgaactctccgaaggccacgaaatcggcaaccacacctggtcccaccccaaaatgaaaaaactcaccgccgacgccctcagaaacgaaatcctccgcaccgaagaactcctgaacgaaatcgccgactaccgccccaaactcttccgcccgcccgaaggcgccttctcccccctcgccgaaaaaacagccgaaaacatcgactacgaagtcatcctctggacagtagacacccgcgactgggcacacaccccagtcgacaaaatagtcgacaacgttatgaaaaacaccctccccggctcaatcatcctctgtcacgacttcattggaagagacagccccacgccagacgccatcagacaattcattccgaaactcattgatgaaggatatgagttcgtcacggtgtcggaactgcttatgagttaggaacgcaagagggggacttttttgaaaaaaagcccccctcctgcacctcccccaaaaaactttatacaaactatgcctaacaaacttgtgcataacgccaaaatgagagaaattccaaatatatggttgacaaacgttgtcctacgtggtatactatagacaacaagcgttgaccaacaatataaacggtcgaaaggatggtacatataatatggaaatctcattctctgacggcgaatggaaactcatgcggctcctctgggatcactcaccgctcaccatcgccgacatggtgaaatccctgcgcaacgacaccggctggtcaaaaaacacaatcttcgtgatgctcgaccgcctcgaacacaaaggcgctgtagccgaaaccgaaggcaaaaaccccaacggcagagccgtccgcctctaccgccccctcgtcgaaaaaacccccgccgccgcaaaagaaaccgaaagcttcctagaccgcgtctgggacggcagcctcgccatgctcgtctcctccctcgtcggcgaaaagaaactcagtgagaacgaaatcgaagagctccggaaaataatcgacgaagccgaaaaaggtgaaagaaaatgaacatcatcctctcttccctgacaatcctcgcggttcttatccttcgcgccgtcttccaaggaaaagtcagccggcgaacaatcagcgcgctgtggctcatagccgcagtaaggctctgcctgccgttcgtgtcgtttcaagttgctgtcccactcccggtcacactgaacaatatcgtaccggatgccgccgcgacggaagcaatattctccgaggacaacgaacagagcaccggtcaggacagcccattgtcgaacctcacaccgacggacaatcctgaaacagccggacacgaaaacaaattcgttttctccatgcgcgatatcgcggttttcatctatctctcaaccgcgtctctgatcgttttgtcctgctctatatccggaaccgtgttttatctgaggctcagaaagacaagaaaattccgccattccgtcggcggaataagcatatacgaaacaaatcgggtaacgtccccgtgcgttttcggcgcgaagagcgtatatctcccggtcggcggcggacagtcattcgctctgcggcatgagatcgggcatatacggcatcttgactttttctttaatatactccgcgtcatcctttgcgccgtatattggtgcaacccgctcgtctggctcgccgccgtcgtctcgaagagggattccgaagccgcggcggacgaatacgccgtgcgaggaatgagcgcggacagaaggcttgactacgcgaaaaagctcctcgccgccgcgagcggtcagaataaccgaagcatcttcgcccccggcgcgtccggcggcgccagagaacttaaagggaggattaaaatgctgacaaaggaaaacaagctcagaatatcgtctgtcataatctgcgcgttttgtgctatattaatcgccgcgttctcgttcgtttcctgctccggagacagagagaagcccatgcatgaggtgcgttttgacggtatcccggactatgtgtgcgacgtcgtggcggaacaggctcagaatgaattcgacaagggaaagaacgccggagaatactacgaatcaacaaaaccagaagccgtctggcacgcgctcgactggcgggtcgaggacctgcggcactcctatacatacgaggatttcgacggaatgaagctcgacatctatgtgtacaacgtaaagttcctgtcggataacccggaaaatatgctgctcgcgggcgggatgtacataaccgacgacggctggtactgccccgactacgataacagccgctatctcgtcttcgagggtgagaaattcatttgcgcgatattctcgaacgactcggaacccggcaccgacctgttcacatccggactcggaaaggagctatacgacctcggtctcacgacgaccaactactcggagcttgagtacagacagacgctcgaccgctacagcgccgacctccagcgctacatcgacgcgaaccgcgacctgaaagcacagatcgccgaaaatgaacaggatcgtgaggatctgcttgcttggatcgccgaactgcaaaagacacagcaagaactgatggagcagatcgccgcgatgcgtaaggacaaggaataaatttacaatacgttcaataattgtttacgataattttaccattccatcagcgaaacgtagtataatatttgagctttgccgttaccaaagcgcatgataataaacgaaagatatccccggaaagcggcttccggggtattttcgtccgctgtccgcgaaaaacggaatatgaatcggaaaggaatggtgatacaattgataaagctcgatcacataagaaaaaccttccgggtgtcaaagcgcgaccccggactgaaaaacgcccttcgcggctttgtgaaacggcagtacgacatgattgaggcgctcgccgacatatcgtttcaggtaagcgacggcgagatggtcggatacataggaccgaacggtgccggaaaatcctcgacaatcaaggtcatgtccggaatactcacgccggattccggcgaatgcgtgattgacggcagaattccatggaaacagcggcgggagcacgtcgcgaacctcggcgtggtcttcggacagcgctccggactctggtgggacgtgccggtcggcgactccttcgagcttctgcgggacatctactcggtcccggcggacgagtacagaaagaacctcgacaggctcacggaaatgctcgaccttcgcgacctgctgaagaccccgacaaggcagctgtccctcggccagcgtatgcgctgtgaaatcgccgcggcgctcatccactcgcctaagctgctgtttttagacgagccgacgatagggctcgacgcgggctcaaagctcgcggtccgctccttcgtgtccgagctcaaccgcgagcgcggcacgacggtcatcctgacgacccacgatatgcaggacgtcgaggctctcgcgaaaagaataatcctcatcggcaaaggcaggatacttctcgacggaagtctttccgacctgcggcaccgcttcgagggcaagcggcgcctgaccgccgagttttccggcgagcttgacttcggcgaaaatcagggaaataagttgtttgtcgtcccggacggcgcgtcgcttatcgatattcaggtgtcgtccggctcttcgcgcgcggtgttcgagctcgattcctgcccggtgtcagagctggtcgccgccctctcgaaaaaggtggagctcaccgacatgagcgtcgacggtacgtccatcgacgagatcgtcctcaatatgtacagggagtacggcatatgacggcgccggaaatcactcgttccgctgagagatcgaaaaacagcggaagcggaatcagaaaatacctctccttcttccgcatacgcttcaccgccggattccagtaccgcgcggcggcgctcgcgggaatcgcgacgcagttcttctgggggctgatggagatcaggatgttcatggcgttctaccgcaccgacccggcggcgttcccgatggggattgacgccgtcgcgtcctatgtctggctccagcaggcgactctcgcgatgttcatgatgtggatattcgacaacagcatatttgaggagataaagaacggaggcgtcgccgtctcgctctgccgaccgtgcgggatttacccgatgtggttcgctcagaatgtctcgatgcgcctctcaagggctataatgcgggcaatcccgatattcgtcgtgacggcgtttcttccagcgccgtaccatatctcgctgccggacagtccggttgttttcccgctgttcgcgctgtcgctcgtgctcggattcatcgttgtcatagcgttttcgatgctcgtctatatctcggcgttctacacgctcgacgtttcggggacgcggataatcgtcgctatggtcgcggaattctgctccggcgcggtcatacctcttccctttctcccggacggcgcgagacgggtgctcgacctgcttccgttcgcctcgatgcagtcgacgccgttcctcatctggggcggaagcatatccggaactgacacgctcatggcaatagcattgcagatattctgggctgttgtcctcattatcgccggaaatctgtggatgcgccaagcgctgaaaaaagtcgtgcttcagggaggttaatgcaatgaaaaaatattccgcgataaagctctacggcaaatttctctcgatacatctccgctcggcgatgcagtacaaggcttcattcataatgacctttctcgggcagttcctcgggtctttctcggcgtttctcgggatcagcttcatgttcatgcggttcgactcggtcgaggggtatacctataacgagacgcttctctgcttttcgacgatcctgatggcgttcgccatcgcagagtgcttcgcgcgcgggctcgacagatttccgtcgattatttcgaacggcgagttcgaccggatgctcgtccgtccgcgcggggaaatctttcaggtgctgacctcgaagatcgagttctcgcgcgtcggaaggctcctgcaggcgtccctcgtgctcgcgtacgcgattccgacctgcgggggggaattcacgccgacgaaggtgctgtgccttgttctgatgattctctgcggcgcggtgctgttctcgggcgtgttcgtcgtgttcgcgtttttctgcttcttcacgaccgaagggctcgagttcatgaacatcttcaccgacggtatgcgcgagtacggaaagtatccgctcgccgtctacgggcgggatatactgacgttctacacttatgtgattccgttcgcgctcgtgcagtattacccgtttctctatctcatcgggcgggtcgacagtccgctgtacctgcttcttccgccgctctcggcgctgtttctcgtgcctgcgctgatactctggcggataggtgtcagacattaccgctcaaccgggtcctgaatcagaagtccacctcaacggtgggcttttttacttttacattacaattatgtaaagtcggtttacaccgtccgagtgcagcgcgctattgacaaaacgccttttttatggtaaaatatttaatgaaaacaattacgtgatatcgtggaaaaattcggcatgaaagagatgtcggtcagatgtctgaaaggaaattacgaaatgcttaaaggtaacgctgtcataggacaatccggcggtccgaccgccgccatcaacgcaaccctcgcgggggtcatacgcggatgtctcgcatccgaggcgatcgaccgcgtatacggcgcgctcaacggcgtggaaggactcttcgacggtagg

SEQ ID NO: 894 - DNA, 7525 bp, Unknown
  16S sequences of unknown bacteria
cggctacaagacgattgtccccgccgacgccgtgtggaccttcctcgtgggcacctacgaaggcgcgctcgagtactacacgcgctgctacgacacgcgcgtcgtcgaatccaagaccatcctcgaggactacctcgcgtaacagacaccgccatcacgatataaggagagtgatttcatcatgagcacgaaagacaccgccgcaggggcacccgccggcgccatcaccgtgcaggcgctcgacgccgccgcaaagaagttcgcggccgaacgcgccaacgtcatcgccaaaaacgccgtcacgagcaaggggctatccgccgtcgcaaagagccccgaagccgccgccaagaacacgacggtgttcgacatcgaggtcaagcagggcgagcgcaccgaccagaagcgctcgggacgctgctggatgttcgcatcgctcaacacgatgcgtgcccgcgtgatcaagaagtacgacctcaagaacttcgagttctcgcaggcctacccgctgttctgggacaagctcgagaagtccaactggttcttcgagaacatcctgtccacgctcgacgagcccacggacggccgcatgattgcgtttctgctcttcgacccgatcggcgacggcgggcagtgggatatgttccgcgcccttgtcgagaagtacgggctcgtgcccaaagaggcgatgcccgagtgcgcgaactccgagaacaccaccagcatggacaagttcctgacgcgctacctgcgcgggtgcgcggccaagctgcgccatgcgcatgaggacggcgccacggacgaggcgctgcgcgccttgaaagacgagttcatgagcaacgtctacaactacctcgtcatctgcctcggcatgcccccgaaaagcttcgacgtgcgcctgcgcgacaaagacgacaagctcgtcttgtcgggaaccttcacgccgcaggcgtttcgcgaggaagtgctcgacatgaacctgcaagactacgtctcgctcatctccgcgcccacgaaggacaagccctacctgcacacctacaccgtcgacaagctcggtaacgtcgtcgaggcaggcggcgtgcgctatctcaacctgccgcccgaagagctcaagcgcgccgcgatcgcgcagctcaaggacggcctgcccgtctggttcggctgcgatgtcgaccagtcctacgtacaagacgacggcatcatggatcttgacgtgctcgacatcgacccgctggtgggtttcgatatcatcgacggcttcgacaaggccgaccgcctcgactatgccgagtccgtcatgacgcacgcgatggtgctcgagggcgtgaacctcgacgagaacggcgccccgacgctgtggaaggtcgagaacagctggggcaaggaccatgccaaagacggcttcgacagcttgaccgacgattggttcagcgagtacgtgtaccaggtcgtcgtcgacaagaagtacctgaccgacgagcagcgccgcgtgttcgagaccgagacgcccacggtacttgcgccgtgggacccgttcggcgcgctcgcatagcacttgatgcagctctcggcaccgcaaaagcaccttggcgcacgcggcttcctcgcgtgcgtcctcgtcatcggcacgctcctcatcttcgccatcgacctctacgtgcccgcgcttcccgtcatgcagcgcgagctgggggtctcggcgtcgtatctgaacctcacgatgttcgcgtttttcttcttcggcgcgttcggcgtgctgctcggcggcccgatttccgatcgtctcgggagaaaacggccctaccttgcctcgatcgcgctgttcgccgccgcgtcgtttggatgcatgctcgcaggcggggtgtgggagctcgtcgtatttcgctcgctccaggcgctcgccttcggcatggaagcggccattcgcacggcgcttgtgaaggacgcctacgagggagagagcctcaagctcgccatgacgctcgtgcagtcgctcatgatcgtcgggccggcgctcgccccgttcctcgggtcgtttctggtactggcgctcggctggcgcggtgtcttcggcttcctcgcggtcgcgggcgtggtgagcctgtgcctcgcgtgcctcatgagcgagacgctcgcatccgagcatcggctccaaggcggcgtgctcgaatcatttcggggaactttcgagcatacgcgcacactggtgtcgcagcgcggctttaccgcgctcgcgctcatcatgggcgttatcgccgtaccatattttgcctggatagcgacggtctcctacatcatggtcgacttcttccaggcggattacctcgtctacagcctcgtgtacgcggcgacctctgctgtgagcatcgtcgcgccctacgtctacatcgtgctctcgaagcgcatgggcgtgcgccagctcgtggtgctgtgcatcgcgttgggcgcggcgtcgacggcgctgctcgcagcttggggcgcctctgggccgctcgcctttgccatcgcgttcgtgcccttcgcgctcgccgagggcatcgtgcgtcctatggcctacgtcgtgctgctcgaccagcccccgcggctcgtcggcgcggcctcctcgttcacgaacttcctctacaacgtgattacggcgctcgccaccgtgctcgcgacgctgccctgggccagctacgtgaccgggcttgccgtgctcggggcatgctcggtcgcgctcatcgtcgtgctctacctgtggggcgttcgcggggcctcgctctcgttcaatccggaaagcgaccaggagcgggactagctcgcgcaggaggcagggctagatgacgtagtagtcggcgccgtctgccgcgagcgtcaggtccgcgacggtcttgctctcgaggtatccctcgatcagctcgtcgagctcgcgccacatgtcgagcatgcggtactgcgacatgcgggtgaggctcgaatggtcctcgtcgagcccctcgacgggggagaggctgccctcggcaaggcgcaagatccgcgcgacggtgatgtctgcgggcgggacgttgagcttgtagccgccgcccttgccgcgcatgcccacgacgatcttctccttgacgagcgtcttgatgatggcctcgaggtacttgctcgagatgtcctgccgcgaggcgatgtccttgagcggtatgtagccttccgacatatgctctgccaggtcgacgacggcgcgcagcgcatagcgccccttggtggaaatcagcatgctctcgatcctcgtgaattcataaacccgatatatctataggtttatgttaccacgtgaaatgccgacaaactgccagcgttcttctaataacccaccagtttgcttgactatgatttttagcagttgtttaattttgaacattacgagaaaggggcccacgagcaacgggcccgcgctcacgaggagaccatcatgtccaagatatacaaaagcgtagacgagctcatcggcaataccccgctcgtcgagttgacgcatctcgagaagctcgaagggctcgaggcgacggtcctcgccaaggtcgagttcttcaacccgggcggctctgtcaaagaccgcatcgcgaaggccatgctcgacgacgccgaggcaaagggcgtcatcacggagggcgcgacgatcatcgagccgacctccggcaacacgggcgtcggcctcgcgctcgaggctgccgcgcgtggctacaaggccatcatcgtcatgccggagagcatgtcgatcgagcgccgcaagcttgccatggcctacggcgcgaacatcgtgctgacgcctgcttctgccggcatgaagggcgccatcgcgaaggctgacgagcttgccaaggagattcccaacagcttcatccccggtcagttcacgaaccccgcaaatcctgcggcgcacgtcgcgacgaccggccccgaaatctggagcgacaccgacggcaaggtcgacatcttcatcgcgggcgccggcacgggcggcacgctgacgggcgttggtgcctacctcaagaagcagaaccccgacgtgcaagtcgtcgcgctcgaggcggacagctcaccggtgctttccaccggcaagggcggcccgcacaagatccagggcatttccgcgggcttcgtccccgaggttttggacacgaaggtctacgacgaggtgctgcgctgccccgacgatgcggcgttcgagtacggccgcaaggtcgcgcgctgcgagggcatcctcgtcggcatctcctccggtgcggcggtctggggcgccatccagctcgcgaaacgcccggagaataagggcaagaccatcgtcgcgctgctgccggacaccggcgagcgctacctctcgacggcactgttcggcgagtaggggccttggcagcgtaactgggacaagcgagtcttttcggggagagacatggcagcttcattcggcaagaacgaccttgacagcatcgacgccgcttcgcgcgatatctgcgccaggcgaaggatcgacgaggcggcggaagacctctgcggcaaggagcgcattgatgacgatgcggcggatatctgcggcaaggagcgcatcgagggcgacgtggccgatatctgctccaagcagtccatcgacgacgccgcggctgctgcctgcccgcgtgaccagatcgacgcggcaacgcatgacctgtgcggcaaggaggggctcggcaaagacatcgcgggcatctgcacccggccggtccctcccgtgatcggcatcgtgcccacgcagatgccccaagagcacctgttccgcgtcaacgactactacatcaactccatcgtgctgtcgggcggcgtgcccctcatcttgccgctcacctacgacaagcgcgtctacgagcgtctgctgcccatctgcgacggcttcgtgctcaccggcgggcaagacgtcgaccccgagcgctatggcatctcacccgacaaccccgcctacgagaacttgggcgaggtcacgcccatgcgcgatgtggtggagcgcctcatcctcgagttcgcgcgcaagttcgacgtgccgctgctcggcatctgccgcggcatgcagacgatgaacgtcgcgtccggcggcacgctctacatcgaccttccgaccgagttcgatggggtcgacaacctcacgaaaagtccgctcaaccactggcagacgctcgaggcgaccgaatccgcgcactacatcgacgtcgtgcgcggaacaaagctgcacgacatcatcggtgcggactctgcggcggccaactcgtttcaccaccagggcgtgaaggtggtcggccccgacttcaggccggcggcctatgcgacagacgggctcgtcgaggcgatcgagtgcgaggacatgagcttcatgattggcgtgcagtggcatcccgagttcttcttgggcgacaagcacatgggcaacctgttctcgagcctggtcaccgcggcggcgcaggcacgcgagagcgggcgtctcgatgcggcggacggctaccagattgacgacctcggcacagacgaggccgtcgagggcaagggccgcgtcttgctccacagcatgaagaagcgctacgcagtctaacttggcacgaggggccgtgggtatcgtgtcatttttctgatggcagcgcgcgggcgagggcggtgaaggcccgctcgagcgtggagcgcgggcaggcgatgttcacgcgcacgaagcccgaccctccttcgccgaacatcgtgcccatgtcgagccacaaaccggcctcgtcctcgatgagctgctgcagcccgtcgtcgttcaggccgagcgccgagcagtcgatccagagcaggtaggtgctctcgggctccaccagcttgagcatcggcagccgcgtgtccagaaactcccgcacaaacgcgaggttgccctcgaggtagcccttgagctcttccagccactccgccccgtgctcgtaggcggcctgcgccgcggcaagcccgaacgcgttggcctcgtcgagcccaccgctcttgtactcggctttgaagcgctttcgcagcgtttggttgggtatgaacacgttcgaggtctgaagccccgccaggttgaacgtcttggagggggcggtgcagacgatgcagcttctcgcggcgctctcgctgacgctcgcgtacaccacgtgctcgtgtccgggacgcgcaaaatcctcgtgtatctcgtcggatgcgacgatcacgccgtggcgcccgcagatttccgccacgcgctcgagctcgccgcgcgtccaggcgcgccccacggggttgtgcgggttgcacagtaagaagagcttgaccccgttatctgtgatcgtgcgctcgaagtcgtcgaaatccatgcggtagcggccgtcctcgtagacgagcggcgaggtgacgagcgtgcggccgttttgcgtgacgtcggagaagaacgggtagtagacgggcggctggacgagcacggcatctcccggcttggtgaaggcgcgcaccgccgtggcaagcgccgcgacgacgcccggggtccgcacaatccacttccagtccgtctcccagccgaagtggtcgaacatccacccctgcacggcggcaaagtaggagggggaggcaaactcgtatccgaagatgccgtttctcgctcgctcgaccagcgcgtcgatgacgggctgcgccgtggggaagtccatgtccgcgacccacagggggagaagcccttccttcttgcccaggaggggggccgcatcgtacttgatggagctcgtgttcttccggtcgtggagctggtcgaaatcgtagcgtgtcatgaggcctcctcggcgtgcggttgtccacaggaaagcatacaggtgcgaggcggccagatttggccgtctggtaaagaaatcttggagggctcgtggagcacgggcagtcttcgcagtttcaccatatgtgccccctaagcttactgtcatcgatgcaccgagtgaaacgcatcacgcaaacgcgccactcacacggcaaaacgacacgcagcaacagcactcgaatcgaagcaatgcttctgcgcaatcgagcagatcgatatcacggcgactcggctcaggtatcgacggtgccatcgaggcatgaaaaagcgcccctggaagggggcgcttttcgtttatctgcagcgtggatgtcctgcgcgcgaaaattcgcgtcagtcgcttaatcccgctggccttcctgctcgtcaagctcgtcgagcgcgtctgcaatctcgggcctgagcttccagatgtagtcgcccttgcgctcctcctcggcgttcttgccgaagaacacgaaggtccaccacgagccacggtagttggagcgtcccatctctcgggctgcggtgcgcgaatacccgcgcagcatgtcgccgtagtagtcgcggtcgtggccgcggtcgtcagccagctcgtcgagcgtcgcctcatcgcctgcggcgtggatgcgctcgagcacgcggcgtacctcctcgggggtgatctccgggtcgctcagcagcaccatcccctggtgg

SEQ ID NO: 895 - DNA, 2305 bp, Unknown
  16S sequences of unknown bacteria
ccgccgcgccgaccaagccgaagaagatgaagaagcggcgacgcatcgtgacctcgccgtcgccggagctcgagctttcggtgccgacgggcatgctctttgcccgcttgccgccaaacgacacgcgcgacttgttcttgcgtcccgacctggcgatgaggactatgaggacaatcgccgctatgaagagcaggacgattgccgctgcgctgagggctgcaaccatgggtagccagcgcctcccttacttgagcctggacttcatgcggggcatcttgttcctgttcatgccgccgccgagctgggcgggcatggacggagcgtcgtcggcgaggacgaggccgatggtcagaagtccgataatcgcgaacacggcggaatacagcgccgttggaatcgagtggaacacgaggacggctgccgcgccgcccgcgtcgatcgccgtgagcatgacgatgatgccgtagacgagctcgacgaacagcgaggccaccactgcgaacaccacgacggtggcgatagaggtggagttgagattggaagcgagcaggccggcgatcatcgccatgatcgtcatggaaagcgccatgccgccgatgacgttcgcgcccatgaggtcatagagcaggccgcagaaaaagcccgcgatgccgcccgcgccggcgccgctgcgcatcgcgacgagcatgacggggatgagcaggaagtcgggcgcgcagcccgccaccgagattgccggcgagatgcctgcctgaaacaggatgcacaccacgaaggtgatggtgtagacgagcggtttactcattggaccctcccgatgccgcggctccggccgtcgagctcgagctgccggcagagccgctcttgcccgaagagctcgtgtccgcggcagtgctggtgcccgtcgccgcgctgctcgagccgtcctgggaagaggcctgcgcagaggcagtcgtgtctgacgtcgacggggtgccggtgctctgggcgttcgagctcgagcttgagcccgtgcctgcgctcgccgtgtcggacgaggacgtgcgggagttcgcgatgatctggtcgagcagcgtctggtcgatgaccgtcgcggtgctgtcctcgttgccggtcagcacgagcacttcctcgcacgattgcaagttgaagatgggctcgaccgagatgcggtagtagagcttggacgagtcgacctcgacgttgcggaccgtcccgacaaggatgccatggggataggtgccgccctcgcccgaggagatgaccatgtcgccctcggcaaccgtcgagccgacgggcacgtactccatcgtcatggtgccgtcgtatgcgcccttgacgatgccgcgcgcacgcgagccctgcaccatggcagaaaccgagctatgcgcgtcgttgatgaggcgcacggttgcggtagtgctggtcacggactcgacctggccgtaaaggccgcacgagctcatgacgcccatgcccacggcgatgccgtcgttgctgcccttgttgatggtcgcggtgcgatcccacccggaggtggtatccacgactgtggcactgacggtggtgagcgcgtaggtgtcggcgagctgcgtgagagtgagcaggcgctggttttgctggcggtactcctcgagctcgctcacgagcgtgcgcagttgctcgttctctttttgcaactgctccttctcgtcgtcggtaccaatgctcgcgacgcccttgaacggcgtcgagagccccgagcacagatgctcgatgggcttggagaccgtctgcaccgcgttgcgggcagcggcaaacgccccaccaccgtctgcgcgcacgcacagcgtgatgaggacgattgacagaacgatcaagacgatcggaatccaccagagacccggtcgtctgctctggttctggttgctgaacgagagccctggcatgtatcagttacctctgttgcatgtatggctgcgagagaaaatcaggcgcctcgagcacggcggcgcacccctggacgacgttgatgagtgcggtgtcggagacgtggaccggcacgccgatctctgcgcgcaggcgctcgtccagaccgcgcagcattccgccgccgccggtgagggtgatgccgtattccatgaggtcggacgccaggtcgggaggcgtctcgtccatggtgtccttgactgcctggatcatcttgctgaccggctcctcgagcgcctcgcgcacgtcttcgctctcgatgcggacggtgcggggcaggccggagagcaggtcgcggccgcggacctcgacgtcgacttcctcgacgagcggggcc

SEQ ID NO: 896 - DNA, 2101 bp, Unknown
  16S sequences of unknown bacteria
ggcaaagcccgcttgcccgcccttcgggcgggcggcctgcggcccgatcctgcctccagcacaaactcgaaaaatcccgccaaaactaaattaaccccctccccctgcgcggggggagaaactgttatgttaattgtcaaccaaataaatattttagttgacaattagctctcgccgtgctatccttaccttgttataaaaatcattcccccggaggtcgccgatgtctaccaaaacccagtcccgtaccgcttcccgcttttccgccaaaacactgaccatgtgcgccatttttaccgcgttggtcgccgtttgcagccaaatcaccattccgctgccgcttatccccattaacctggcgcttttcgccgtctacctggccggcgcgctattgggcccgtggcgcggcgcgctcagcctgctggtctacctgctgctggctgcggtgggggttccggtcatggcgggattccgcgggggcctgggcaatctcgtcggcaataccggcggttatgtggtcggctatatcttcgccgctttcttcaccggcctgctggtggaaaaatggggcgcgcgtttttggcagatgtgcgtagcgatggtgctgggctgcgcggtgtgctatttcttcggtaccctgtggtattccatcctttccggcacgccgtttttcgccagcttttccgcctgcgtggtgccgttcctgccctgcgatgtggtaaagattctgctggcagcgctgctggccagccgtttgcgccccatcctgaaacggcagggattgctgtaacatcctaatttcttcaggaacctcgctgggggccgcaggccacccgccctccgggcgggcaagcgggctttgcccgcttcggcggcttcgccgccgggcctgcggcccccgcttaccccctgcacaaaccataccgcgccgcccccttgggggcggcgcccttttctttccccgcaggttttgctataatagtcccatccaccaaagataaggagacccgcccatggaacttttaactctctaccacgccgttgcggaacagctggaccggctggattttgccgcgttgtaccccggctatcaccgctacccctttgccctgtacgatgaggaacaggtctgcctggagggacagcttttcccgtgggatgaccgcttcctcggcaatacctccatcgaatacgaggggcggcgcatcgctatttggagtgtggcgctcgatccccagccgcctgtggcccttgccgccaatatggcgcatgagatgttccattgcttccagtttgatgagggggagcgccgcttccccgatgacctgcgccttttgaacgcgccggtggagccggatttttaccggctgaagctggcggaaaaccgtgcgttggcagctgcctgccgcaccggcgaaaaggaggagctcctgcggtttgccgcactgcgcaatgagcgtgcccggcgtttcccccatgttaccgcggaggagtggaaaaccgaaacgatagagggcacggcggaaaccgtgtgcctgcgcgccctgcgagtactggatcccaccaggtacactgaaacgcgggagcgctacctcgccaagttggaaaatgagcttccgcttctctttgatgcccggcggctctgctactacaccggcacggtgctatgcctagcgctggagcagctggggctgccgcttcgcaatgaatttaccggcgccaccctgtacgaacagaactgccccactgagacactgtgcgccgatgcaccggaggaggcggcactgactgcccttttcaccgaacatatccaaaagcagcaagcgctcatcgaagcgcaccggcaggcacacgcttttattccctgcgaagctgccatctgcggctacgaccccatgaatatgttccgggtgggacagcagctctattgcagccacttcctgttcatccatcagggggaaaccacccgccggctggatggcccggtgctggcgcagctcgcccccggaagcgaccatcatatcaccggttactgctgagggccttattggtgcaggaactaggtgggggccgcaggcccggcggcttcgccgccgggcct

SEQ ID NO: 897 - DNA, 3198 bp, Unknown
  16S sequences of unknown bacteria
ccccgctgccatcaaagacatcgcggacgtgcatgtcggcgataccatcacctctgcccttcgccctgcggcagagccgcttcccggataccgccgcatgaacccgatggtctattgcggactgtacccggtcgataatgccaaatacaatgatctgcgcgaagcgctggaaaagctcaagctcaacgacgctgcgctgcagtatgagccggagacctctcaggcgctggggttcgggttccgatgcggatttctgggcatgctgcacatggatgtggtccaggaacgcatcgagcgggaatacaacatcaacctgatcgcgacttcccccagcgtcgtctaccatgtctatctgaccgatgggacgatggtctgcgtagacaacccggcgctgctgcccgctccgcagaagaccgatcatatcgaggagccatacgttcgtgccagcatcatggtcccgaaggactatgtcggcgcggtcatggagctgtgtcagaaaaaacgcgggatatacagcgatatggaagtcatcgatgacgcgcgcatgaacgtcatctatgagatcccgctgggcgagatcgtgtttgatttcttcgaccggctcaagtcgtgcacgaaggggtacgcctctttggattatgagctttctgactatcggcagagcaacctggtcaagatggacatcctgctcaacggagaagtggtcgatgccctcagcatcatcgtgcaccgcgactttgcttatcatcgcggcaatcagatgacgcagaagctgaaggagctgatcccgaagcatcagtttgagatcccggtgcaggcggccatcggcggaaaggtcatcgcgcgcaccaacatcaagtcgctgcgcaagaacgtcctggccaaatgttacggtggagacatctcgagaaagaagaagctgctggagaagcagaaagaaggcaagaagcgcatgaaggccgtaggcagcgtggagatcccgcaggaggcattcatggccgtattgtcgatggatgatgaatgagcaggcctggtgtctgcttttttctatgtttgccggatttcttccgctcggcggcgatctgtgctatgctgatgcgggtgatgtcatggaaaagagcgaacggctgctggaggaggaatacagcacgtatgaagcgctcagggaaagaaatggcgcgctggccgcggatctgctgtgggaagagctgcaggcgggcaggcggcgcgtgcgtgtggagtgtggtctgctcctgcccgatgatcatctggccatgaccgcttatgtgctccgccgccggctcagcgtcagcgccctgcttcagcagtgcatctatcattactgcctgcccggcgctgccatctcgcttccggcgcgaatcgcgtttcagctggaggaatacgggatcaggacatacagcgtcctgcttcgtcatgagctgcgctcctcctccccggatctgatcctcatcctcttcgctctgcagtatcttccaacgccctatcgggaaaagatgacgaacctgtgggcagcgtgcctgctgggcaagtctgcgctgaaggacaagctggccgatcagctgataccgtgtgcgcaggggctggaaagactggatcgtaccagagattttctcgcctttcttgatctgctggagttgaattttaacaaatgtctgttattattaaatcgtgacagctgtgaatggctgcggctatgcgaagaagagctgctgcacaggtttccgcaattttcccggcagcagatctcttttttcgctgcgcaccgcgatctggggtgctattattccattcaggagtatgcccgccatgcgcaggtatgttatgagacggcaaggcaggcgatggagcaattcaccgcctgccgctggtattatcgcaggaaagtcggcaagcgcttcctgtattcggtaagcagtcaggccggggaggtcgatctgtgacgccattgggtccgcgggctgtgttcaatgtgtttgcttgtacggacgatgttgagctgctgtcccggatgatgcggatgcagcaaaaataccgggacttctgcgtgcggggcttcagctcgaatgcggtgcttgacggcgcgttcctcaaacagcaagacatcctggtcatctatcttcagttttccctggtcgaagatcgctggtattcctggttcgagacgtttgccacgctgcagagcagacttgcagtgcggctgatcgtctctttttctcagattcgcagtgaatatatgcatctgctgaagtaccgcatcgactcctttttgcaggagccctttgagatgggcgtgctgcatgagcatctgctgaagcagtgtcaggaagcgaaggaatcggcctgctggcaaagcgaggtgcagaacaagatcatcacgctgctgatgcagatgatgatccccagccatctcagcggatttcaatatctgcgcatcgcctgcgaggcggcgatggaaacgccgaccaaccggcagatcgtcatgaagcatctgtattcgctgaccgccagacgctgccatacgacggcggagcgggtggagaaatgcatccgcacagcgatccattcggcgcatatcccgccgtttttcttagaggtctttcatgatgaccccacgaaccgcaaagtcgtcatgtatgtctacacttgtctcaagggcgtcgcctgaaaggatgatgatcatgatttccagcgcctatgtccacgttccgttttgcgcatcgatctgcgcttactgcgatttcacccgctggcgctatcgcccgcagctgtgcgcgcgctggctctgccgtctgagggaagaagcttccgctaagctgaaggagccgctgaagacgctgtatatcggcggagggaccccttcggccctggaccgtgatcagctcgaacagctgctggagatctttgatccttaccgcgcgcagctcgaggaatacaccatggaagccaatccggaatcgctcagcgcagaaaagatcgccatcatccgccggcatggcgtgaaccgcatctctctgggcgtgcagagctttgatcccgcgctgctgcagcggatgaagcgcggacatgacgccgcgatggtcagcagatgcgtgcgtgatctgatcgaagcggggatcatcaacatctcggccgatctcatctatggcctgcccgatcaggatatggagaagtggaagg

SEQ ID NO: 898 - DNA, 25894 bp, Unknown
  16S sequences of unknown bacteria
gcggaatcccctcgggaacttggtgcaaaggaaacggaagaacaagggctagcggcatttcgtgcaccaagtccgcgccgggcgccggcggaatcccctcgggaacttggtgcaaaggaaacggaagaacaagggctagcggtatttcgtgcaccaagtccgcatcgggcgccggcggaatttcctcggaaacttggtgcaaaggaaacggaagaacaagggctagcggcatttcgtgcaccaagtccgcgccgggcgtccgctgccggcggcggagaaaaaatctacatttttttatttttagactatcctttttgtattccactcgttaaaccttatagaaccggttcgtaatcaatgtgaaaacaaggaggaagatatgtttaagaaaattattacggtaacgatggtaagtgggttaatgctgatggcttcggtgggggtatttgcggatgcgccgccgcaggatgcgtcatcgtcggatgtaccgccacaggatatgctgtacgatccggaactcggatatgaagtggatttggataacccggcaagcgacacgttggggtgcacatatgtagaaggactcggttacgaagtgaccattgacagtgagaatcttgcaagagaggggtcctatgacagcggttggaaggatttttatggcggaaagtggagacacggtgtgaactcaaaacacgtgtggtccaaatacaatcactctaagaagacacataaaacgaccgtaaaaggagcgggtggtaagtattcctactccggatgggtcggaaaaggaaagcaggcagctgcatcttgggagaaagcgaaaaccggaaacaaagcatgggcagatgtgaagtaacaatccgttgaacaataaaggatttgggctcggcattttttgcggagccctaagttaaatggtagcgacacatgaaaaagataatacagacaatgctggtgattctcatcgtaaccgttgcttttggggtttcatacaaccaagatgatatgtttctgaagacctttacgaatgagtttgataccacaatcaacattatttcatcaccggcacggacgcaaaacaatagaacaaagctgcaagaactggctcaaaggtataacatgagttttattaaggttcggcgtattccacgaaatcagcggaatgaaaggcagcagatttcgatattcgtctatttaaacgaagcggcatggtttgaaaaggcatttccgaatatttcttttcaaagaaataatcacgggacgaacgaattcaagaatgcgaagggggcgacattcctcacttcgaaggaagtaagcctattgccgttttcgaaaatcaacagcaataactttaacggcgattactattttcgcgggacgaaagaagatacggaagcgttcctgaaagaactgaccggtaacgagagcttgggcattcaggcgaccgtagattcttcggaaactgtagccagcgatacaactgaaaaccaactgtttttatatctaaccattctggcaattatggtcgccgcaattctcttctgctatgcgatatacaatgggcagttgacgaaagagctcgccgttgccgggctgatcggctggaagagcacccatttcgcagcaaccaaagccgcaagattggtgattccaccgctgctgattgcggttccgatcatcagcggagcgctgatgtatgtcatgcaactgcaaacggttcgcggcttcctttcggcgacgaagagcgtatacctggcggtcggggcggcaaccgcatttttcttgatattggaatttgcaattatcgtatggaagttcaaacggtacggcataacgccggcgttaaaaggcaagcggccgaatcgagagaaaacggcaatcggaatgaagattgtaatctgtgcgggaactctgctgctgggggcggtgacgattgtcggttttcaggatttcaaggatgtggagcggcatatgccgaaatggcgtaagtctgcgaattacgtcaatatttcctgtgggtggccgtggacgtatgtggaggatgacgacaagtttaatgaagttgttgtcccaaaattaaatcggctgtgggacgaactggaccgggagggcgccattttgttcttcgcgccgaatgcggaaaaagaaggtgtaccgggcgaatccgatgcggccgaaccctttggcggaaggtacgcgtacgtgaataaaaactatatcgatttcgcctcgccggcggcaccggatgataagaaactaaacattccaacccttcgcgacgatgaatggctgattctgtacccggagaaaagcaaaccgacagaagacgatatcgaaaagataaaagaaacacagcgagatgaatcgaacaagaaaaaagcctcagccgtaaaactcgtgccaataaaagatggccagagttttatgacctgtgattcctccatgcgtttggaagaggcacgacttcaagattacacgttcatcctggtggacggaggcagtctgaaaccgaccggaagcataaagcttccgtccctggtaaacggatacttccatccccatgtaaagaattctgccaatgcatacggcgagctgaaacgcataattgctcaaacgcaggccgatccatatgttttatggatcagcagcgtgtacgatgatgtgatgtttcagattgaagaaatacggacagaggcggccgtaaacgcgattgcttttatgctgctgctgctgattatcgcattcgtcgtaaaaatcgatgtggagtcgtatttataccaccacgggagaaggctggatgtatcatatctgctgggatacgggttcatgagcgttcacaggaagagacttcttacaagcgggattacatacgggattagttatgtgatgtttatcggtatgctgaaagcatatccgattgtgaactttctgagcctgtatatgccgagagcgggctggacgatgggaaaaaccgaaatcgctgcgatggcaggacttgcggtagtaagcatttgctttatcggtgaaatcataaagctgggacgcagcaagaataatatcggggagagactgaaggagggttgctaaatgcatgaaaattcagcgcaaatcatattaaaggacatcgagaaagcttatggcagcagaaaaattctggacggaatcagtatggagatttatccgggggagtttatctgcatttacggaaaaagcggtggcggaaaatccacgctgctgaacattatggggacgttggaaacgtatgactccggtacgctgcgttgtttttccgtcaacgacccggtgaaaaatcgaaggaaaagcgagagattgcgaagatataaaatcgcgtatctgtttcagaactttgcgttggtggaaaaaatgaccgtgaaggaaaatctgcagttggcattgcggtatgcccgcgtgaagaacaaaacacgggcaatggaagaagcgctgacacaccttggcgtagccgataaaatgaattccaagatattcgagctatccggcggagaacaacagcgagttgcgctggcacgaaacctgataaaaccattcgatatcttgttggcggatgaacctaccggatcgctggaccgagagaataaggaaatcgtaatgagaaatcttttggaactaaatcggaaagggaaaaccgtggtggtggtgagtcatgacgatgattttagaaaaatcgccaaaaagaattacaccatcgaagacggacggatgtatcggatttaaaatagacaaaaatcaatttatcggttgccggctgcatttgctattgttattctatggagagagaatatcggaggaagcacttatgaattcagatttttttctggttcgacgggcaaagaagggggatcctcaagcggtagatatcctggtccgaaaatattacgatacgatattgaattactgtatctatcatttaaaggatcggcatacggcggaagatttggcacaggaaacgttcctgacgttttttaaaacacttccgaattacaagcatgagggaaaactcctgaattacctgtatactttggccagaaacaaatgcaatgacgaaaaaaagcgaaaacgcaatacagaggttgcgttggatgcagtgatggataccgcggaagcagaaacaagctgcggtttggaagcaaaagaagatgcgaatgcaatagcagaagcggtggaacggctgccggaagaaatcaaagatgttattttgttatactattttgaagaaaaaaaggtcaaggagattgcgcagatctgcgggatttccttgccgaattgcaagtaccggttgcggcgcggccgagagctgattcgagggtttttggaagaatccggatggaggggttaaaaatgggaaatgaaatagatcgaatgatgaaaatcgcggcatcggaatataagaaaaaggcagagatcgatcaatgcggcactgcagcaatggaagaaaccatccgcttggcgcagcatatcgtggcaaagcagcagacttccgagcgagtgaactatccggacttcctgctcctgcagatgcgactgatcaaaaaacagtggtgggtattgcaaggagcggtgctgtttcttgcttggaccgctttgaacagtatcggcacgtcgtggtatgcccagcggggcatgagcattatgggggccttgtttgtgatactggcgataccggaattatggaaaaaccgggagacgaagtcgatggaaattgaagaagcctcctattacacgctgcggcacgtttacggggcgaagattctgtccttcggttttgtcgatattgtactgttatccctgttcgggattgccgcggtacatgcacagcagtgcctcattacagacattttgaagcagctcatattcccggttatgatctctacaatactgtgcctgggttcgctgtcatttcataaaaaaatcagcgaactccttgcggcgacgctatgtctgggtgcgaatgccggctggatggcggtgacgatgaacgatgccgtgtataatcggattactccggcaatatgggcaggaatgtttgcccttggattcgcaataattcttttactcaattacaggttgctgcatgaacggcgaaccggctgggaggtattataatgactgaactcatagtggataatgtagtaaaagaatatgacggggttgctgcggcagaccacatctccctaaaaatgcaaaagggactgtatgggctgctcggcacgaacggtgcgggaaaaaccacccttatgagaatgatttgcaccgtgactgcgccaacgtccggggcaatttactttcagggggagaatatcctggaaatgggtgcgaggtatcgggacaaaatcggctatctgccgcaggaattcggctattatccggatttcagcgtaagaaactacttgcggtacatatccgcattaaagggccttccgaagcgggtctccgaacagaaaattgcggaactgctaaagtcggttggcctgacagaatgcgcttcaaaaaaaatgaagaatctttccggcggaatgaagcggcgtgtgggaatcgctcaggccatgcttaacgatccggaaatcctgatattggacgaaccgaccatcggtttggatccgatggaacggattcattttcggaacctgatttccggtttggcagaagacaaaatcgtcctgctttcctcccatatcgtttccgatctggaaacgattgccggtgaagtgtttataatgaaagacgggaagattgtgaaccgggggacggtgaatgaaatttgcagtcaaataccgataaaggtctggatgtgcagagcagaaaattcggatgcggaaggaatcattgcagcgcagggaggatgtgttgtaaacgttcgaaaagaaggcagtgtatcggaaattcgagtgatatcggagaacaagccccatgaaagcgccgttttgacggacgtgtcattggaagatgcgtttttttatcagtttggcatgcaggaggatcgacggtgctgggatacgaattaaaaaaagtaatattgaagcccctgcatatcaaaataatcatcgccgcgctgattgcaggaatccttctctccggtctcgccgtttggagcgtttattatgtggaccaaacagggacgagccatcggggtcttacggcgcccggagcgcttacgaaagataaaagccgatggaacggaccactgacggattctgtactgcttgaagttgttaaaaagcagcaaaatatagaggccaaaaataaaagcaacggacccaatccggtgtacggaaggatcggccagtcctatcgagacatcgaggagtttatcaaccaaacgctgtgttacggaaccgactataatccggatgcgatgaatcaggtttctctcgaaaccgccggaaggctgaacgaattgcgaaaagagaacatcgattctttgattaatgaatacggaactaccgcagcaaaaaaagaatatttgaagagacagtttgcgaaggtgcagacgccgctggagtatgaaccctccgatgccttccgaataacgggaccgtttgcggccgcatatggcttgctgctggttttggtgatatcgtttttaacggtgggcgttttttcggacgagatgaacagcgagtcccgcttcgtctactactcaacgaagtacggaccaacaaggggcgccgccacaaagattcttgcggtatttatcattgcaacgatgctctactggagcggcatgctgttgatgtccctgatctcctttggcggaatgggcaccggcggcgcttttgcgcccattcagattgaatctccttacagcatgtacgggctaaattttatggaacggtatctgttgatactgctttcgggctatgtggcatgcttgttttcggcgggaatgaccctgcttctctttgtgaaaacgaaatccgcaattgccgcaatgagcatttcgttccttctgtttgcgggtctcccgctgttggccggaaatgatgcgttcgagagttttcgaatgctgacgccggatcggttgtttcatgttcaggataatatgaacattccgtgcgtatatcagttcggaacgattgtgtgcagccgggtgacgctgctcatagcgctttacagctttttgctgattccgactgtcgtcctttcatatcgaggatttcgcaagggaacgatgtgaacggaataaaagggcctgcagcatatcccattgctgcaggctctttcggtaatgtcatgtgctgttacttttatctaagatcgaaacaggaaacaggtaaggtaaaggagaagaaaaaaagacctgtctcaatcgaaaagcacgagtaatttgtgaattacaattagtattatgaaacattccattggataagtcaacaaaaaatcctaaatatacccattataatttttaaataattgtgtttaacaactaaaaattataatatgggcgggcataaactgtgtaaaccaaattatttaaaggtgttccagtcggcgacagattaccgccgcacccaggccgatgacgatgcccgcaatcattccggagaatagaagcaccggaaagtacaggaaaattttgctgtcctgaagcagaagggcggccaccaggagctgccccatgttgtgcagcacgcctccggccatgctgactccggcgatgctaaattggtcggtcttcttcagggcaaccattccaagaaggctaatggcagcaccgcccagagaatagagggcgccgaagacaccgttgaaaagaaggccggcgatgagaattcgaatgacgtttaccgctgcggcatgttttgcggaaagttgatacagcgctaccagcgcgacgatgttggcaattccaagtttaatgcccgggacacccggattatatggtataatagcttccacgtaggaaaatatcagcgccagtgcggccagcagagcgatggtggctacgttgccggttcgggaatcggcggtgcggcgagacgttgttccttttgatttagctggaaatggcatcgtattcatcgcctccttttccctgaatctgaaccaccattttgttcggcaggcagatgatgctctccccggtggtatgaatggccttatgcttgacgcatacctggttgtgacagcttgcgtgggtaacggaaacctccccgccgtgaattcgaaccgtgttggttttcttcccctgcttcaccgtaacggtgcggtcctcggaaatggaatagctgccgtataccttgccgtctgtttttatgatgacccggcttccggacgtattgaattgcgaaatccatagagatgccgccacccccatcaggatgagcactccggccagaaggatatccgctttgcgtatgattcctttgaacatagaactccttcgtaattattgtttatataaaggcaacagaaaggataacccgtgacccattatatcgtaaaaaaaatgaaaggcgtggcgcttctggccacacttctgattattataacacagaccggatgcaatagtaactcggatattgaaccggtcacccaggacaattattttctggataccacctgcagcgtttccgtctatcagattgacggcggcctggacgaagacaaggccaacgcggccattacgaaagcatacgaccgctgccgcgagctggacaagctgctgagcaacaagaccaactccagcgacgtgaccaaggtgaaccgttccggcggtgcctgggtgacggtgggaaaggatgcggcaaccgtcataaaagaaggtctccgttacggcaagctgtccggcggtgctttcgacatcaccatcggacgggtgacggacctctgggatttccatgcggacaagccgaagctgccggatgaagccaagctgcaggaggcgctccgacacgtggactatcgaaacgtggaggtggacggaaatcgaatccgcctgctggacccggaagcaaaaatcgatctgggcggcatcgctaagggatacgtgggagatgagatgcgcaaggtgctgaagaaagaaggcgtgacctccgcggtcatcaacctgggcggcaatatcgttaccgtcggcacgaaaccggacggctcgaagtacaccatcggcattgagaagccgttctccgaccgccaggaaatcatcggccgcacccacatcggcgagggaacggtggtcacctccggcatctacgagcgccagttcaaatacaagggaaagcgctatcaccacatcctcagcccgaagaccggatacccggtggatacggatctggaggcggtgagtctggttaccgcgaagaattcctccatggacaccgacgccatgagcaccatctgcctcatgaaaggtaccaaagcggccaagaaattcatcgacagccagaagggcatcgaagccgcattctatggaaaagataacaacacgtccaccaccgagggaatggatttcgaggcagaataataaataaagaatcaaaaaagcgggatagttgatggcaactgtcccgctttcatttgtgaagaaccgattattttctgtgatagctgaaggatgcggcgaatccggtacggcccagcatctgagaaatcagaacggacagaacggcacccactgcaacctgaagcgcgttgaacggaacgcctagcatcggagcggtccagtttccgtagatgatgccttcggcgatgtagtatccggcaacggtccacacggcggcaacaacaaatccgatcatttccggaaccggaacacccaggatgtggcggttgttctcgcctttttccatagcggtggccagcgccttctgcatgattaccaccatcaccagcttgataaagaaagaccacggtgcccataccgcatatccgctgaggacatccgccaggcagaggcccaccgaaccggcgaagatggcatgttttctcggcagaagcatggcagccagcagcaccatggtgtcacccagatggatgtaaccggtgcccaccggaaccttgaagaacatggtggcgatggtgcccatggcggtaatcagtgctgtcagcaccagcaaggatgtggagttcattcgttcgtttgtattcataagtaatcccccttgtgatattttattgatttactaaaataatagatatataataacattgttgtgtaatttgaaaaatatgcaatttagcattttttaatatgaacagataggagataagaggggaaatgaaggatattgtactgaacttagatgacagtttggagatcaatctatatgtacagatttataatcagtttaaagaacggattctttccggcgagatttcaccgggcaccaagattccgtcgctgcgtcgttttgcaaaggataatgccatcagcgtgactacggtggagaccgcatacaaccagcttctggtggaaggctacatcgagagccgtccgaaatccggctattacgtgagcgaccatatcgccgaggtggtgagcgatctgaaaacggagttcaaagaggagtctttggaaagcatccttcccatggacgattccaagaacgtgcgggaaaaatccctgatttacgacgaagagagcttcgaattctccaaatggaagaagtgcatgaacaaggtgttcaacgagcattccaacatgctccagactcagggcgatgtacagggagaacaggctcttcggtacgaaatcgccaaatacctatacgcgcgccggggcgtgaagtgcagttccagccagattgtcatcggcgccggctctcagcagctggcggttcagctaatccggattctgcgggaattaaacgtggcccacgccgcaacggagatgccgggatacggtcccgttcgggaaattttccgagatgagggactgaacatttcccggattccaatcgatgaagaaggaatcatggtggagaagctgcccaccaatatgaagagcttggtatacgtgaatccgtccaaccagttccccacgggcgtggtaatgccggttgcccgccgttacgagctgatcaagtgggcggtggacaacgacagctacattctggaggacgactacgacagcgagctccgctatttcggaaagccggttccggccctgaagggcttggatcagagcggaagggtcatctacctgggctccttctcctccacactttttgcggcgattaaaatcagctacatggtgctgccgaaagagctggcggagatcttcgaaaagattaaagatcggtacagccagacctgctccaaagcggaacagctgtgcctggccatctacatggaggagggatattactcccggaacatcaaacggtgccgccgcatgaatgcgggcaagctggaaaccaccatgaagatgttcgcccaggccaaggcggatttcatcgagcccatcgattccaaatccggtctggccatcatgcttcggattcacgcggacatcccggtggaagaagtgtgccagacggcccacaagctgggtctcaccatgcggccggttcaggatctgtgcacagaaaaagagcaggtggtggtcttctacttctaccgcgtatccgacgctctgctccgtcttctgatcaaaatgttcgtaaataatatgagcaaagtcctggcggtatacgaacgccggaaattgcagtccctataatttcagggaaacttccccaccggaaaggaggcggtgctcctccggggtcttcacctgcaggcgaaactccgaatccaccccttccacataggcggtgtacggttcctttccggtttcggaaaccgtaacatttcgtccgatgataaaacaattcttccgatactcctccagataccgggaagtatccagatgggattgttcgttcagcgcccggtggagttcggcaatcaatgcggcggagatttggttccgggtaaaagaaggatgatcggattccgtaagggatccggctttccctgccagttccggtgggaaactgcccttcaggcagttgatgccgatgcccacgatgacccgttcgaagttgccgctttccaagctgcccagtccctctgtcaggatgccgcagattttcagatttcctttatagatatcgttaacccatttgatgcccagcttttccccgctgattttttccagcacccggtgggtgagcaccgccgcgatggaggtgacatgggtgacctgggaaagaggaaaataaggccggaaggaataggtgaggtagatgccggtacccttcggggattcaaaagtccggccgtagcgccctcggccgccggtctgccggtccgccaggacggcggtggcggggtctccgtaatccagggtgcggcagtaattgttggtggaatccacggagtccagcacctgcaagagaagttggttctccggaattccggatgcggaaaggtcttcccgaatgagttcttcggaaagaatatcggtggatgaggacaggatatatcccttgctctgaatgctctgaatatcgtatccttcctcctgaagggtgtggatggccttccatacggcatttcgagaaattccgagagcggaagccaacgcggcaccggaaaccggaaccccctgggtccgggcgtctgcgagatatgcgagaatttttttacgggttgaaattgacgaattcatgattgattcctccttgatgtgttcttattatacccaccggcggggggcatggcaaacggcggaatgaaattgcgaattgtggattttttatagcgtggtatcggagagaactccgtgctagaatatgtagatgtatagatggaggaaaagtatgtataacgtactggtgacaaatgatgacggaattgatgcagcgggaattcggcagctggttttcaccctgtccctgacgacgcaggtgtacgtctttgcgccgaacgagcagcagagtgcgaagagccaggccatgtccgctcagggacagctgagcgtagaatctcgctcgattcgaggggccgaggaggcgtacgcggtgggcggaacaccggtggactgcgtgaagctcggattgcagacgatggcggaaaaaggcgtgtccatcgattatgtaatcagcggaatcaatatgggactgaacctgggtgcggatatccattattccggcaccgtgggcgccgcgatggaaggggcgatttccggcgttcggggcatcgccctgtcggtggagcactatcagccggattactatgagtacatctgcggaatgattccggaacttttgcagatgtccggggaactggattcctctgtggtattgaacgtaaatgcgccggaccttccggcatggaagattaaagggacgaaaatcgtgaagtgcggcccgaagcggttcaaggattctctgattccggtggaggaagaggagtcgctgtaccgttacgccggcggtcattacgagttgccggaagaggcaccggaggacgaagatgtggccgcttgtgccgacggctacgctaccattacgccgcttcggatggattacaccgacggtgcggcccttcgaacgatgcagcggatgaccaacgacaacgccctgtgtttgtttatcgatttccaggagcggctggttccggccatgcgaaagcccaaagacctgatgaaaaatgtcacaaaatgggcgagatgcgccgaggccttgagacttccggtgctgctgtcgcagcaatacactcgggggctgggggcgacggttccggagcttcgggaggtactgcacgaatacagcaagctggagaaactgagtttcagctgcttcgacgcaccgggttttgaggaagagatggaaagcatgacggcaaaacacgtgattattgccggcatcgaggcgcacatctgcgtcctccagacggcgatggattttctggaaaggggattccgggtgaccatcctgaaggattgctgcggtgcgcgaaagaaaggggatttcgacacggccattcgggaactggagaaggcaggctgccgcattaccacatatgaaacgctggtataccagatgatgcggtcgtcaagacatacggccttccgccggatttccgaaatcgtgaaggaatagaaaagggtacgttaaaggggtttacaagaagggagagagagatgaagttctatgtaaccaaagatgtttttgagaaaattcccgatgggaaattcgggctggtgagcgtaaccggcgcggacaacacgggcagcaatctggaggaggttctggccgcgcgggaagagctggcagagctggcggaaaaatacctgggcggcacggtaaaaatcggaatgattgataaagaaaacatggaatttgagacagaattgtgatataatacatcgtcatgtgcgtgaaaacggctggccaaaaggcgagccgttttcatgtttatagattctatctatttttattaaacactattttaaaatgttaaaggagaaagaaatgaacaacaacaagagatggttgtatctggctgtggcaacagtaatcctgctgttccagggcctgatctacgcatggtcgctgttcagaacaccgtttagtgaaatctacacggactggacagttgctcagttatccatgaccttcacgatttccatcagctgcttctgcctgggcggattcgtcggcggacagctcagcaagaagctgggtgtgaaggttagattcctcattaccgcagtatgcctcttcatcggattcttcggtgtatccatgctgaatccggcagattccgccggcagtttgacgaagctgtacatcttctacggtgtattcggcggcggcggcgtaggaatcggctataatgcagttatttccaccattacgaaatggttcccggataaggtgggtctggcatccggcatcatgctcatgggcttcggtctgggcagcttgctgctgggttctgttgtaaccggcatggttgcggcacagggtctgttcccaacctttaagattctggcaattgccatcaccgtggtaatggtagtcggtgccatcatcattaaggcaccggaagcaccggcggctccggcagaagcaaaggcagaggagaaggaagagaagtccaccgcagtcagcttcagcgccggcgagatgctgaagacttccagattctggatcttcttcctgtgggcgattgccctcaactcggccggtctgatggtaatcaacagtgccgcaaatatttccctggcatttggcggttccgcaattctgggcatggtagtatccctgttcaacggtgcgggccgaatcattgccggaaacaacttcgaccgtttcggcagaaagaagtccacactgattaatgtgtccttcatgatgattgcgggaatccttctggtgctggccggaaagaccaattccttgctgctgatcaccgtgggtctggtattcgttggaatggcgtacggcggtacaccgaccatcacctccgcatacaccaacctgtccttcggaccgaagaacttcacggcaaacttcagtattgccaacttctccctgctcccggcagcgattgtgggaccgatgatctccgcaaaactcctggaagcggcaggcggaaaatacgacacatgctttatcgcaatcatcgtattcaccctgatttctctggtactgtgggtactgctcaacggcgccagcaagaagagcgtgaacgaagactacaaataaagcttcaccggaaactgatgcccttcgcgggtatcagtttttttattttcaaatacccgaaaatcctatataataagtacatattcttttacgatgaaaggggaatttcatgacgctgaatcaattgcattacatcattacggtggcggaggccggttccatgaatcgggcggcggaacgcctgtacatcacccagccgtctctcaccagtgccatcaaggagctggagcgggaactgggaattaccgtcttccaccggaacggccggggcgtgacgctgaccaacgacggggcggagttccttttgtacgctcgggagatctacagccagtacgaggcggtgatgcagaagtacagcgacgacgaggggctgaagcagaaattcgggatttccatgcagcactattccttcgcggtaaaagcatttgtgaatttggtgaacaagtacgacctggcggagtacgatttcgccattcgggagacgaagacgaaagaggtcattagcgatgtggcttccctgaaaagtgaaatcggcatcatctaccagagcgatttcaatcgaaacgctatcaccaagatcctgcggcagaacagcctgcagtttcatgaactggtggactgcgacgccttcgtgtatctgtggagcggccatccgttggcggatcgagacagcgtgaattttcaggatctgtcggattatccgaatctgacatttgagcagggagacgattctacactgtattatgcggaggagattttctcggagaataactattcccggtgcatccgggtgaacgatcgggccaccatgctgaacctgatgaaaggggtgcacggatacaccctctgctccggtatcatctgtgaggactttaacggcggggattacgtggcggttccattcaacgatccggtcatcggcggggacaaggcgatgaaaatcggctacattcagaagaaaaacagcattctgagcaagaccgcacagctgtacattcgggaattgcgggactatctgggaattccgaccccggaatcggaaaagaaataaaagaaatgccacaggaagtggttttcacaggggtttagcagttgacattgaaaacggatacggtaaaatattatattagatgattatttcttacaggaggcgaaacgtgaaaaaagttggggttattatggggagcgacagcgacctgccagtagtagagaaatgtattaatgagctgaagaagtatgagattccgacggaagtgcatgtgtattccgcacatcggactccggtggaagccattgaatttgcacagaatgcggagaagaacggattcggcgtgctgatttccgcagcgggaaaagcagcgcacctgggcggtgtgattgcggccaatacggttcttccggtaatcggaattccgattaaggcgtccgctttggaaggtgtggacgcactgctgtctaccgtacagatgccgccggggattccggttgcgtccgttgccattgacggtgcgaagaatgcggcaattctggctgtagagatgctggccatcggagatccggatttgaaccggaagctctgggatgagcggaagaaagcccacgatgcagtggtggagaaagatgcaaaaatcagtgcacagtttaactgattgatgttataagaagtcaatataaaggtaaggtatcgaaatttttatttttaggaggacaaatgaaaagccagagcgaaagctataaagaagcaggtgtggatattaccagcggatacagagcggtagagctgatgaaggaacatgtgtcgaagaccatggtattcggaaatacatccccggtaggaggattcggaggcttgcttcagccggatttgaccggaatggaggagccgattctcgtaagtggaacagacggcgtgggaaccaagctgaaactggcgttcctccaggacaagcacgatacggtaggtctggactgcgtggcaatgtgcgtgaacgacatcatctgcgttggtgcgaagccgctgtttttcctggactacattgcagtaggcaagaacgttccggagaaggtggcatccatcgtgaagggcgtggctgaaggctgcattcagtcggaatgctgcctgattggcggtgaaactgcggagatgccgggattctatccggaagacgaatacgatttggccggatttgccgttggtatcgtggataagaagaaggttatcgatatcgagaaggtgagcgagggtgatgccatcatcggaatcgcatcctccggaatccactccaacggatactccctggttcggaaggtattcgacgtggagaacaccgacctgaacaagacctatgaggagttggacggaaagacgctgggagaggtgctgctcacaccgaccaagatctacgtgaagccgatgctggcactgttcaaggaaatgacaccgcatgcggtaatgcacatcaccggcggcggattctatgagaacattccgagagcactgccggaaggaatgtccgcaaagatttacaaagacgagctggaaattccgggaatcttcaagctgctgatgaaggaaggaaatattccggaaagagatatgttcaacacctacaacatgggtaccggtatgactgttgtagttccgaaggaagatgcggcccgggcggtggaaatcatcgaagcggccggagagcatgcaaaggttatcggtgagatcgtaaagagtagcgaaggagttatcattgaataagcagaaggcaagaattgctgtactggtttccggtgggggaaccaacctgcaggctatcatcaatcggtggcaggcaggcgatctcccccacggggatttggccctggtggtatcgaaccgcagcaaagccggtggactgcagcgggcggagaaggccggaattcgaaacgtgttcctgccaaaggaagacttcgaagcccgcttgattcagttgttggaagaagagcgaattgacattatcgtgctggccggcttcctgaaaatcctcagccgggatttcgtgcggagatatccggaccggattctcaacgtgcatccgtccctgattccatccttttgcggagatggcttctacggtctgaaggtgcatgaagcggcactggaatacggagtcaaggtttccggtgcaacggttcacttcgtcaacgaggtgaccgacggtggtcggattattgcgcagaaggcggtggaggtgaaaccggatgatacgccggagacgctgcagcgccggattatggagcaagccgaatggattcttttaccggaagccgtggaaaccgtggcccgggaaatagtggaacatgaatcagaaggagaataggatgagagttgcggttatcggtggtggcggaagagagcatgccatcatcaaatcattaaagaagagcccgaaggtttcggaaatctatgcactgccgggaaacggcggaattgcggaggatgcggaatgcgtggcaatcggtgccaaggacctggacaaaattacggagtggtgcgtgaaagaacacatggattatgtggtggtggcaccggacgatccgctggttctgggattagtggacatgctgaatgagaagggcattccttgcttcggaccgacgaaggcggctgcaattatcgagggcagtaaggcgttctccaaggacctgatgaaaaaatacggaattccgacggcggaatacgagacgttcgacgatatggataaggcgctggaatacgttcagaattgccggattccggtggtaatcaaggcggacggcctggcgcttggcaagggcgttatcattgcggaaacccgtgaggatgctgtggaaggaatccatacgattatggaagaacggaaattcggtgccagcggagatacggtggtcatcgaagaatttttggaaggaccggaagtgagcgtactttcttttaccgatggaaagacggtacggccgatggtatcctccatggatcacaagagagcgctggacggcgataagggcctgaacaccggcggaatgggaaccattgcaccgaacccgtactacaccgacgacgtggcggcggaatgcatggagaagattttcctgccgaccattcgcgccatggaaaaagaaggacggacattcaagggctgtctctacttcgggctgatgattaccaaggacggtccgaaagtcatcgaatacaattcgcggttcggcgatccggagacacaggtggtgcttccgctgctggagggagacctgtttgaaatcatgcaggctaccacagaggggacgctggatcgggtggacttctcctttgcggataagtgcgcatgctgcctggttgcggcatcggaaggatatccggtgtcctacgagaaggggtttgagattaccctgccggaaaaacacgatcgtattttcattgccggaagccgcctggaggatggagtgcagcgcaccaacggcggccgagtgctgggagtgaccgaagtggcggatactctgcaggaggcagtggataaggcatatgccacaatgaagaccgttcattttgataatatgtactacagaaaagatattggtgcgaaagcattggaagtgaaataggaggaataatggttaaggttttatatgttgagaaacgggaagcttttgccggaaagggaagagaacttcttcacgaattcagagatgtgctgatgattccaaatgtggaaagcgttcgggtaatcaaccggtatctggtagaggacctgtccgatgatgcttttgcaaccgcaaaggaatgcattttctcggaaccgccgacggatgacgtatacgaggaaatggagctggacggcaagctggtcatcgccgtggaatacctgccggggcagttcgatcagagagccaactcggcggaggagtgcctgcgcttcatcgcccacgatgaggctccgacggttagctccgcagtgctgtacattctggagggtgacctgaccggcgaggatctggcgaagattaaggacttcctgattaacccggtagaatccagagaagcggcactggaaattccggaaacgctgaaggctgtatatccggaaccgcagccggtcgcaacgctggacggtttcatcgagaagaacgacagtgaactggaagccttcctgaaggcctatggcctggccatggatctggaagatctgaaaatggtacgggattacttcaagggcgaggacagaaatccaaccgtagcggagatccgcgttatcgatacctattggtcggatcactgcagacataccacattcaataccacccttcacaacgtgcagttcaaagacccgacggtgagcgagaccttcgaggaatacatgaacacgcgggagaatctgaatgtcacgaagccggtaactctgatgaacgtggcaaccatcgccgtgaaagccctgaagaaggacggtcggctgaccaacgtggtagagtcggaagaaatcaatgcctgcaccgtggatttcaaagcggaaatcgacggagaggaacaggattgggtactgctctttaagaacgagacccacaaccacccaacggaaatcgagccgttcggcggcgcagcgacctgcatcggcggtgccattcgtgacccgctgtccggccgaagctatgtatatgcggcaatgcgtgtgaccggtgcgggagatccgctgacaccggcgtcagaaaccgtaaagggcaagctgccgcagcgtaaaatcgtgaccaccgccgccaacggatacagctcctacggcaaccagatcggcctgaccaccggactggtggatgagatctatcatccgggttatgtggcaaagagaatggaagtcggcgcagtcgttggtgcggcaccggcagagaatattcggagagagcgtccggctgcgggagatcagattatcctgctgggcggacggaccggaagagacggaatcggcggagccaccggatcttccaaatcccacagcgaagaatccctggaaagctgcggtgcagaggttcagaagggtaacgcaccggaagagcggaagattcagagactgttccgcaacccggcggcaaccacactgatcaagcgctgcaacgacttcggtgccggcggtgtatccgttgccatcggagagctggcagacggacttcgcgtgacgctggacaacgtaccgaagaagtacgacggtctggacggaaccgagctggctatcagcgaatctcaggagagaatggcggttgttgttgcggccgaggatgtggaaacattcaaggaactggcaatctccgagaacctggaagcgaccgttgtggcagaagtaacggaagagccttccctggtgatgaacttcaagggacaggagatcgtaaacatctccagagcattcctggataccaacggtgcggaaaagaaggccgatgcggtcatcgaacacgcgcagaagtttgagaagaagattccggcaaaattctacgaaggcatgaaggaactggcagccgacctgaacgtatgctccaagagaggtttggcggagcgttttgactccaccatcggcagaggttcggtgctgatgccttacggcggacgctaccagaagaccccgattcaggcaatggttcacaagatcccggtcatccacagagatcaggatgtgaagacggtctccatgatggcatacggattcaatccgtacatttctgagaagagcccgtaccacggcgcatacctctccattgtagagagtatctgcaagctgattgcaaccggtgccaagttcgaacacgtgtacctcagccttcaggaatacttcgagaagctgggcagcaacgatgtggcttggggaaccgccctttcggctgtactgggtgcattccgcgctcagatggagctgggcgtcggtgccatcggcggtaaggactccatgagcggaacgtttgaagatattcacgtaccgccaaccttgatttccttcgcggtaaccaccgagaaattggatcgcgtggtatccccggaattcaagggcagaggacacaacgttattttactggagccggaaatcggaccggacggtctgccaaccgcagaatccatcctggagaacttcgaagagctgaaccggctggtagagcagggtgcggttgcggcatgctacacgccgggatacggcggcctggcagaggccgtgtacaagatgtgcatcggaaacgaaatcggtttcgaattcgatcggaagtatggaatgagagatattttcggatacaagtacggtgcatttgtggttgaactgaacagcggtgtggacgtgaccgatgatatggaggttctgggtaagaccttgaacagagaatccatcgtttgcggcgaaggccacattcgtctggtagagatgaatcgggaatacgagtcgaagctggaatccatctataccttccacagcgataacgagaaggacatcccggcagaggtatcctaccgctccagagacaacagcgagccgagagtggccgttgcaaaaccacatttcctgattccggtattcccgggcacgaactgtgaatacgattcggcgaaggcagttgaaaatgccggcggcgaagcggaaattttcgtaatcaacaacctgaccgcagatacattgaagaagtccgtggaggatttccggacggcaatcggaagatcccaggcgattttcatcccgggtggtttctccggcgccgatgaaccggatggttccggaaagttcatcacctccttcttccgaaatgaaggcgtgaaggaagaagtgatgaaaatgctgaatgacagagacggtctgatgatcggaatctgcaacggcttccaggctctgattaagctgggattgctgccgtacggacaaatttccatgcagacgccggacagcccgaccctgacatttaacgatatcggtcgtcaccagtccaagctggtgcgcaccaaagtatgctccacgaaatctccgtggatgagaaaggcagcggtaggcgacatcgtgaccgtcccgatttctcacggcgaaggtaagttcgtggcaaatgaggatgacctggatgtgctcatcagcaatggtcaaatcctcacccagtatgtggaccttgacggtaatccgagtatggatattcagtacaatccaaacggatccgttatggcaattgaaggactcctgtctccggacggcagaattttgggtaagatgggacactcggaaagaatcggaaaaggcctgtaccgcaacgtaccgggtgagttcgatttgaagctgttcgaatccgcagtcgagtacttcaagaaataaatttttacaaaatccgggcagaggtaatgtctgaaatcccggggaaaagagaaaaggagattaacaccaatggctaacgaagcaaaaaaagaacgtattcttgttctgaacctcggttccacatccagcaaaatcgctgtgtatgatgataccgaagaagtattcaaggaaaccattcgtcacacacaggaagagatggcacagttcagcgatattctggaccagttctccttccgtaacgaaaaggtaagaaatgcgctggagagcaacggcatcggcgtgaacacactgactgcagtatgctccagaggcggaaatatcatcgcatgcccgcacggtgccatcggcatcgatcaggagatgatcgattatctgaccagaccggaagacaccgcaaagcacgcatccctgctgggaagcatgattgcatttgacttgcacaaggaattcggtattccggcatgcatctacgatgccatcggaaccgatgaaatgcagccaatcgcaagagttaccggacttccggaaatcccacggttcaccgttggacatacactgaacactcgtgcaatggccatcaagtgtgcagaagaagtactgaagaagccgtttaatgagtgcaccttcatcgtggctcatctgggcggcggaagctccatccgtctgtatcacaagggcgtaaacatcgactgtgtaaatgatgatgaaggaaacttctctccggagagaggcggcggctgcagcggtaaggaactggtaaagctgtgcttcaaggagttcaacgaaggtgccggcgagaagaccgtaatgaagaagattcacggaaacggcggtctgaaggcacatctgggcacgaccgacgccatcgaggtagagaagagaatcgaagccggcgacaagtatgcaaaggttgtatatgatgcaatggcatacagagtggcaaaggacatcggcaccctgtccgtaccggttgccggaaaggttgaccgcatcatccttaccggcggtatcgcatactccaagtacctcacttctcagattgcagagaaggtagactggattgcaccggttgaaatgatgccgggcgaatacgagatggaagctcttgccggtggtgcactgagagtactccgtggcgaggaagagctgcaggacttcgctgaaatcaaagcatctgcagtagacagaatccgtatctgtgaaggtgtagagccatacaccgtaccggaaaattaattccaaaatgaatcggggaacgcgggaccgaatgataaattcggtcccgagcccttgattatgaaggaacagacggggacatcaaaataataaaaacgattagaaaaaaataagggattgtgcttgacagcgaacactttttattatacaattctaattgttgatgtgctgttgtagctcagttggtagagcacttccttggtaaggaagaggttcggcagttcgagtctgctcaacagctccaatttttttaaaacaaaaataaaaaacaatctaggagggagataatggctaaacagaagtacgaaagaaccaaaccgcatattaatatcggtacaattggtcacgtcgaccacggtaagactactctgactgcagcaatcacaaagacactgcatgcaagatacggtctgggtgcagacgtagcatttgatgaaatcgacaaggcaccggaagaaaaggcaagaggaatcacgatttcttccgcacacgtagagtacgaaactccgaacagacactacgcacacgtagactgcccgggacacgccgactacgtaaagaacatgatcaccggagctgctcagatggatggtg

SEQ ID NO: 899 - DNA, 3915 bp, Unknown
  16S sequences of unknown bacteria
gcgaatcatttgtcttcctttttggctattaccccaacttttattatagagcctttttatcatcggatcgtcattggcccatttttggaaaagcaataatatagtataaatgtcgaggccaacaacaatctctttgccattccttctgcccgcaccgtaagtatgtttgtacaaaaaggtagcgaatattcgtgttttcccttataatgataataggttagaaaaaacaaaaaggagaaccccatatgaacgccgaccaactggctcaatacttcgaccatacccagctgcgcgcctatgcgacggacgccgattttgagaccctctgcgccgaaagcagaaaatatcatttccgaatggtagccatcaaccccgcccccgtccggctgtgcaaacggctgctggccggtacggacatccatgtaggcgcggccatcggatttccgctgggccagtccacccgcgagatcaaaaagctggaaaccgaaaacgcgctggaaaacggcgcggacgagatcgactacgtggtcaacctgacgcgcctgaaagaaaaggactataccttcatcgaaaaggaaatggaagggatcgtggagacctgccgcgcgcgcggagccatttccaaggtaatcttcgaaaactgctacctgtcgcagaaagaaaaaatcgcgctgtgcgatatcgcccgcagcatccgccccgactttgtcaagacctcgacgggcttcggcaccggcggcgccaccgaggaggacgttcggctgatggtggagcgcacccgcggcgaggtgaaggtcaaggcggccggcggtatccgcacgctggacgccgctcttcggatgctcgacctcggggtatcccgaatcggttctacggccagcgtcaaaatcatggaagaatttctggcgcgttgaccccgaaaagttaaaatatggaaagcgcccccgcaggcaaatccctgcgggggcgtatcgttttttcttatcgggccagccgggtgaacaggtcttcgaaaagcgcgtcgcggcggatcatatagacatagcggcacagcggacggcggaagtcctcgctgtaatggtgatcgtactggggaatgggcgtgggaatcagcctgtccgccatgaacttcccctcccgattcaacagccagccgatggtggtcacatcccagattacccggctccagacgtgccccttcgcataagcgtttgcggcgtcctccgtctgctgcaccagataatcgcacaggggatttttgccccggagccagtattccagctcgggcccggtggtggtgaaatgcgtgaccacgccgtggcagggcaacagcaccagcggcacgccggagtcgaacgccacccgggcggcggctacatcctgcaggatgttgaattcctgattatccggccaatgcagggcgctgccgcccagccagaccagcaccatgcggtcggctatctccggctgcatcagcagggcggacgctacgttggtgatggccccgatcgccgccacgtacaggggattttcagtggtgtgctccatggccagctgtgccagcgcctgtgccgcatcggatggaacgggcgttttttcatcgggcagataggtggtggagccccggtagaccggcacgttttccccggccagcgacagcagtttcaaaatttcctgatagcttttctccatgccgtcggcagggccggtggaacgctcattatgaaagggcgcggcgcacagcgccagcagatgcagccggtcctgcgcgcgtagggcgtaggaaatggcgaactggtcgtcgatttcgttataagcgtcggtgtcgatcaccagatcgaaggtcgtttggggcgtttccatcatccgaaggcgctgctccgtcgtcagcatgaggcatcttcctttccgggcgtttcggtcgttgcgattcaaagtaatcctactatagagcagggccgctagattgtcaatccgctctttaggacagtcccttatagcgggaaaaaagcggtatcagccgccgaaatttatctttttcggtttttcaggcaatttttctttttacgccgtctgcttttccaatttccgcagcgcttttcggaactgccactggaacagcagcagcgtacaagtaacggcgatggcgtccgccgccggttctgccgcgtagaccgccatggtctggtcggccagcagatggggcagcaggtagatcagcgggatcagcaggataaacttgcgcagcaccgccacgaagatcgagcagggcgcgtttccgatggaaacgaaggtgatctggcaggcaatctggatgccgaacaggaacagcgcgccgcagtacacccgcagggctttcgccgtgaaggcgatcagttccgcgtccgagctgaacagaccggcaaacgcctgcggaaacagcatgatgagcgcccaaagcccgcaggaatagcacaggcaggccgtcagcatccgacggaaggtctcccgcacccggcccacgttgcccgcgccgaaattatagctggtgatcggctgggaaccctgcgcaatgccctgcaggggcagcagggcgaactgcatcacgctgctcagaatggtcatggcccccacggccaggtcgccgccgtatttcagcagggacgaattgaagcagacggagatcacactctcgctggcctgcatggtaaaggtggccagtcccagcgcgatgcagggcaaaatcaactttgctcccgggaaaaagttttcctttttcagccggaggatggtctttttccccgtcaggaaacgaagcacccacacgcaggaaacgccctgcgacaggacggtggccactgccgcgccccggatgcccattcccagcccaaaaatcagcaccgggtccagcacgatattcagcacagcgccgatgagcaccgtctgcattcccacggtggcgaagccctgcgccgtaataaaggcgttcatacccagcgtcagctggacgaacagggtgccgagggcgtagatgctcatataatccatcgcgaaaccgatggtattttcgctggctccgaacacaagcagcatttcccggctccacagcagcatcaccgccgtcagaatgacggaaatgatggcctgcagcataaagcagccgcccagaattttttccgcttccgcgtcgtttccccggcccatggcaatggacgcgcggggcgcgccgccggaggccacgaaggccgaaaaggcggagacgatcaggatcagcggcatacacacacccacgccggtcagggcgagactgccgtccaccggcatatggccgatatagattcgatccacgatattatacagcatattgaccagctgggcgatcaccgtcggcacgcccagccgccacagcaattttccaacgggttcggttcccaaaaaagttttatcctgctgcattacggttgctccttcaagcgctttattcaaaacggatttattataaaaagtttttgtggttcatgcaagggaaaaacgaaaggctgcgtatgcggcgggaaaggggggctgaagaaaggcggctgttttttccgtgagagccagaaatgcagttcccatgagtctctctccagcttcggtgcccgaaggtttccaaagaggtgagcgaaaagccctttggtgcgcccgcagacgcatacccgttgtcccggacggggattgacgcgccgactacggcgcggattgggacttaccgtcccatgggggcgctcacacttttctttcgatggcgaaagaaaagtgtgcaaaagaaagccagcggcacggcgactccagaggcggcccacgtcgctatgcactgcggccaagccctgcgctgcgcttgggcttggctacgcgcttcatggctttcagccatttctggcgctagtcggccttcgg

SEQ ID NO: 900 - DNA, 2558 bp, Unknown
  16S sequences of unknown bacteria
tccatattctttcttcgccggagaagaaagaatatggcccccggagggcgctagcccgcttgcatggaaaaaattaagacgcagcagcttccggtcctgaaaaaagcaatcaagtcacaaccgcagtgcgtaagctacagcgcagcggcaagcggtccgcacaccggctatcagggcacggatgcagttacaaatttgcctggtagtcgaaactaacccacccgcaccaccgacacccacccaagggggtgggttcgtagggcggggaacaccccgccctgcgcggcgtctttctttccatattctttcttcgccggagaagaaagaatatggcccccggagggcgccagcccgctagcctggaaaaaattaagacgcaaaaaccttcagccccagagggcaatcgcaagcttgcatggaagccattcagacgccccccaacccccaacgaaaggagacaacaccatggaactcacactcgatgcgcccaatgcgcggcagcgggcgtttttgcacgagacgcggcggcacgtcgccttcggcggggcccggggcggcgggaagagctgggccgtccggaccaaggcgattctgcttgccctgcagtaccccggtatccggatcctcatcgtccgcaaaacctacaaggagctgatgaacaaccatgtcatctacctgcagcagacgctccacgatctggcggtctaccaccgaacggaccagctcttccgcctgcccggcggcagcaccatcgccttcggctactgcggctgcgacagcgacctggaccagtaccagggcgcggagtacgacatcgtctttctcgacgaggcgacccagctggatgagagctggatccgccgcatcacggcctgcgtccggggcgtcaacgcgtttcccaagcgggtctactacacctgcaaccccggcggccggggccacgcctatatcaagcgcctgttcatcgaccgccgctatgagccgggggagaaccccgacgactacgcgtttatccagtccctcgtcaccgacaacacggccctgtgtaaggcccagccggattacatccgccagctggaggccctgccgccccggctgcgggacgcctggctctatggcaagtgggacgtctttgagggccaatttttcgacgacttccgcgacgatcccgcccccggcgggctggcgggtctaccgcagcttcgacttcggctacgccaagcccttctcctgcgcctggtgggccatggattttgacgggcggctctaccggatcctcgagctttacggctgcacgaaaaaccccaacgagggcgtccgctggcagccggagaaaattttccggcgcatcgccgagatcgaggccgagcacccgtggctccagggccgcgagatcaccggcgtggccgaccccagcatctgggacgccagccgcggcgagagcatcagccagatcgccatgcgctgcggcgtctacttcacccccggcgacaaccaccgcctgtcgggctggatgcagtgccactaccgcctggccttcgacgaagacggcatccccatgtgctatatcttcaacacctgcaagggcttctgccgcacgatcccgaccctgtgccacagcacgacggacccggaggacctggacacccaccaggaggaccacatcgccgacgaatggcgctacctcgtcatgtcccgccccatccgcccggttctcacccccgcccccgcgctgctccccagcgaccccctgaaccagctggggacgctgggcgcgggccactagccgctgcccccaggggccggtgaaaacgcgggtaccccagccctccggggcaccaaaaaaaggctcccttgtgcaaagggagctggcagcgcaacgcgctgatttgggtgagactccaagcgcgcaagcgcgattggtccagtcgaacccatgcagcgcagagggattgatgcaacgcaagaacaagtttctaatgcagcactcgactccaccagactttaaaatcaaacttgcaaatttcttgcaagccaatgtctaccagacagtttatctaccgccctccgggggcccgattctttcttctccagcgaagaaagaaccggggaagaaagacgccgcttagggcgggggcagccccccgccctaaggacccacccctgtttacggcgtcgatactacagccgcacactgtaccggctaccaggcagatttgcgcgtgcatccgtcccctgatggctggtgagcagaccgcttgccgcttcgctgtcgcttacggagtgcggaggtgacctggcggccaccgtagtcgacggcttctgcgttgtttctgtaggcaccaaaagcccttggctccccttttaaggggagctggcagcgcgggacgcgctgactgagaggtcttcccccaattttgcaccgcacctcaagtgctgcacagaccaaaggctcccctgaaaggggagctggcgcggcgtagtcgagacttgggtgagactccaaacgcgcagcgtttggccaagtcgaacccatgcagagcagaggggttttgcac

SEQ ID NO: 901 - DNA, 3442 bp, Unknown
  16S sequences of unknown bacteria
cggagctgtctcagccgttttacggatttttgataacgctttcaagccataatcctttcggacttccggaatatttgcaggaaatagagcttgagccacaggatgaaaatatagtcgggcgctatatacagtcagtgaattacgcggacagatgcctttctgagttttttgacgagcttaaagaagctggactttacgataactcgttgattttaatatacggcgatcatttcggactggcgcgcgcagatgaagcggtgcgctcggtggtttcggaatggctcggacgcgattatacgtacgacgatctgctgagagtaccgtttattattcatatgcccggcactgatattaacgagactgtcagcatatctggaggacagattgatgtgctgcctactgtctcatatttgctcggtattgaagagctcgatacgctttatctcggtcagaatctgctgactgcggaaagcggctttgcgccttttcagatgcatatgattaaaggctcgtttataaaggacgatgtagtgtttgaaatgtcgcgcgacggtgtttctgaaaattctaccgtttataacaggcgcacaggagagaagcttgaagctgcggactattatgatgattatttaagagccaaagaaatgatagaactatcggcgttttatttggaaaatgatgttttaggactggcgatacgcgacggcaagacggcagcgcagataaacgaggcgatattcggaagcggcagcgtcgcgaaaaagcttgaaggattttatcttagtgctgctgatgatgacggtatcgacgaggtatatgcttttataaatgaaagaattgcagatgacgatgattattatgcggcgctgtgcgcagatgacatacttacagtgctgaattatatagaagaaaaattttcgggaaagagcggcaagaaaggaacgattctttcggttgatgagagtgtgaacgaagaatttctgcgttttcgccagcacgtgtatcctgtgacggatattgcgggtgagatgacgaagatagagtatgcgggatatgataacgtaataatacgcccgagccttgataatctgtcgccggcacagctttatgaattcgtgagcgtaaataagcctgcgggagtgctgctcgacaacagcgctttatgtgtctacggcagcgtgctcagtgcaatggactgcgttaagtatgcggatgctatgagcgcagaatcaggtgaaactaaaagcgcgcttgccggagtaaagttgccgtggacagacggtatagtgaattaaaagagtttaatgaaagttatttgaaagcagtattttaaaagcagcattttagtgaaaattcggttttaatttttacacacttataaaatgctgctttttgttttttttgaaaggatgaataggatagagtaaatttttgattaaatgaagaaacagcaactttacatgcaaaactgtttattgcagcagaattttgtggtattatatataatgaataaacagaaaacagatagatatatgagcttgaattcatagtgaaaatatggagaataacgacgggagaacgatatgaatagtattacatacgttatatatggcgggcttttttttatagtgatacttcttgtggtgatgctcgtgatgacagcggcaataaagaaaaagggacagaatgaaagtacgcagcagatttctatagtgagagatgaatatatgcgtctttttgcagaaacagaaaaggatatgcgcgagatgaaacaggacattaccaatgaaataaagagttctcgcgctgaaatgagtcagaatataaaaatgagcatgggaacgctcggcgatttacttgcaggcggccagaaagcatcttacgaaaatcaggacaaacgccttgcggaactcaaaatgcagctttctaatatgaatatggaaaatgagcagaagctcgaaaatataagaaagactatggaaagcaggattgcggcgcttacggaagacaacaataagcagcttgagcagatgcgtatgacagtggatgaaaagctgcagaagactctcgaggatagaataagcaagtctttcaaccttgtatcggaaaggctggagcaggtgtataaaggtcttggtgaaatgcagacgcttgcatcgggtgtcggcgaccttaaaaaagtgctttcaaatgtaaaaacgcgcggaattctcggagaaatacagcttgcggccattcttgagcaaatattaacgcccgaccaatacgacgaaaatgtggcgacgaagaaaggcagtaccgagcgcgtagaatttgcagtaagacttccgggcgatgatgagggaggtattgtttatcttcctattgatgctaaatttcctgcggatagctacagcaagcttcttgacgcttacgatacgggagaccgtgaagctgtcagggcagcggaaaaggtgctcatacagactataaaagcagaggcgaaagatatacgtgataaatacatatatccgccggacacgacggattttgccattatgttcctgcctgtagaggggctttatgcggaagttatacgactcggtatggtggaaactttgcagcgcgactaccgtgtaaatatcgcaggtccgacgacgatggcggcactccttaacagtttgcagatgggctttaaaacgcttgctatacagaagcattcgagtgaggtatggcaggtgttaggtgcagtgaagacagagtttgataaatttggaagcgtgcttgctaagacgcaggaacggataaatcaggctaataaagagctcgatacgctcattggaacgagaacgaatgttatacggagaactctcagaaatgtacagagactgcctgaagcggagagccgggcggtacttgaaatttcagctgccgatgcggacagcgaataatagcaaggcgcggaaagcagaaagagacagaggggcgcgtgacggagcacaggcaaagaaaagataaggacaggagtaacaaatttatggctatatatgctatcgccgatctgcatctcggttttgacaaaagagtggaaaagccgatggatatttacggcgaaagatggataaatcataccgaaagaataaaggaggattgggaaaagcgcgtaaaggcgggcgatacagtcataattgcgggtgatatatcgtgggcgcttaaactggatgaagcgcttatagatcttgcatggatagatagtcttcccggcaaaaaggtattgataaaaggcaatcatgagctctggtggaacggtataaacaagctgaataagatgtatgatgacatattttttctgcagaatacattttatgaggtgaacgatgagacggggcgtactgctatctgcggcagccgcggctggatatgctcgaatgtaccgccgcccaggtcgtataccatgatcttc

SEQ ID NO: 902 - DNA, 32759 bp, Unknown
  16S sequences of unknown bacteria
gctcgatagacgaggctgtggacgaggccaaaatgaacgacgattggaggcatgcatttatgatttatcagattcatcagatggatgcggagaagcgaggcatcgccattggcgagaaacggggcgagaagcgaggcattaccatcggcgctaagcaagagaaattggacaacgccaagggaatgcttcacgaaggtctatccgccgacctgatttcccgcgtcacggggctctccatcgctgaaatcaacaagctcaaagctgcgccgaacgccaactgacttttgccccacaaaaagccctttaacgcagaactgcccagccaaaggccgggcggatacgatgggtggagcggataaagcccgccgcagggaaaagagcaattccccacggcgggttttttatgcgattttttagtggtattccggcagccagcccttgtgcgcttcgataagatcgtcgcacatggaaacgatctgatcgatggtgagctctgcggcggtgtgtggatcgagcatcgcggcctggtagatgtagtccttcttcttcgtaacggcggcctcgatggcgagcagctggggattgatgttggtgcggttcatggcggcgcactgctcgggcaaatcgccgatgaacacgctctgcacgcccgaagcgtccgcgatgcagggcacttccacgcaggcattgctgggcaggttggtgatcaggccggtgttgatcacgtttccgccgaacttgaaggggcggttggtctccatggcctccatgatgtagctggcgtattcgcgcgagcgggtgtgcgtgaggttctcatcgcccagcaggttttcgcgcatcttttcccattcggcgatctggttgatgcagcggcgcggatactcgtccagcgggatgttgaactggtcgatcagctccggatgggtggatttgatgaaatagggcatgtattcgctgttgtgctcggaagactcggtgacgtaatagccgaagcgcttcatgatttcatagcgcaccatgtcgtggtgcttttcggtgcgcgcgagcgcgcgacgcttgatttccggatagagatccacgccgtttttcgtgacttccagcagccaggcctggtggttgatgcccgcgatcttccattgcacggtgtcgtcgtattccatgccgaggcctttcatcagcccttcgcagcacacctgcacgctgtggcacaggcccacggtctttacgcccgtatagcgctgcatggcgccggagagcatggccatggggttggtgtaattgaggaaccacgcatccgggcagacttcttccatatcgcgcgcgaaatcgaacagcaccgggatggtgcgcagcgcgcggaagatgccgccgatgcccagcgtatccgcgatggtctggcgcaggccgtattttttggggatttcgaaatcggttacggtgcagggctcatagccgcccacctggatggcgtccaccacgtagttcgcgccgcgcagcgcggccttgcggttttccacgcccagataggtttcgatggtggccttgctaccgttgttgcggttgatggtgtccaacatacgcttggaatcctccaggcgtacggcgtcgatatcgtacagcgcgatgacagaatcttccagcgccggggtcatcatggaatcacccaacacattcttggcgaacaccgtgctgcccgcgcccataaacgtaattttcggcatgctatgtatcctttcctgcggcgaagcgccgctttttttgaaaagggactgtgaagaaactttggttgttctttcacagtccctcagactgtcaaaaacctcgaggagagcgcgagagtgccgaagccctttcgcgctttaatcgtccccgacggcgtgtacggcgggggagcttgctcacccgccactggggctgtgaaaaaacttttggttttttcacagccccataatgcaatcccttagatttccgggatgacgacgtcgatttccttgccgagctgcgcggacttgacgatgtgatcgatgatcgcctggttgtacaggatctggctggagggaatcggcggctcgcccttatcccacaccgcatccaggaaggagcggatcttcagatcgaacaggccctctttggtcttgaggatcgggatctcggtctgcgtctgctcgccggccacgtcgtgatacagcgtcatagcgccgccgacggtgccgttccagcaatcggtggaaggaatgcgcagcgcgccttccgtgcccaggatgaccgtgtcgccaggggtgtccaggtgcatggcccaggaaatgcggaagtcgaggatgatgtcgccttccaggcgcacgaacgccgccgcgaaatcttccacgccaaagcgcgccgcgttttcagccgcggtgtggaacttatcggggcgctgatacttcgggttggtgccgaagaagttggaggtatagcccgtaacggtgaggggcttgggatagccgatggcgttgagcaccatgtccagcgaatagcagccgatatcgcccatggcgccgatgccgccggtggacttttcgataaaggtactgttcgggatgccgcgacggcggccgccgccggtctggatgtaatagatcttgcccagcacaccgctatccacgatgcgcttgatcatcttcatgttttcatccatgcgcggctggaagccgatggagagcagcttgccgctctttttctcggcgcgcatgatttccacagcctcttcggtggtgacgcacatgggcttttccagcagcacgttcacacccgcgttgagcgcgtcgatggtggtctgcgcgtgggccacgttataggtgcagttgctcaccgcgtcgagcttttccgccttcagcatggaggcgtggtccgggtaataccgggcgcccttcacgccccactgctcggcgaacgcttccgccttgccggggatcaggtcggccagggcgacgatttccacatcgtccattttgaggaggctctgaatatgggattcggcgatccagccggtgccgatgatgccgtacttcagcttgccttcgcgctttttggtttctgccgctacgctttgcgtagtctgattgagcacttcatcgccgttttttgccatgacaatctctctcctttgcaattggtgcgtggctacatacacatgataccccgttttttgcgcgctgtcaagaaaaacattgcggcgggacaattttcggcgaatagcacacgcagaaggagggggaaaattatggcgcggcgcattttatgatgaaaaacggccgcgccagacgcttatgccgtcgtgagggcttccgcctgttcgagcagggcgagggagcgctcgatgttttcttgttcgagagaaaggagccgcgcggccagatcctgcgcgctggcctgcgcgccttcgcaatccgcgcgcgcttttgtgagttcgatcacgcccatggtgttgccctggatcaaaaggcccgccatgtgcggggtgctcttatcggtcagcgtactcatgcggatgccggtccatgtgcaggcgcgttccatgcaattcacgccgtccgggcgctcgccgtgcccggcgagcaggttttccgcttcgcgcaccacattctggtattcggtttcctggcggtagatttcgttgcgcaggttggtatcgtccgtgatgtccaggatggcgcgcagtgaggtgagcccggttcgcgcgcccgaccagacttcgttgagcaattctatggtggggtccatgcgtatccctcctgttcgttttgggcttatcttatcgaaaattggcgcgcggcatgcgtggaaatatctcgcttgcgcgccagaaagcgccggttttcgcggcgtgtgcggctaaattttgaatatattatggagcttgccgcaaatggcttgccggatggcgcgcaatccgttataatggaagcataacggcaatgaggtgagaattatgtccatgtgtcccttgattttgatttgcgacgacgaccccgtggtacatgagtcgctggggatctacttaaagagcgaaggattcgagtccgcttctgccttcgatgggcagcaggcgctggaaatgagcgaatcgctccatccagacctgatcgttttggatttgatgatgcccaagatgtcgggcacggacgtgtgccgcaccatccggcaaacgtccaataagcccatcatcatgctcacggccaagagcgaggaaatcgacaggattctgggcctggagctaggcgcggacgattacattgtgaagcccttcagtccgcgcgaggtgattgcgcgcatcaaggcggtgctgcgccggtttgccgagcccgtggtgccggacaacaccatcgtgcgtttcccgcagctggaagtgaacctgggcaattatcaggtgaaggccaagggccaggtaatcgcctgcacgcccaaggaagtggaaattttgcacctgctctcctccaacgcgggtcaggtgttcagccgggaacagattctctcgcgcgtgtggggctatgatttcttcggcgacacccgcacggtggatacgcatatcaagcgcattcgccagaaactgccacaggagggcgtgccgtggtcgctggtgacggtgtacggcgtgggctataagttcgaggtgcggcaggatgaggcgcgggcgcaatgagaaatagcgctctggtcgtccgcatattcgtcgtcgtctttaccgcgctgttctttaccgcgctgttgaccgcgctattgttcagcgcggtttcgcgcgtgtccttcgcccgcatgaaggaggaagaactgcgcccgcgcgcggaagcgctgggcaatctgttcgttgctttcagcaaagagagcgaagaggatgtgatcgagtccatcatgaactcccgcgtgggagacgaatcgctcttgggcgcgtacggcatcttggtggattctgatggcaacatgctgcacagcagcgggatggatgagagcattttgcaatggtttgagccggtttttgcgcgcagcctggcgggcgaggcggtagccaccagcgattatggcatcatccccacgcagaatatggtgttcgtgagcgtacccattcgggatggcgcgcagattttgggcgcgatcatcctatttgtgccactttacgaggcgatgaccgccatgggcggcctggtcggcgcgctgatgctctcgctgctggtggtgctgccgttcgttttcgtgatggtgtttttcctggtgcggcgcatcgtcaacccgttgcgcgaaatgcgcgatgtggccatggccatggccgcgggcaatttcaaggtacgcgcgagcgacgagtggcgcggtgaggtaggccaactgggccggtctttgaactacatggcgggcgagctttccaaaacgatctccgatgtggaattcgagcgcaaccgcctgcgctatgtggtggacgggctgagcgagggcatcatcgcggtggaccagctgggccgcgtgacgcaccggaacccggcgctggaagaaatgctgggcgtttcggaagaaaggctcgataacccggagcaaatcgcggatgacaatatccgcgatgcgttcaagaatgtgctgcaaagcggcgaacccgctagcctgcagatggaagcgccggataagaccaaaatcatccgcgtgaccatcactccgatccatgatgaccggggcgaaaccgcgggcgcggtgggcatgttcctggacatcacgcaatccgagcgcctagagcgcacgcggcgcgattatgtggccaacgtttcccacgaattgcgcacgccgctcaccgccgtgcgcggcttgattgagccgctgcgcgacggtatggtgcgggacgaggatacccgcaagcggtattacgacatcatcctgcgcgaagtgttgcgcctttcccgcctgatcgacgatttgatggagctttcccgcctgcaatcgggcgcgatcgccgtggaagtgcatcctttggatatccgcgagttgctgctggacatttgcgagcgctatgcgaacatcgcgcgggaaaagaaccgcaattttacctgggcggacgccattgaggattgcccgcgcgtggtgaccaacccggatcgcatcgagcaactgatggtgatcctgttggacaacgccatcaaatacaccagcgaaggctgcaccattggcgtggatttgatttggaacaccgagcgggtgaccgttacggtgtttgacaatggccagggcattgccgaggccgacctccagcacgtctttgagcggttctataaggcggataaatcgcacagcaccaagggcagcggcctgggcctgtccatcgcccgggagcttttgcgctggatgggcgaggacatttgggtgaagagcaaggtgggcgagggcacggcgttttccttcaccatccggcgggaagtgccgtgatcttgagggaacccacgtccgccccggaaaaaccgccgtggtcatcgctgccacaggtttcatatagcttcttttcgcggcacagcgtgcgcaatagccaggtggttttccggtcgtgccggggatagtggcattcgatgccgtcgaacgccaattccagcgcctggcgcacctgtttttccaaggggtcgccaaaagtttcgcgcgggtgggccagcacggcctgcccgccgctttcgtgaatcacgcggatggcgttttccgtggcgataaacccctgatccgcgtagcgcacgccatagtcgccgtacaggcgcagcgcttgtttcggcgcggccacgatgcctttgtgcgccaggtagtatagcgccttccagccgcccttttcgcgcatctctggaaaaaacgcgtattcttcgcggctaacgtttttgccgcgcgcggcgagccggtcgatcaggatatcgctcatgccatcgagtttcgcgcggctgtcctggagcatagcgagaaacgcggcgttcgcaaaatctggaaaatacgccagcacatggaccagtacgccgcgtagaaccgtgtctacttccgcggcgggaatcaggcggatgccggcccgcgcgcacaagggagcggcctcctggctgccggaaattttgtcgtggtcagcaatggccagcgtcgttacgccggctgccttggccttttccaccatttgcgcgggggaaagcgcgccgtccgaatgcgtggtgtgtacatgcaaatccacatatcccatagcggcactcctttttgccagtcttgttcctattgtaacgcattatgcggggaaatgtacagagaaaacggatgttgaacgaaaaaaattttggccaagcgagcggccgccgttgacggagcgcgcgcaaaatgctatactttttttgccggagcggcgcaggcacaattgatttctgacggctctggcgtagaagaaaacggagggcacggttatgcagccgacggtgttgatcaccagtgagaattttggccggttttcgcaagaggggcggcatgtcttggaagaggccgggttgcgcattatcgacaatccttatggacacacgtttttgcaccgggaacagatcttgccgattgtaggggaagcggatggcatcatctgcgatatggaaaagatcgatcgggaagtgatcgacgctgcgcccaggttgaaggtcattgcgcgccgcggcgtggggatcgattcggtggactggcgctatgcgcagtccaagggcattgaagtggcgcgcaccacaggcgtggtggaaaggcccgtggccgaattggtgatgggatatattttggaattttcccggcacatttcggcgatgagttccgctatgcacgctggacagtggcagcgcatttccagccatagcgtggccgggcatacgctgggaatcgtgggcatgggcaacatcgcctgggaagtcgcccgccgggccgccgcttttgatatgcgcatcctgtattacagccatcgcaggaacgagcgggcggaagaggcgtttggcgcgcagtatgcgccgctggaaacgctgctggaagaagcggatttcgtttcgctgcacgtgccgttgacggaggaaacccggcatatgatggacgcgcaggcgcttgcttgcatgaagaagggcgcgtatttgatcaatacggcgcgcggcgctgtggtggacgcgcgggcgttggcggacgccctgcgttcagggcagcttggcggcgcggcgatcgatgtgtttgatggggaaccttgtacggatagcccgttgcacggcttggattcggtgattttgacgccgcacattggcacgtatacccaagagatctatgtgcgcatggatgtagaggctgcgcgcaatgcggtgcgctgcttgacttgttgacggaaccattgcgcgaatacgctggcatgctttgtatgccagcgcatttttttggaggatgaaatggagccatgcggccgcttggcaaatttgtagaaggctatggcgttaaaaagcaaacaaaggcgaacgaattgtaatattttgaaataatattgaaatatttgcttagatatattacaatagtaatgcaattaaatttcttttgttggagtgattttgcatggttcgcttggatcccataccattcgatcaggtacgcagcatcacgttttctgtgaaggatttgcaggggctggaattgaccatcgtcctattttctcgcgcgaagcagcgctatgcacgcataacggttgcgttgcagaacgacacgtcggtagaagcgccatgggccaatcccattgtttgcgatacgcccatttcggaaaagaagttccgccggtatttttccgccatacagtcctttgatgtggaaggctggaaagcgcaatatggggatgcgtccgaaggagattcctggagttttcgcatagaaatgaaggatgggtatgtgattcattcccaggggtgcggagactatccggcggaatggttcgagctggtgtatttgtacgatcaactgtgtccattttggcgttgctttgccacacgccggcgcgccatgccgattggcatcgtggccggatagaacgagactgtggaaaaacgccgtcgatcaaagaggatttggagccgaagggccccacatcctctttttgtggtacaattcatgcccgaggagtattatgcgccaaggagagaaagaatttccagaactatagggctgcgaaagaactttggttgttctttcacagcctcaaagcaaagtattggcgctttagcgggagcgtttcctgtgccgggcgatggcttttgccagctctacctgcgcgagggaaagcgcggccaacgcgatggtggccagccactgcgcgccctgcaacaaagtgagggaaaacgcgtctcgcagcgcagggatgcccaggataccggccatcagcagagcggagatggcgaaggaaagtaccagatagggattggcgccttcggagcgcacccaaatgggttcggtattggagcgctggttaaaagcgcgcagcatctgggaaaaagccagcacgcaaaacgccatggtctgcccggttgcgtggccctccatgcgcacgccaagccaataggcgcaagtggtcatcgcggccacaaacaggccctgggtgacgacgcggcgcaccaggtctttttcaaacagagtgccggatttcacgggcgggtgcttcatgatgtttttgctggcgggatccacgcccagggccagcgcgggcagcgtggccgtggccaggttcacccacaggatgtgaacggccaggagcggcgcgtcccagttcaacagggtggccacaaacagggtgaggatttccgcaatgttgcccaccagcaggaactggatcactttttggatgttccgatagacgcggcggccctctttgatggcgtaggcgatggtggtgaagctgtcgtccagcaggatcatatcggcggcgtctttcgccacatcggtgccggaaacgcccatggccacgccgatatccgccgccttcagcgcgggcgcatcgttcacaccgtctcccgtcatggccgcgacctcacccgcgcgcttcaggctctggatgatgcgcattttgtcggcgggcgacacgcgggcaaacaccgtggccgatttcacaattttatccaattctccgtcggagagggaatccagcgcgtcgccggaaaccgccgcgtcgccctcctggtaaatgcccaattcccgggcaatggcaagggcggttaccttatggtcgccggtgatcataatggtgcggatcccggcctgccggcaagcgcgcacggattgcgccacttcctggcggggcgggtcgatcattcccactacgcccacgaaggtcatggagaattccacgttttccccatcatcggtgggcagcgcgggcagggtgcgcatggcaaagcccagcacgcgcaaggcgctttccgacatggcaaggcaaagcctggcaatggattcccggctggcagcggtcaggggctgcacgccgctggaagtgaggatgtgcgtgcacagtggcagcagctcatccacagcgcccttggtataggccaggatttttccctggatctggtgcacggtggtcatgcgcttgcgctctgaatcaaagggttgctcaaacacgcggggatatgcatcttccagcgcttcgtggtccacgccaaacgctttcgccatgtgcagcagcgcgccctcagtggggtcgccgatggtttcgcccttgtggtcggggtcgaagcttgcgtcgttgcagagcgcggcggcgtacacgagttcccggtatacggccggatgttgctgggcggcattttgcacgggcgtgggtacgccgctggcaaaatcgccgttggccgctatatgcgtcaccgtcattttgttcaaggtgagcgtaccggtcttatcgcagcaaatcaccgtggcgctgcccagcgtttccactgccgggagcttgcgcaccagcgcgtttttcttcgccatgcgttgcacgcccagcgccatcacgatggtggccgttgcgggcaacccttcgggaatgatggaaatggccagggaaatggccacgaggaactggggcgccaggggacggcgatatagcgcgcctatggcaaaaatcaaaaggcagacgattaggccaacgatggtcagggttttgcccaccgcattcagctttcgcttcatgggcgtatccatatcgtcctgttcttccagcaggcccgcgatatggccgacttccgtgtgcatgcccgtggcgaccaccacgcctgttgcccggccataggtcacaatggcggacgcgtaagccacgttggcgcgatcccccagggaacaatcctcgagcaggacggtttccgcttccttttccgcgggcagggattcgcccgttaaggcggcctcttgcactttcaagttggcggaatccatcaggcgcaaatccgcgggaaccatgtccccgtcgctgagcagaaccacgtcgcccaccaccagatcgctggcgggcacgatgctctcttctccctgccgcaggacgcgggcagagggcgcgctcattttgcgcagagcgtccagagaggcctgcgccttcttttcctgggcaatgccgatgatcgcgttgacgatgacgatagcgaagatgacggatgcttccgtccattcccgcaaaagggcggagaacgctgccgcgcccactaggatgagcaccatgggatcggtaagctgcgctttcagcatttgcagcagggttttcgggggcttctgacgcaattcgttgcgtccattttgtgcaagcctttccgctgcctcggcatcgctcaatccctccggggaggtacgcagggcctggtaaacttcggagagggtctgtgcgtgccaaggcgtttttcggtggttgtccataatgcgtggagcaatccggaaaacgcgcgcccagcctggccgggcagcgtttcgggttttgctccaggaaaaaccactcctttcaaaaagaatattctgaccgcccttgggcgggatcagttgaacgcaaaaaggcatagcccgcgttttgctgtgcaaacacgggttatgcctttcgtgaaaaggaatttagaggacaaagcgggttacttcggtcaccgtcgctactgccggtgtcgtccatacgcgcaaatcccatcctttccgcaattcatgataatcccattttagcaggattctggtagcgtgtcaaggcgggaattttcgcacattgggcgttgcgcaggcaaaaatgggcgcgcgcgccaggcaagtccggcgcggcacagctatccttccatttgcgccatggcaagccgctgatcgatttcggcaattaagcgctccagatcccattcgccctgcgtgtagagcgcgatttggggatagaacgcgctggataggctgctttccaggccaaagcggtggcgggccagcacgaagtgggaatccagcgcgcggaatgcggcgatgtcctccgtcgaaagggaaaactggttttcttgtgcgtagcgctcgcgctgcttgcgcgcggcggcaagctcttgttccaaccgcaggcgttcttcgtccgtctcgggcgattgcgcttgcatggcggcgatttgcccgtcgagccgcgccagttcggtctcgtattgaggattgggcaccggcgcgttttcctctggcagcaggcagatgcgctgctcgctatccagcgcgttgaccgcggtttccagaaacgtgatggcggcctgggtgttttgcgaataggggttcacaaaggcggctgtcaggcgggtgaggaacacgggctccattccttcgcggagggacaggaataaggcgtattctgtgttgcccgcgggcgcgatgcggttgccggaaagcgtgggaaacaacacacggtgctccacgaatggcgcgcttgtggcttcgccaaccgtgcccgtggcgttcagtcccgcaaaatcaatggcttcaaaggcctccatgagctggcggaagaggggcgtgtccagtttttgggcattgccaggctgtgcgctgacctcccagtaggcgtccaggacgctgcttagcagaaatgcgcgcgcggtttgggcgttcatattggggtcgaaggcgctgatatccgcaaattcctgcaggatctccggcaggcgtgcaacgaggcgcagaaattccagccaggttgtgggtacatcctcctgcgagaggccgacgctttcaaaggcaatgggatcgtaagagggggcattgctgttgatctgcacgaatacgggcaccgccagtggcacgccatcttttgccacggcttcgcgcagatggggatagagcgaagcgaccagcccgcttagcgtttcgctctgggaaaggctgaccatatagccccggctgaaggcggcctcataatctgcgctttccacgggcagggcgtaaacatcgatggaagcgtcccgcgtggagagggcttgcgccacgtcgataccgccttcctcccgcgtcacgacgtcgatttccggatgcgacgccaggaaggcgaggcgcgcgtcatccagccacaaaccgcataccacgagttgctccctttcctgggcggaggaatcgagggggattttggcgagcgtttgcgcatccgccaccaccagagcgttgccgtcagccaggacgggcgtcgtttcggccaggcgcacgctggagaatcccagcactgtcaggttgtccgcatccatatcctgcatgcggtacagttcgccgtcatatgccaaatataccgcgttttccgccgcgtggaaatacagataaccgggcgcttcttcccattccgcaggcagagagcaaagcgtctgcacatcgccggtgtccggcgaccattcggccagcgacatatcctgcagcatggcgggattgcccatctgcacgagcagtttcccttcctggtaaggcagaatttggctggccccctgcggcgtggcaatggtttcgagcgtgccgtcggtaaggctaaagcgcagcaggctctctcccgcacccagaaagcggggcacgccatacagcgaatcgcccgtggagaaaaagcgttgtgcggggaactctagattggcttgtccattgtcatacgaaacccagtcgtccgtttccagcggcaaagtcaattcgaattctacggcttgggcggcttcttccaggcgcaaagcgtacaggcccaattcgtacagatcgatttcgccgcggtccgcgctatagagcaggcggctcgccagcgcgtgcggtgcgccatcgaagattagcagggcgaggggcgagaagaatccgtcgcccgcgccttgtggaatgagggtggctgtatccagcttccagcgagtggaatcaccgctttcgtcgagcgtgtagagcgcgtcgtaggtcaatgcgtaaatggtattttccaggcaagcgacgctgcttatgcctaggaaatccgttttttccgtcgcggtgctgagcaggatttcgctttccgtcgcccaggctgcaggggagagcaaaaggcatagcagcaaaatcatggcgaagcttcgtttcattcgtcttcctcctcttttctggatggatggaaattgcgcctgcgaagggaaggtcatcgaggattggacgaaattggcaagagcaaagttgcattttcgcgaatttgttataaggtgtttgccggggaaattcttcgcagcgataccaccaaatttcccttctttcccatgggaacagcgagaagtttttacgtttgcatgatacaattttacaaacgccattgttttccgcaaggaggttcccatgaaactgctgtatgctgaggacgaacggtcgctttccgaagcggtggtggatatcttgacgtatcacaaatacatcgttgacgccgtgtacgatggcgaggacgcttatgcttacgcgctttccggcaattatgacggcgttattttggacgttatgatgccgggccgggatgggatcgacgttctttccgctttgcggaaaaatggctacaaagcgccaatcctcctgctcacggcaaagacgcaggttgaggatcgcatccgcgggctggatgccggagcggacgactatcttcccaagccttttgacatgggcgagctgttggcgcgcgtgcgcgccatgctccggcggcgcgaggaatttcatcccgatctgctctcatttggggatttgacgctgaacatccagtccagcacgctgggctgcagggggatggaatttgtgctgcccaagcaggaataccgcctgatggagcagctgatggcaaaccacaacatatttctttccacggaagatcttttggtcaaggcgtggggatacgacgcggaaacggacatcaacagcgtttggctgtatatttcctacctccgcaaaaggcttgccgccatgaattcctcggtcaggatcgtatccaagcgcaacatcggctatcgcctggagaatccgctatgaagaaaaccctgcgcaaaaaattcattctttttgccatgctcgccgtgaccattctgctggtggtgctgattggcgcgattagcggcttgagctgggtcgctttggatggccagtccagcgcggttttgcatgccctcgccaatggcggcggggacgtttcccgggaggcgctacccgctcccaaaccatttttgccgccgatgaacatggatacgctccagtccgcccgcttttttgtcgtccatgtggatggggacggcaaggttctggatgttgacgtggagcaaatctcttcgatcagcgcggaggaagcggcgcaatatgccgcgctcatcacggacaccgccggaaagaccggcccgtacaaatatgaggtcaaacaactcggcgcggaacgcctgatcttttttctggatacatccggccaatggggaacgtttgccatggtgctcagcatctcttccgccattgcgctggtttgctggcttgcgattttcctgtttgtgattttgctttccggccgggtggtccggcccatcctggcgggcatggaaaagcaaaagcaattcatcaccaacgcggggcatgaactgaaaacgcctctttcgatcattcaatccaacaacgatgccgccacgctgatccatggcgaaaccaaatatagcaagaacatccggatgcagacacagcggctgaatctgctgatgacgaacctcttgaccctcgccaagctggatgaggaaacgaagctgcccacagaaacggtgaacatcagcgagttgacaggcggaatgctggcgacctacgaggattccctggcgcaaaagcaaatcgcgctatccacaaaggtgcaggagggcgtctttctgcaagtacacagggataccttttcgcaaatgatctcgattttgctggacaacgcggccaaatacaccccggcgggcggcgaaatgcaattctccctggcggaagagggcggccatgtgaaaattgtggaagaaaatacgtgcgcgccccttgctgccgatccggagcgcctctttgagcggttttaccggggagatggcgccagaacgcaaagcgatccctcttccggatatggaattgggctttccgccgcccgcgccatcgcggaaacctttggcgggacgctggcagcggagtatccagccgcgggaaaaattcgctttaccgcgcgattttgatgagatttcatagattgttcacagacccttccgcaggcgttcataagcggaggggtttttctaatgccggtcataggtttgctgattataatgcgcacagaaaggaggagagccgattgcagtttagacatgaggtaaagcataagatcagcaacctggatatgctgatcctgcggcaaaggctgggggccgtgatggcgccggattgccacgcgccaaacggagaatatgaagttcgcagcctgtattttgacaatctggaggataaggcgctgcgggaaaagctggatggcgtgtatgtgcgggagaaataccgcattcgcctatataacaacgatccatccgtcatccatttggagcggaagttcaaacggggcgcgcttggccataaggattcggctttgctgacgccggaacaggcccggcgaattgccggcggcgacgtccgctggatggcggaaagcgcgaacaacgtgattttggggttctattccagaatttgcagcgaggggttggcggcaaaggccattgtagactacacgcgcaaagcctttgtgtttagccccggcaatgtgcgcgtgacgctggattcccatatccgcacggcgctgcgcagcaccgattttctcaatccccattgcgccaccgttcccgttccggattcgccctgcattctggaagtgaaatgggacaattacctgcccgatgccattcgtgatatggtgcaattgggggacaggtgcagcagcgcgtattccaaatacgccgcctgccggatgtatgattaaagaatgaaatggaaggagaaaaccttcgatgacgtttagcgatatcttcaaatcgagttttttggaaaatgtttcttctatcagcgtgcttgacatggttttgaccatcgttctgtcctttggcataggggtattcatttttttgatttacaaaaagacctaccggggcgtgatgtattccgcgggctttggcaccactttgatcgcgctgaccatgatcacggccaccgtcattctcgcggtaacttccaatgtcgtgctgtccctcggcatggtgggcgcgctgtccattgtgcgcttccgcaccgcaatcaaagacccgctggacattgcctttttgttctggtccattggcgcggggatcatcttggcggcaggcatgattcctctggccatcattggcagcgtatgcatcggcatcattttgctgctgttcgtgaacaaaacgtccaatgcgcatccctatatggtggtgctcagctgcgccgatcacgatgcggaagtgaaggcaaaggagtttctcgataaaaacgctacccgcacgaccgtgaagagcaaatccgccgttaaaggagccatcgaattgaacgttgaggtgcggctgaaaaaggatgacacggattttatcaacatcctttccgaaatgccgggcgttaacagcgcggtgatcgtttcgtacaacggcgaatatatggggtaaactatgtcgggaagcaaatattttgagcgggttgcatggagtatcaccgcgctggtcctggccgtcaccattctgtttatgaatgggaattggattggtatcgcggcaatggaacgcaccatgggctacgagagcagattgttcgacgccacaaaggtccattccatcgatattgtgatggacgactgggatacattcattgccaatgccaccagtgaagaatattatgcggccaatgtggtgatcgacggcgaagcctataaaaacgtgggcattcgggcaaagggcaacacctccctgtccacggtggcctcgctcggcagcgagcgctacagttttaagattgagttcgaccattacgacagcaccaaatcgtattatgggctggataagctgagcctgaacaacttgattcaggattccaccatgatgaaggactatctggtctataccatgatgaacgaattcggggtgaattcgtccttgtgcagctacgtttatatcacggtcaacggcgaggactggggactgtacgtggccgtggaaggcgtggaagaagcatttttggagcgcaactacggctcgaactatggcgaactgtataagccggacagcatgagctttggcggcgggcgcggcaacggcggggactttgacataaacgatttgggttttgactttggcggaaattcgcaggacgcttccgcatcgggcgatgccgccggcgaatgggatccttccgcgatttttggcggcggccagccacccaatatgccttcggatatgccttcttttgagggaagtgaaacgggcgatggcgacagccccgccggtattcccgaagatttcgatccttctgagatgtttggcggcggtgggttcagctttggcatggggtcttccgatgtgaagctgcaatacatcgatgatgaactggatagctattccaacatttggaacaacgccaaaacggatattaccgaagcggaccagcaccgcttgattgcgtcgctgaaaaagctgtcggccaacgaagagatagaatccgtcgtggatgtcgaacaggtgattcgctattttgtggtgcacaactatgtttgcaacgacgacagctatacgggcatgatggtccacaactactatctctacgaaaaagatgggcagcttgccatgatcccgtgggattataacctcagctttggcacgtttagcgccatgaacgctacgagtacggtcaacacaccgatcgattccccggtgtctggcggatcttccgacaggccgatgctgaattggatttttgaggatgaagaatatacggcgctgtatcaccagtattttgcggagtttttgagcagcgtggatattcagggtatcatcgacgacgcgtacaatctgataaagtcctacgtggcaaaagaccccacggctttctacacctatgaggaattcgaattgggtgtggaaacccttcgccaattttgcagcatgcgcagcgaaagcatttccctgcagttggaaaatggggaaaccacggagaatatgagctatgtggatgcttcgggcattacgctttccgatatgggctccatgagcggcatgggcggctttggcggcgataggcccagcatgccgggcggcatggaaggatttgacggcgcggactttggcaacgccccggggactgaggttcctgacaatgccagtgcgcaggcggcggggcagaatggaacggcaaccagtgagccttccacggatgcggcggatgccgcgccccaggaggctggggaggatgcagcccaggatgagccggccgcgtccgcgggaaacgcgccggatggtttcgatttttccggtctaccggaagattttgatccatccagtcttccggaggaattttcggggggattttccgcgccgccttccagcgagcaaaccgaaacgacgcccgctgcggattccgccacggcggaagacgccggcgccagccgtccttccggcggcggggcgcagggaccggatggagcgttccgctcaaactggacggggacttcttcttcctcgcaggaagggtggatttggattggagcttcggccgccattctggctataggcttgatcatcgccaagaaatacaaaagttgatgggatgacagaaggttgggccgttggcatagtttgccagcggcccaatttttctccgcagagcaacttttgcgccgcgcgcaacgggaaattcgttgatttcccgggcgaaatgcggtacaatggcacatggggtgtgatatatggtacgaatgatagcgttggatctggacaatacattgctcacccgcgagggcacgctttccgcgcgcacgctcgccgcgctgcgcgaggccatggcgcggggcgtgctggtggtgctggccagcgggcgcatggtggaggccatgcgcgatttggcggaggaaatcccggtgaacgcgccgcttatcgccttcaatggcgcgctggcctgggatttgcgggagggacgtgcggcggcacggttcccacttgcgtgcgaggacgcgaaggcgatctgccgcatggccgaagaacgcggactgcacattcaggcctatccggacggcggttatttctatgagcgggcgaacgaattttcccgttattacgaagaaaagctgcactatccgggcaaggcgctgggcattaagatgagcgagtacatcaccacggacgtgaacaagctgctcatcgtggcgccggaagaggcgtgtagccaggcgattcccgaatttcagcgcgcgtttgagggcaaagcgtcgttcttccgctcgcggccggtatacatcgaaatcgtgcatccctcggtgaacaaggggcgcgcgcttgaggcgctggctcgctcgctgaacgtgccgcgcgagcaggtgatcgcctttggcgatgaggacaacgacctatccatgttggaatacgctggcgtggggtacgccatggacaacgccaagccggaattcaaggcgaaggccgataaaatcgccccgcacttcgcgcaggacggcgtggcgcaggtgatagaacaactcatccgggagggggagatggattggtaaattcttacgacttggtgcgcgcgctcaagctcgatattttggtgaaatccaaaacgccgaccttgaacatcgaaacgcccgaagtcaaccggccagggctgcaattggccggatactgggattatttcgcctatgagcggccgcagctgctgggcaaggcggaaacttcttatttggaaatgctgccctgcgaggagcggcaggcgcgcatcgcgaagctgctctccttcgatttgccgtgcgtgatcatttgccggcatttggaatgcttcccggagatgctcaccatcgcgcaggaacgcggcattccgatttaccgcacggatcagagcaccaccaaggcgcaaatcgctctgatttcctttttgaacaattacctcgctccgcaccagacctgccacggcgggctggtggacatcgctggcgtgggcctgctcatcacgggggacagcggcgtgggcaagagcgaaaccgcgctggagctgatcaagcgcgggcaccggttggtggcggacgacgtggtgaatatccgccgcgtgagcgacaaccgcctggtgggcgaagcgccggaaatgatccgccactttatggaaatccgtggcatcggaatcatcgatatcgccaccatgtatggcgtgggcgcgatcatccgctcgaaatccatcgatatgaacgtgcacctcgaattgtggcagcagggcaaggaatatgaccggctgggcctcaacgaggtaacgactaccatcctgggcgtggaagtgcccaagctggtgatccccatccacccgggacgcaatctggccatcgtgatggaagtggccgcgcgcaacctgcgcctgaagcagatgggatacaacgcggcgcaggaaatcgataagcggctgggcgcgcggctcgcgcgcgcggaaaatgaaagcgaacaatgaataaaggagaatgagaacatgctgtacgtaggcatcgatctgggcggcaccggcatcaaggccggtctggtgaacgaagagggaaccatcgtcgcgcgcgcggagtgccccacgggcgtggagcgcgggcacgaagcagtgatcgcggatatggccaagctggcgctggacgtgatcgccaagggcggcgctacgctggacgaggtgaaggctgtgggcatcggcctgcccggcatccaggatccgcgcacgggacatgtgccgttttgcaccaatttgtactggcacgatgtgccggtggtggaactgatgcaaaaggtcatcgataagcccatttacattggcaacgacgcgacagtcgcgggcctggcggaatcggtggcaggcgtgtccaagggctacgccacttccgtgttcatcacgctgggcacgggcgtgggcggcggcatcgtgatcgatggcaagccctattccggccccaatggcgtgggcagcgaaatcggccacatgatcgtgatgatcgacggcgaaccctgcacctgcggcaaccgcggctgctgggagcgctacgcgagcgctacggccatcatccgcatgggccgcgaatccgcgcagctccatccggacggggccatcgcccgcgcggtgggcggcgatctgggcaaaatcaccgccaagaccgtcatggatctcgccaaagagggcgatcctcaggccaaggagatctttgataagtacgtgtactatctgtgcgtgggcatcgtgaatttgatcaactgcatcgatcccgaggtcatcgcgctgggcggcggcgtgtccaaggcgggggatttcctgctgaacgcggtgcgcgccaagctgccggagatgatcttctacaagaccatgccttacgcgcgcatcgagcttgccaccctgggcaacgatgcgggcatcatcggcgcggcaatgctgggccgctaatatgctgtattttgccacggtgcccgccgggctggaaccgctcgcgcgagaagcgctgccccgcggcgcgaaactgcttcacgcgggcggcggcgcggctctgatggaactgaaaacgccgcccaaggcgtggcccgcgctgtataccaacgtgtttttggtgctctgccaggcaaaaacgcgcgaatttggcgcgctgctgcgcgtggcggaagccacggcgagtaccgcgtttttcgcctatacccacccgaaccagacctttcgcgtgcgtttttcgcaaaatggccggctggtaaacgttgcaggcgcggagatggcgcgcgcggaaaacctcgtaaagcgcgcggggcggctgcgggtgaaccgcgtgaagagcgatttggaattttggtatcttttgcggcaggatggcagcgctctttatggcctgttgctctcccgcccgaaaccgcagggggaaaagggcgcgctgcatcctgaattggcctatggtatggcgctgcttgcgcagattcggccgggggagatggtgcttgatcccttcgcaggttcaggcgcggtgggcgaggccgtgaaacactttggcgcgaagccgcttttgagcgatattgcgcccaagccgggcattgcggcgtgtgacgcgcgcgatctcgtgcaaatcagggacggctccatcgaccgcatcgttaccgatccgccctggggcatctatgaaaagtgcgatgtgaacgcgttgtatcgcgccgcgtttgccgagttccgccgcgtgctcaagccttcgggcgcggtcgtgctgcttaccgccgcggcgcgcgaagcggaaaccgccatggtcgaggcggggtttgcccatgaaaagacgctgcgcgtgctggtgaatggcaaaaaggccgtcttgacgcgctggcggccagcaattgcacaataagatttgtcccgcgaaaacgcattttcgcgggacgcgatatttatgcggagaggggattttcatgccggagtaccatgccatgcgcgccttagaactggtgcgcgaggcgcaaagcgggcgcgtttcagcgcaggaactggcggaatattttttgcggcgcattgagcactatgaccagtcgctcggcctgaatgcggtgggcgagctgaatccgcaggcgttggacgaagcgaaagcgctggaggaaaacgcatccccgcgcgattttccactcttcggcctgcccattttggtgaaggacaacatcgatgtagcgggcttgcacaccacggcaggtagccccgcgctggcggacaatttggcccggcgcgacgcgcccatcgtggcaaacctcaggcgtgcgggcgcggttgtgctgggcaaaacgcacatgacggaatttgccaattatacggcgctggatatgcccaatggctatagcgcgctcgcggggcaggtgcatagcgcgtatggcgcgcagtgcgatccgggcggttccagcacgggttcggcggtggccgtgtccgcggggttttgcgccgttgccatcggcacggataccagtttttctatcgtgggttgcgccgcagagcacggcattgtgggcttgaagcccgcctgcggcgcgctaatcagcgcgggcattgtgcccatttcgcgcacgctggatagcgcgggtcccatggcgcgcgatgtggccagcgcgcttgccgtctatgcagccatgcgcggcgtgcctgcgaccgattgcacgcccctcccggcgcgcggattgcgcctggccgtgaactgggcgggagaagaagccggctccgcgcagcggcagcgctacgcggagttgatagaggccttgcgcagcgcgggcgcgcaagtttgcgaaatcgagcagctgggcgacgagccgggcatggaagcgctcatgcaatgcgaatttcgggaggatttggaggcatatctggcggagcacgaagttgcttgcaaaacgctggcttccattgtacagttttatgaggcgcaccccgcaacctgcctgcgctatggcatgcactatttgcaggccgcgctggcggcggggcgcagcgaggcgcgttacgcccaagcacttgagcggcgcgcggccgcgcgggagcgtgttcttcaggaactcaaggatgtggacgcttgcctgatggcgggatggagcgacatcatgcattttgcggggctgccgagcatcgccctgccgctgggcatggcgcaggacggcacgccgcgcggcatgatcctctatggaacggacgagacgcgccttttgcgcgcggctctggccatggaaaccttcgccgggccaatcgcgccgccgcccgtgggttagggctatggattgccagcgtggttttgccggtattgcagcggtgtgacgcccgcgattttgcggaacgcgcgcaaaaaggtgctccagttgttgtatcccacctgctgggcaatggattggatgggttcgctggtttccgtcagcagatgcatggcgtggcgcacgcggatttcgttcaccagctcggaaaagcccttgcccacttcttctttgaacaggcgcgaaagatagtaataagatacgccgaaccgttctgccacgctatccaatcccagggaagagtccgcgtggttttcctgcagataatccagaatgcgcgccatcacccgctcgtttttgctctggttggcttccatgctgtccaggcagagctgcacatagagcacgcgcagcttatcgaaggcttcttccaaggaaaggtgttcgtgccccagcatggtgagcaggcgtatggcggcgctcatggaatctttgtgaatgtcatcgctgctgagcgctttgagcgcggtggcggcgagattgtattgtagacagcgcatcatctcgggaacgagggtgcgctgttcgtttttgtcgcggatttcctcgagcaaaagtacagtctgctccatttcccccgcgcgcaccgcggtgagaatctgcaattcgatttccgcgggatagtaaattgtgctcgcgtcggtgagcatatcgctgtattccagatagggagcgttttccgggcggaaatgcgcgcaagcggcgctggcctcgctaaagcaggtggacaattcccgcagcatgggataaacgcggctcacacccacggcaatgccgtgcccgcctgggttccactcggccaatttttgcgcaaacgcctgtggcactcgcggagaaaatgcggcgacatacaccatttgcgcgcccgaaaggcggtattccaacacgtgtagatctttgccccaatcgagcgcgggggaatgttccatggtcgccacggccacctgataaacggcctcttctgtggggagtccacatagctttgccgcgtctagacggcgctcttcgctcagacggttgctctgcgtaagcagttgaaagagcatgttttggcgcgtcgcctgatagtgctctttcaattcctgctgaaactggcggctgcgttcctgggtacgctgcacttcatcggtgatcaggcggtattcttcctggatgttgcgcggattggcggaggttccctgcgggaatgctttggccatcagggcgcgcacgggcgtatacaattgcttggccacgcgccgtgccagcaagaatcccacggcgaggctcacagccaatagcgcgaaccagatcgcccggaaactgcccagttggcgcagcactttggattctggcaagaaatagaggtatttcaggccggtggaggcgctatcggtgcaaaaggcgtggtagcgcaggccgttggctacggtttcccaatggtcaaggtcgcgcggctgccaggcgggattcgcgtccgttgtcgcggtgagtgtgttgccctgcgcgtcgagcagcacaaagcgcgcgtcttcgccaaaaacgcgcattacttgcgaaagcagggcggattcgttcaaaaaggtgatgaaatacgcccggctttcgatatagcccatggagagcgattgcacataggggatgacgcggctgctgccccggctggaagggctcgatagcacggcggggaaaaaggcgctttcttctaccgacactaccttttgatagaagctttccgcgctttcgcccgcgatagccaaatggttgttataatacaattcgctatctgcgcgtacgccgttggtggcgcagatttctccccgcttgggaaaatagatcgccgccatggaaaagacgttgtcataggattggatggcggccatgctggaggccagttgccggaagatttccgtcgcgtcctcataggaatcttccacctgcgcggccagcttttgcgcggcgcgcgattgcgaaaggtaaaaagcaaagttcatccgcgcgtataggtaggtgtccacctgctggctgatggtgtggctcaattgcgtgttcatttccaggtaatctgtatgcaccatggaaaacgtgctgctgtaaagtcccaaaaataagaaactcatgggaacgacgagcacggaaaacagagtgagcatcaaaagaaaaaacgaacgcttttgccgggcctgcatggatggtccccttcctgcgcgcgccagagaacgcgccttctatcctataaaagaattggatttttttgcggtttttcctgccgggagagcacttttcacaaaaattgccagtccacgcaaaatttgcaagtgcgtttttgcaaccaatgcctgccatggcaaggattcagacttgacgctctcttgggcgcgctgctatagtatacgcaagcatccggcgcgtagccggagaaaaagggaggagtctttctatgaagaagcgttttctcgcactgctgctttgcgttcttctgggcgcaatggccatctccacggcctcggcggagaccgaagacctgtatcccgatgagttgagcattctcgcgtggctgagcgagcacatttccaaagtaggcggaaccagcaacaacgacaactatgtgtaccagaccattgaagagtggaccggcacgcacgtcaattggatccatcccgccgcgggttcggattttgacatgcagatcaacctgctggtttcctccggcgacttgcccgatatgatcgtgcgcacgaattggaagggcatcaatggcggcctgcccatgtgggaagaggatggcgtgatcctcgacctcaccgagctgatgcccgaatacatgcccaactacatggcgctcatcgaagaacgcgacgccatgaattccctgatggtggatggtaagctgtatttcatttcggaaatcggcaacgcctccgcgtatcgcggcccgctgctgcgcggcgactggctcacggctcttggcctggaagcccccaccaccaccgatgaactgtacgacgtgctcaaggcgtttcagacgcaggaccccaatggcaacgatcaggcggatgaatgggccgtgagcggcggcgctttctcgctagacgccaactttggccttggccatctgctctggccctggggcatcacctatggctttatgcagatcgatggccgggtgacctatggccccatggagccggaattcacgccggccatggagtacatcgccaagctctatgccgaaggcatgatcgaccccgactattccacgcaggaccgcaacatgctggacggcaaattcatgaacaaccaggtgggctatgaatacggcatgcagcccagcaagatgaacaacgccatggaaggcacgggcttcgaggcgattggcattccgaacctgcgcacctcggaagacagcccggcgtatgtgtttggcgaggaatacgttgcctatgtgaactccaattgcgacctcgtgctcaccaccgcctgtgaggagccggaaaaggcgctgcgttggctggacaatttctttagcgaagagggcatccttctcaccaacttcggcatcgagggcaaatcctttgtgtacgatgagaacggcacgccggtgtacgatccttccggcgcgatagcggatcatccggaactggatgaaaccagctataaatatttctacacgctgatgagcatgtccgcgttccccaccgtgcaaaccaaggaagcgtattacgccaccctgcatccgctgagcgcggaagcgatttccggctggaacgagagcgcggatgtatcgcgcattatgcccaatatggcgttgaccgctgaggaatccgaggaaatcaacgacaagctggtggatatcgaaacctatatcgcggtggaatacgataagctcgtcaccgggcagacacccatcagcgagattcccaacattcagcagcggctgatcgaactgggcattgaggattgcatcgccgtgtatcagcaggcgtacgatcgctatctcggccaataagttttcctgggaacagggcatgcgggctgcggcgcacggcgcggcggcccgcgttttttcgaaaggaggggcctttccatgcaagtggcccgcacgggaaaccgcctccaaaccgcgctgaagcggcattggatggtgtatctcatggccgttccggtgatggcctattatatcgtattttgttacctgcccatgtttggcatcgtgattgcgtttcaggatttccgggtgacgcgcggctttttccgcagcgattgggtgggcctggaacactttgtggattattttgattccatttatgcctggcagaccatcagaaacacgctctccatcagtttgttggggctgattttcggctttcccgcgcccattctgctggcgctgatgctcaatgaggtaaaaaacgcgcgcttcaaaaagtcggtgcagacgattacttatatgccgcacttcatttccctggtggtgatttgcgcgttggtgcgcgatttttgctccacgcgcggtctgttcaacaccatacgcgggcaaatggggctgccgggcatccaattcctcacggatccgggatggttttatcccatttatatcatatcgggcatttggcagaatttgggctgggattcgattatttatctggcggccctgtcggccatcgatcctgagctatatgaggccgccacggtggatggcgccgggcgcatgcggcgcatctggcacatcacgctgccgggcatcgcgcccaccatcacgatccttttgattttgcgcattggttcgattatgtcggtgggatttgaaaaaatcatcctgctctatacgccgaccacctatgaaaccgccgacgtgatttccacctacgtgtaccggcgcggcctgatcgacggcgattattctttcgcctcggcggtgggactgatgaattccgtgatcaatttcattttgctcctggcggcagaccgcttcagcaaaagaattggccagcgcggtctgttctgaaagggggaaggacgctatggtagaatcccgttccgctggcgaccgcgcgtttcgcgcgatcaattacaccattctcacgctgatcctgctggtgacgttgtatccctgttggtatgtggtggtcgcgtccttcagcgacccggtgcagctttatggcggcagcaaaattctgctgtggccgcgcggcttttccctggccgcgtatgagatcattatggaacacaccatgctgtggaagagctacgccaacacgctgctatatgtgacgctttccacggttgtggggctggcgcttaccattttgggcagctatgtgctttcccggcgcgctttgcccggccagcgtgtgatgctcacgctgatcatgatcaccatgttcttcggtggcggcctgatccccacgtatttgattgtggtggaactggggctgatcgatagcatctggtccatggtgctccccagcgccatcagcacgtacaacctgatcatgatgctcacctatttccgcaccatgccgctcagcctggaagaatccgcgcgcatcgatggcgcgaacgacgccgtgattttaacgcgcatccttgtaccgctggccaagccggtgatcgcggtgatcgcgctgtatattattgtgggaagctggaacagctacatccccgcgaccatctatctgcgcgaccgcaacaaattccctttgcaggtgattttgcgcgaaattttgatttccggcacgtccaacctcgattcgctcacctccggttacgacgattttgccgcgtattcggaatccgtgaaatacaccacgatcattctttccaccctgccggtgatggtgctctacccgtttttgcaaaaattcttcgtgaagggcgttatgctcggcgcgatcaaaggttgaggggataaggaggaaaagccatgtttcaggtgcctgcattctggaaatccgatttgggcacggtcgagcgccttgcccagatgtgcggcgcgcgagagtttggccgctcggcggggggacgagcgctgttcgcctttgcgtttggcgagcgccaggtgagcgcgggcagcgccaattacagttccgcctgcggcgcgcacgataaaaaggcgtatttgtcccagccttcgcgcacgctgctgctcatcggcggcgagcacggccaggaaaccgagggaatcgccgcgcttaccgctctcatttctctgctacatagcggcagcgattttgtgggcggtgagaatcccgcgcttttatcggctgcccggcagatgcgcgtggtcatcgtgcccgtggccaatcccgatgggcgcgcgcgcgtgcagcccgcttccatgcttggcggcctgcaggacgatttgagctactggggcatgggcacgcataaggatggcacgctgtatcgctggccacagtgcaaatttgtgcatcccatgcggggcgatgtgggctttttgggcggatactataacgacgatggcatcaatctgatgcatgacaatttcttccaccccatggcgcgggaaacgcaggcgcttttggacttggcggaggaggaaaagcccgccattgcgctgcacctgcacggcggcaccaattccatcgccgatttgttgcagaccgcctacgtgccccgggaaagtggggaagccattcgtcgccttgccctgcgctgcgatgcggcggcacgccaggaaggcctgtatttcaccgtgcgcgatgttccggaaagggaaagcggcgatacgccgccctctttcaacttgcccagcgctatgcaccacgtgtgtggctgcgtgagcgcggtgttcgaaagcaacgagcacatttgcgatcagcccggggaaaagcagaaccatgcgcaggtgatgcgatcccatatgattttgtttgagcaagccatgcgcatgatcctggagggggattgttagcggctcgcttggctttatgcaattcggagtttatggaagctttgcgttcgtctaggcgcggggcttctattttttgtggttggcgccggtgaaaatggcgaaacgcggcttcgcaggaagagttttgccattttccttgcatattaagccaatttgtggtatccttatggagagagaaaaaaccgaacgtggttttgatataacaattggagataaggagagtgtatgaaagccatcattcttgcggcggggtacgccacgcggctttacccgctcacgaaagatacgcctaaggcgctgctgcctgtggctggacgcacgattctcga

SEQ ID NO: 903 - DNA, 2423 bp, Unknown
  16S sequences of unknown bacteria
caattttgcaacaaaaattcaaaaagaaaagggcgtttacaatgggttaaaaagcccctgtaaacgcccttttaacatgttcaaaatcaacggattacgggtgcgaatggagcagcgtgcaacgcttgcaacgcacccatttgttatgcgttcggaggcacgccgctggtgagtacttcagcttttccgcctgcgtcttcagcgccaatcacgtcctccaaaacgatctccccaatgtccgggttttgcagtcttttgatgaaatcgctggtataattggaacctcgggagacgacgataccggtgagcagcatacccaaccacggaaccgtgaaagagacgcccacaagggtgtatagatcgacccccgccgcaaagcagataaagaccgagagcaggatcgccgtcagctgcgtggcgaaggtcttgtactgctttttttccagcatttcaatgatggttttactgtactggataagtgcttcgaccgtgatagcaagcacaagaatcaaaacaatagtctgcatatgtatacctccacatgaaaaatatacaaagaaccgttatgcaactacgcgaacgtactctgcggagatccatccgtccaagccgtcggtctcgacaaaataccagccgtcacactcgtcaatgacctcgaacttttgcccagccttaacgctgtcaacctgtttgaaatcatcggtgcccggaccgctgcgcacgcggaggctgtccgcagtgaccgcaatgattttgcgccggatggcctgagccgcaggaagcatgagcttgtccgccatggtgaggacggctacctggtcgccgggcgtcatgggcccaatagagagcacattgtctgccacagtgcagccaagctgcagggacgcagccaggttctgcagcatcttcacatctcccgtgcttgcaggcccaatattgatgatgcacgcttcgctggaaagaggtttgatgcttacaggaccgtatgttccgacgcggttttcacagccgcagtagggtgctggattgatggcggccgaggatctccgtgccgtccgtacctcaaagtgacagtgtttgtagcctccggcagcattgcccgtattgcccatgatcccaatcgcagcgccagcattgacgctttgtccggtcctcaccaccggggcctgtgccatgtgacagtagtaatagaagcggccgtcattgccctgaatacagacgtagtagccccactcccacgtcctgtccgtcttgtttgtaacaatgccggagaagaccacgatccctgcgactaccgcccggatcatgctgctgtcaactcccacaacatcaataccgccgtgccatgttttgccgctgttccgggtgtatccgaagcgcccgtaactataagcaatttggtttcttccttcaaaaattgtcatgctgcacctccagatataatagggcttcggcgctgcatccagcgcagcgccttgcgtaattcgtttaattcattgtgtacatagatgcgggctgtgacttccacgtccttatgcccgagaatttttgcgatactgtaaatatccacgccatggcggcgcagataggttccatgtgtgtgccgcagctcgtgggctgtaaggcgcggcatgtttttatgcctttgtgccatccggtccatttccgtcttgagcctgcggctccaggtgtccgggcgcatcaacccgccatccgggcccggaatcagatatggactgtctggatatcgctgccgcagcagttccacagcttgcagagcgcggtccgtcagaggatttgtgcgataactcaaagacttcggcgcggctgtctccggggcttgtccgcgtggttttcgcacggtgcgggcgacgctgtaaacatgccgtctggtgtcgaaatccgacttgaaaaaacccagtagttcgccccggcgcacgccggtttccaaagccaggaccacctccggcatggtctgaaggaaccaagcggaggcgatctcgatttctgcatttgaaaacacctccttgacgcgcggtgtagctgtgctctcgatttttaccttgtgggccggattatgctcgcacaggccattctcgaccgcggtatcaaatatcccgttgaggcacattttaattttgctgcagacagactttgacaggtgagatacactgttatagaatgccttgatgtccatgggggttatatccatcatgacgcagctccccagtgccgggagaatgtgccgccgcactgttatctcataagtagtcgtataagcggtgggcgtgacatccggcttcttatacacgtttagccatcgggcggcccaaccgcccaaggtgagtatgtcggcctgtttctctggtgtgccatggctttccagccagtgctctgcccgagcctttgcctgggctttggaa

SEQ ID NO: 904 - DNA, 32759 bp, Unknown
  16S sequences of unknown bacteria
ctgcctgcctgcctgcctgcctgcctgcctgcctgcctgcctgcctgcctgcctgaagcatagacgcaatcgcgttcattgtcaagccctccccggcgttctttccggtaaaattttcaatattattataccaaaatttccaccctgccgcaagagcgcctacggtaaatttccgcgcgcattttttgcgcctttcaaacacgtcgctgcggacagaaatctgctgcacgataagcgaaaatcatcgcaatatattgcgttgcgaatcgatgcttgcggagtacaacactctgtgttatactggaatagtaaattgtaaaaggcagtttcttattatttctaaccccatttgcgcggtgcgcacaaaatacaaggaggcggctatgaatcaacgattgaaagacgtgctttcggggcaggaaagcaactacatgatgccatttttttggatgcaagatggaaaacatgcggatttgcgcacacgcgtgacggaagtggcgcagagcgggtgccgcgcgttctgcgtggaatcgcgcacgcacgaggatttctgcggcaaaacctggtgggaagacatggacgttttgttggacgaggcagaaaagcacggcatgcgggtgtgggtgctggacgataagcattttcccaccggcatggccaatgggctgattcaggcaaagtatccacagcgccgcaaatggcacttgcgcgaataccatgtggatgtgtatgggccgatgcaaggagctacgcttttcttgcgcaaagcgccagaagaggacgaatttctcggcgcttacgcctatcgccgcacagagcggggagaagcactcacgggagaatggctcaatgtgacagaaaaggtttcggcaggccgtctgcgctttgatgtgccggaaggcgtgtggcgcgtgttcttttattacaaaacgcgcacgggtgttttccgcggtcaggaatactatttccatcccatcgacgcggaaagcgtgtccacattgatcgaagccgtttatgagccgcattgggagcactacaagcggtattttggcaataccttcgcaggcttcttttccgatgaaccgcagttggggaatgattgtatgcaagattggtccggcgacagaaccacgcggtacaaccgccagatcggcatgcctggtttggcgcttccctggagcgatgcgttgctaaaagacatgcaaagcgccctagacggaaaagcgacgtccctattggcggcgctatggtatcccatgggagatattcacacaaaggtgcgctatgcctatatggacgccttgactcgcttgtggcgcgcgtctttttccgagcagttgggcaaatggtgcgaagcgcatggcgtggaatacattggccatatcatcgaagacatgaacgcccacgcgcgcatggcgtattccgccgggcactatttccgcgcgctggatggacagcacatggcgggcatcgatgtagtgctgcaccagatcgtgccaggcatggctgcttgcccgcacacggcttcgattgagggcggcatcgcagatccagcatttttcgacaatgtgctggccaagctggctgcctcgcacgcgcatatccagccgcatatgaagggccgcgcgatgtgcgaagtgtttggcgcgtatggctgggccgaaggcgcgcccatgatgaagggcctgctggatcatatgctggtgcgcggcatcaaccattttgtgccgcacgcgttttctcccgtctttcccaatccggattgcccgccacactttggcgcagaggggcgggatccgcagttttctggttttaccaagctcatgcgatatggcaatcaagtgagccaccttttgtgcggcgccaagcacgaagcggatgtagccatcgtgtaccatgcggaactggaatggtgcaacggcgcgtccagcatgctcacgcaggttcccgcgaaaattctctatgaacagcagatcgatttcgatatcctgccttttgatgcgctcgcctccgccaacgtggaagacggccttttgcgcgtaaatgaggaaacttataaggctctgctcgtgcctggttgcgctgcgctgcccgaagcgttgctcgccattttgcaacggctggaaaatgctggcttaccggtctggttcgtggaagagcgccccaaagaagcggattttggccgcgtcgtttcgcaggcgtgcctcgcggaagaagcaaagaaatttgccactgtgcatattgcgccggcaaacccgctcttgcgcgtgtaccgcgcacagcgggaagcggactggatttacatgctggtgaatgaatccaccgtccattgctacgaaggggaaatcacggttccagaggcgcgggaatgcctcaagttggatctgctgttggatcgcaggagcaagttgcgcgtacacgacggaaaagtttccctttccctcgcgcccgggcaatcgaccctcttgattttgggtgcggatctgccgcaggcgcaggaggaagcgccgtttgcggcgcgcgtgcctttcgcgccggaatgggatattgcgctggctgaagccgggcatgagggggaattcacaccgcttgcccgttccagcgcattggcggatatcgcggaagcggaagaatatgcttcctttgccggttggatgcgctatcgcgcgcatttcacgctctcggaagaagaagccggcaaaatccgcgcgctgtccctgggcgaggttggcatgaccgcgcgcgttcgcgtgaacgaaaaagaattgggcgaacggatttgcacgccctatctctttgatgtaagcggcgctttgattgcaggggagaacaccatggagattgtcgtcgccaatacgctggcgggcgctgtgcgcgatcctttttctacgtttttgcaaattccgcgttcgggcttgctcgggccggtggaatggatttattagagcaaaaatctgcgcaatgcgagcgcgtttccgtgctcgcattgcgcatttgaacaggcatcagcagtcccactggtactttttcaaatccacatgcgtggcgtccttcataaacacgccttcggcccgcagcaaatcggcctgctgcggccaatggggcgctaggcggcctatatggtttaccaccctgtggcagggatacgcgccataatattgcgataggctcagcacttttcccaccaaccgcgcgtttttctcccggccaatgagccgggcaatttgcccgtaggtcgccacttttccttccggaatttctcccacggcggaaagaatttcgtaagccaaacgttcgtccatgaattttccctcacaaatccggttgcgcaaacaggcggcggaaatccagcggcgtgacgctattcaccgcgcggaaacgccggatgaaatagctgctggtggaaaatcccgtttccagcgcaatttccgtgacgttcatatcggtcgaagcgagcagcatctccgcttttttcacgcgtacaaaattgagatactccgaaaaagtgcgctgcgcgcattgccggaaaaagcgggaaaacgcgtaatagctcatgccgcacaagcgcgcgcagtcttgcaaggaaatgtcttgcgcgtaatgttcttccacataatcaaatacggttttgagccgggccatatcgcgctcgttcagcgcatacgcttcgtgcgcgcggcctgtgtccccgtgccaatggcgcaaaatccatagggtcaagcggcaaatgtccgtccggatggcgagttcaaagccgaaatcccggttttgcgcttcgcggagaatgtcgcgcaccaggtcgggcacttcgcaactggcgagcacatcgccggggaaaaagcgcggcaagttgtgcgcgggtaaacgaaaggaaagcagatatttcagctcaaaaaccgtgctatccgccgcctgcaccagttccggctcgaatttgatgacgatataccggtttgtgccttccgccagcgcaaatacctggtgcacttcgtgcgcgtggatcaagaccatgtctccggcggaaaatgtaatgctgttttcgttggtctggagcgtatatcgtccctccagaccatacaaaatttcgatatacgcatgcacatgcgcgtgcgccataactcccgggcccgcatgcgcctgtgcatggcaatcgtaaggaatatacacgccgtcgatctgcttcttgggttcgttgaaaacttcgctcatattcgtcctctcggcaaaaaaatgctattttttcgcaagggtattatatcaccacgggccagagttgtgctatagttgcgatagaaattaactttggggaggtatgttggctatggaaagaaaattgcgcatcggcatcattggcacgggcggtatcgcgcattcgcacatgcgcagctatttgcagatggacgacgtagaaatcgttggcgcgagcgacatcgtgccgggcaaggcgcgcgcatttttggatgaattcgaattgaacgatgttcctgcgtttgaaaacaatgcagaacttttgaagctggatttggacggcgtttctgtttgtacgtataacactacgcaccatatttgcgcctgcgaggccatggaagccggcgtcaatgtgctgtgcgaaaagcccatgtccgtaacgctgggacaggccgtggaaatggcgcgcacgcagaaaaagacgggcaaaatcctcacgattggtttccagccgcgctatggcgcgaatatgcgcatggtgaaagagctagtacgctctggcgaactgggtcgcgtgtattatgtgcaaaccggcggcggtcgccgccgtggcatccccggcggcacgtttgtggacaaaaagctggcgggcgttggttgcctggcggatattggttgctatgcgctggacatggcgctcaacaccgtgggctataagcgcccggtgacggtttcggcctacagttcggatttctttggcaaaaaccccaagtattataacaaaggcccgttcgatgtggacgatttttcctgcgcgctggtgcgctttgaggacgacatggtgctggatttccgcatgagctgggccatgcacatggacacaatgggcgatatgttgttcctgggcaccgaggccggcctcaaggtcaagtctcccaacccgcacctgaattggggcggcgcatgggatggcggcattggcgaggtctacatgtatcgcgatatcggcgataatcaagtggaaatccacattcccaagaagatggaggacgataagaagggcttcttcttcctcaagtgccgcgatttctgcaacgccattttgaacaacggcccttcgccgattccgtggcaggaaatcatttataaccaggcgattattgacggtatcattcgttccagcgcagcaaagagcgaagtgcgcgtggaaattccggaaatctaaggagggcaacgccatgttgaatgttgcgatgatcagtcgctggcacgtgcatgcggcgggctacgcgaagatgatccaggaagcaaaagacgcccaaatcacctgcgtgtgggatgagcaacccgagcgcggccaagcttgggcgcaagaactgggcgttccgttcgtggcggactatggcgcgctgctcgcgcgcagcgatgtggacgcggtactcatcgattcgcccaccaacatgcacaaggatttgatggtgcgggcggcacaggccaaaaagcacatttttacggaaaaatgcatgtgccttaccacggcggattgcgatgaagtgattcgggccgtgaaggaaaacggcgtgattttcaccatttctttcccgcagcgctgcgaaagccgcaatctctttatcaaaaacgccattgaaagcggtatgttgggcgatattacgctgctgcgcgtgcgcaattgccacgatggcgctctgcgcggctggctgccggactactggtacgatccggaaaccacgggcggcggcgcaatgatggatttgggcgcgcatccgatgtacctcgcgcgctggatgctgggcgcgcccaagcgcatccagtccatgttcaacgaccgcaccggccatccggtggaagacaattctgtgtccaccattgaattcgccaacaaagccatcgccatctccgaaaccagcctggtttcgcccatgacgccgcagatctttgaggtgtatggcaccaagggcgtgattttggcagtggacaaaaacattcgtatgatgacggaaaagacccgcgatttggtggagggcggttggattgtgcccaagctgccggaggcgcttccgcatcccattcgccagtggatcgatagcgtgctctatggcgcgccggtgcgctttggtctggaagaagggcggcagctcaccgaattgatggaaaaagcctatatcgcgcatagggaaaagcgcgaagtggaattttagacggcacaaaaagcccgcgcgggaaatggcatcctgcgcgggctttctttgctttggctcgccaaaaagaacgcccagccgtcataccggccgggcgttcttggagattttttatggaagcacgttgaaaatgtcttccgctcccaactgcgaatcatcaaaaggaacctgcgtgggcgcggcggtgggcgtagccgtcggtgcggccgtgggggccgtcgtcggtgtggccgtggggaagagggaatcgccgcttccggcattcaagccatccgtattggtggtggcgttttcatccaccggcccaaaattggcgtccgcatccgtaaaggaatcgtcgaacccatcgttatccagcgaaggcaggccgtcatccgctggcgtcgcttctggttcaggcaggagccattcggcaaactcgggcgatatgctgttgatcacgccgcgcaaaccagtgaggcggataattccttggccttccagcatgcgcagtgcaacaaagagcagtgccagcacgagaacgacgatcaaaacgccttttatgatattcaaaatgcgtttcccaatggacggctcatcatcgtcatcgtcgtcgtcatagtcctcgtcatagtcctcgtcgtcgtagtcgtcttcctcgccgtcaaacgcctcgtcctcatcgtcttcctcgtcataatcgcggacaggcgtcttttttccccccttgccacgcttggcgggtgctttttcctccggctcatcgtcaaaatcgtcgaagttatcgaaatcgtcaaaatcatcaaaatcgtcttcgaccgcctttttgcctttgacggccttttcctttttggccagcttttgcttgcgaggcaaaatttcttcttcgtcctcgtcttcatagcggtcggtgcgagcggtagcagaagacgcttcccgaacaggccggtacacctgcgtaggcgattcctcagaatcgtttttttgctcaatcatgcggcgctcgcgccgggacaaagtagggctcgacattccttcagccaacagctgggacaactcggcagggcttttggaattttgctcaggcatactatgacctccctcaaattttgcggcattttctgcgttattggggatatcctgcggcgtctctggttctgtttccggcctaccgtatcgcatgcgaagcttttgggtttgcgatatagaagcggaagaggcgttgagcgcctgggaaatatccttggcctggagccgggccgtcgcattgcgcgggggaaacgtttcgtcttgctccgaatcttccatccattcttcgtcttcgctctcgctttcctctggatggcggcgattgcggcggaggagggaaagtttttccttcaccagtccaacagcccgaaaaagcgaatcgaacggattgggttcgcggtcgtcggccgccaactcttcctctgttaaaaattcttcgccagctttttcgatgggtgccgtgttgaacagcgccttttcttctcccataaaaatctcgggaatctcgggagaagcgggctcaggcttaggggctggctcagcggtatcgccgcttgcgtccggcgcgctttccccatcagacggcgacgcatccgtatcgctttctgaggccggggcaggcgcttcaggcgcaagatatccctccgttgcagcgtcttccagaggggaatccaccttcgcatcttctggcggcggttgccgcgagggtacgggggctggcctttggtggctgtcttccacgttgcggcgcacgtcagcgaaggttttcaaccattcatcgtgcttgcgcttgaattcataataatccatgcgcggttcatcgcgcgtattgcttgccatagcaacgaccgtccttcgtattcctatgaatttcagaatcattataccacacattcgcagaattgcaagtcttttgtcatcaattcgcaaaatttcacgttctggcatatggctgtatggaaggagaattccgcgaggagggagaacatgtattccatcaaaaatctgctgcaaagcgcgcaattgcgccaggcgctgacgcgcaaggctccaaatgccgttagcgcggcgcctacgccctggattgccggagctacgtttatgggaaaagccccatcacaagctgccacacaaatgcaatatgttgccgcaaactctatacatagtagtcccaatatggcacagcaaacggcagtgcaacaagccgccgtacccatgccttggggcgcagtggcgcagccctctgttgcgccgccgggaaatccggcagggcaaccgaccatggtgatggcgccgcaatctataccacaacaggcggccgcgccgcaaaccatgccacagcaggcgcccctgccagcgatgcagattccgccgcagattccgccccaattgcccacacccgtggtgaaaagcggttccatttaccgcgacctgatgaaaaagcacgatcgctttacgcagcgtcatcttgaacccgcggtcacatatgataaagtaaaggggggagcgtatgattcgaaatgattaccgccgcgcgttgattatgctgcgcgcgctggaaaagggctattctgggcatgtgcgcctagaacggcgaacgctgcgaggcaacatgcaattcagcatcaccgcgccgtctggcggcgaactgcacgccgccattctggcgcgcaagccgggtacatatgcggcggaagaccttggcgctttggggcgcgatggacgtggccaagcgggcctaaacgcgacttttgatccgcgaaatattctcggcaacgacttggatgaatgcccgctcgtcgctgtcgcgctcgttgctccgccagaagtgcgcattgttctcacaggcaatttgaacggctcgtgcgaaatcgattggatgcagttgcgcgatgcgataacgcgtttgtacgctaccgagcgccaagcgtcagaaggcgagcaactttccgctccgcaacccattccggacgcaggcagcgcagaagcaaaagaaatggagcaagcaccatccgttgcgccagaagcacaagaagaaacgcaggaaacctcggaagaggcggaagagaatggaatggtatcgccaaaaacaacgacatcgcttgaaggggaagcgcaagcggaacaagcgcccgagccggtagcggaagaaagttcgccagaaagcgccgcagagagtgaaaaaagcacgccatccgcgagcacggggccgtataattgttcggaaacctgtgagcaaaaggcgcgccaagcacaagccgacgcttccgacgcagtgcgcattgaggtgcgcacattggccgttccgcttacagacgtcgaacgagccgccttgcaggaaacgtccaccaatgcggcgcacacagagcagtccgcggaaatcgaaagcgcgaaggagctagcggttcctcttgatgccacagaagaaataggacagacgccaagtccgctcaccgaagaagagcaaatggcagctatgccgttggttgccagcgaagatgaaatggacgaagcggcggaagaacccaccgcagagctgacggaagaatctccagcagaagcctcagaggaaaaaagccctgacgcaggagaggaagtcgcgatccccgagggctatggcccctacccagaggaatccttcctaaattccatcgctggcatggaagagaacgcgccagagcaagcgatggaagaaacggaaacgcaggcggcgaaagaactcaattttgatgcggcctggccgcccttggctgccgaattaaaagaattgttcctgaacaggccgtgcgtccagccgtttccggctactggttgcttatttgtgcgtgcgcctatgagcccagaaagcggttatgcggattgcattgtgggtttgaaaccggaaaatggcattccgtcggtgattatctatgcgctggaaggcgaatatgctctggagcctccgccaggcctcgagggatatgtttggcgcgcgggagagaatgctgggtattggaccacttggttggatgcgcaaaccggcgaacagatcgacgctgaaaatgcataggctgcgaatgaacgcgcatatggtatacaagatgcgatgagggagggatgcgttttggcgctttctttggtacggcaaggcatcgaaacggagagtctgattggctcggaggatacgcaggtacttctgcgagcggaagcaatggtgagcggggcaggccgcgaagcagtaaagattctgatggcggacgcatacctcgccctcggcgccgtggaagtgcaggcggatcgcgtcgtgctggacggcaccgtttatgcgcaggcggcataccgcctgggcgatgaggcatctgttcgcgctcttacagcccagacgacgctcaaccacgcggtggatatggatggcgcgatggcgaaaatgatcgcccgggccgaaggtgtggtggagcatgtggatgcatcctatgaaaacgggcacatgatctttcgcattgctgtccggctgcgcgtgaaggtgctgaatctttcgccagtggaagtgatcaaccagatttctggcgtaaacggactggaggtgaaattcgcagagatctgctccaacaagctcagcgcggaagcgaatgcggaggcgcttttgcgcgaagccgtaactttgcccgcggcactagacgcgcgttgcgcgttgatggattggttttccacacaaatcgaggacgtttcgcgggatttgggcggcgtgcgggtgacgggaaaagtgctggtggaagcgctcattgccagcggcgtcgccgggcggcccgtggcgctggtgaagtacgccatgccattcgatcagttggtggaattgcccgattggctcaccgaagacgtgaatgcagcggtggaggttaagcggctcattagccaagtcgacgaaggcgggcaaaacgattcgacgctcaagttggaggcggagctggcggtgcatgtctacgccatgggcaaagattgcgccacggctttggtcgacgcgtataccacctcggatgcgggaatccacatcgaacaacaggaaattgaattgttattgggcatcaatcgcgtggcctgccacgatagctataagagcaccatgctcttgcccgctggcgctccaggagtgggcgccgtgctggcgacgcgcgccattccaacgttgagcggctttgaatccttggatgggcataccgtatttgaaggcattttggaggccactgcgctgtacatgccagccggttccgataagctgtgcgccgccacggcagagttgcccttttccttgcattgccagggcgaattgccgcaagatgcctggatcaatgtgcgcgtaaccaacgctgaggctagcacgttgatgagcgaccgcctagaattgcgcgccacgttggaactcgatggggaatcgcgcatcacgcaaaaagtgaccatcgcccaggacgttacggaaacggaagctcccgcgcgcaaaaccggcatcgtcatcgtgtggccgacggcagacgacgacctatggagcattggcaagcgctataggattgccagcgacgccatccgggaaatgaatggcggaggtgagacggaagcgggaaaggcgattgtcgcgcggctatgattcgctaggaaccatttctattgtaaaatggcttgaaaaggggtttgtacgtttttcgtgcaaacccctttaaaactttacgcaaatatttcaccatcccattgattgacaaaaaagtgcaggcgtgatagactaagaaatggaagggagggaaacacgtgctgacaaagctaaaagatttttttatcattccttcagcgatacaatcggagtttcagcaggattccttgcagaaaaacaagctttccctgtggctcatcagcataatgattttcggcatggaactttttaaccttgcgcgcgttctttttttcagccaatccgggctggggacattgaacaacctcatttatttttccatgtattgcgttctcctgctgggagctgctttttcccttcttctgcaatacaagttgcgcacagcatcggtacgggcgcaatatggggtgcagattggttcggtggctttctttttcctttggcacattctgctcaatgtttatgatcttatacgggatccccaagccgaaagctatgtgttcatcagtgcgctggtgggactagcgatgttcattcaaatgcccgggaaatggagcgcaatcttttttggtgcgggatacgcgttgtttatggcgctatccggttccatgctggacggcggaacggtcattaacctcaccattatgacttgcgttgctatggccattaccattacgcgtagccaccatacggcgatagaattggcccagcgcaaagaaatcaatcgcatcaacgcccatttgcagcttctgctcaaaaaagatcctttaacgggccttttgaataaaaaggccttccaagattgtgcggagcgcgcgcttaacacgctcgccgcgccggaatcacttgcgcttctcatgattgatattgatgattttaagcaggtgaacgatcaatatgggcacccttgcggggactatgtcctagaacaaaccgcgcgaaaaatccaggaggcttttccagacgcaagtagcatcggtaggattggcggggatgaattttccgcgctattgcctgccgatagaaatgttcttgccctcgaaaagcgcggagtgcaatttgcaaaagaaacgctcgaaatgtcctggcaaggaaaactgctacaaattcattgcagcattggcgtcgtttgggtgggaactgcaggaatttcctatgcgcgagcctatcaggagatggacgacgctttgtatgaggcgaaacaaaatggcaaaaattcctgctgcgtgcgggaaatatagaagcatccaggggaggaaaacatgtaccaaaaagcagtgcaaagcatttatcaagaagaacgcaacgcgggaaatgcgtatcgggcggaatattgcaaaagcatttctgccctgatcgctgacaaaaaggaagaagcgcgccaagaaagggacttatacgctggcgaaatcgcgcaaaaccgcgaggcttgccgcgaaaccttcaagcgcacgttaggatggccgctcactttgccagcgcaacggggcataccccgcacaaagcaaacagagatttttgccgatgccaaggtgcggatttgccggatgcagttcgaaatcttcccgaatttttggttttacgggttgcgttttgaacacctcaatgcaggaaaactcccgctcgtcatttctcagcatggcggattgggtacgcccgaactgtgcagcagttttttcggtagcgcaaattataacgatatgaccttgcgcatttttcaaaaaggcgtgaacgttttcgcgcctcaattgcttctatggaaagagggcgactttggggaagattcccatcgcgctgaaatagataacgacctgcggcggctgggcggctcgatagcggcgctggaaattcattgcctctcgcgctgcctggattggctggaaacgtgggaggggtgcagtggaacttttggcatgattggcctttcttacggcggtttttacgcgctgtatacggcggctgtggatgtgcgcattcgcgccgcgctggattgcagctttttccaagatggaacccattgcttcggcaacgattttgcatggtttgactgcgccaggcgattttttgacgccgaagttggcgcgctggtctatcctcgcgcgttgcgcattgaagtgggaaatgcggatgaggatcgctgcgtatatggggcgcaagaggaattttcccggctggagcgctattacgcaggagcgcgcgacaatttatcgtttgttctgtttgacggtggacacgaattttgccccgaaggcgacgtgggaatcgaatggattctgaaaaggctataatatatcatttttgccagggtggccatgagtcaccctggcaaaaaatcgagcaatgctatgcgtcaaactgcgcgttatctccgcgcatgcggttttgcgcattttcaatcaccgcgcgatattggtaagtcgtagcgggttccaggccctctaataccgtttgcacctcgaccttgtcccgtaccgcaatgggcggggtggaaagccatccctcgtcattggccgccagggcaaagccgggatatttgcgccattcaaagcgcacatttgccgtttcaaaactacccatctgcaaaacctgcgcatgcagcacagctgttccctgtgcgcattgcgccgtgcctgtgcggatgcccatgggctcaaacgccggctttacatgcgtaatgcggatgaccagcggattgcgccattggatgccgcagtatatgcgctgcgcattcatcacggaaacgtgcaggccgtcttcctgttgagatagggaactgtgcgcatccaaatccgggcgatattctgtcagctcgccggaagcgcccaacacgctcacttcactttccggcgtggcgcaaaccgactgcaagacaaactccctccgcatgccgcgatcccatccatcctgatgtagcacgaccgcgtaaagcgtcgttccctgcttatcggcgagcaggatcatagggccttcttccgccagaatccatggccgcacgcccaaaatcgcctcgcggttgataaaattccataagccgacttcgcgcaaaacgccctcctgttccgcaggaatgcgcccatcggaatcgggcccgatattcaagagcagcgcgccgcccatggcgcgtgtgcgcgccaacatttggatcacctgcgcgccggacttaactgtttcgttggtaggctgatatccccaggccgtggagagcgtaatgcacgcctcccacacttcctgactgcctacgccaggcaaatgctgctctggcgtgggaatggcgccgcgggttacaaggatgtccttttgcaaatcccatgccaaatttttgcaaaaagcttgcaggctttcgccattttcatcacacattgcctctccgccgtcaaaaaagatcagatcaatcggcccgtattgcgtgagcaattcttctagctgcgcacgcaaataagcgcggtactcgcgcataatctcaggagcgtatggctccacaggcgtacgcgtaatggtgagtccctggtcgtacaaaaagcggaaatcctccggtgaataataaaagcctactttcaacccatatttgcggaaagcatccacatattggcgaacgatatcttttccatagggcgtattcagcacatggaacgacgtcgtcttcgtaccccacatgcaaaagccattgtggtgtttggtggtgaataccgcatattgcacgccagccactttggctagccgtgcgacgcgatctgcgtcccaatcggtggggcaaaaagtttgaggaagctcctcatagtatctttttatataactgtccgacgcgcctaccaaagaatgactaattacacagcccaattgcacatcaagcgaccaatggatgaataagccaaatccagcatctttcagccattccagcttatgaaaagaattgcggctttcgagagaagaggtgtcctgcggctttagcgcgccttcatccaccgccagcggagagctttgtttcatgttccgtttcctcctattgcgttatgcttttgcaatggttcttcgcggtagcctaaatataaaggacgggggaattgtggccaagaaaacgccccattatcaaaaaggcgccacaaccacgctggcgcctttttgataaaatcacaccgtcaaccgcccattttatccatcaacgcacggattttttccgtcgcatccaacagcggcgaaatggaagaatcgtggttgagcgtgttgataattttggccataaacttagacatatccacctgctggaaccattgcgcctccagcgcacggggattcacataggtgagattggtggaatatactttggtaaacatgccgtctgtataaaattgctcgaagcgctccacgccttccgtaaagaacgcaaacgtcgtggccacaaaaatgtgcgccgcgcgacgtttctttagctccacgataatgtcgaaaaccgactcgcccgaagcaatcatatcgtccacaatgaggacgtttttgttctccacatccggcccaatatattcgtgttgcacaatgggatttttcccgttcaccacgtgcaaatgatcccggcgcttgtagaacatacccgcgtccacgcccagtacgttggcatagtaaatcgcccgatccatcgcgcccgtgtctgggctgatgacgatcaagtttttgcggtcaatgcccatttggcgttcttcctgaaggaaggttttcaagatggtgtaggtagggtagatgttttcaaacgataccagcggaatggcgttctgaatggtcgggtcgtgcgcatcaaacgtgatcaatacctgcacgcccaggcgctgcaattcttgcaatgcgagcgagcaatcgagggactcgcgctccttgcgcttatgctgccgcgaagaatacagcaagggcatcatcaaagtcacgcggttcgccttgcctgcaatggcggaaatcacgcgcttgatgtcctgcaaatgctcgtccggccccatatgagtttcaaagccgaacatacggtaggtacaagaatagttcccaacatccgctaggatgtaaatatcccggccacgcacggattcgcgtatgcgcacttttccttcgccgttggaaaagcgcacctggtctattgggatgatgtaactgccttcgagatcctgttccgaacgcatggccttgatgtgattgtcaaccttcttgccaatctcttcataaccattgagaacgatcaaccccagttcgccatgctccatgacagagcttttatcttcgcccatgccttttgccccctgtgttatggtaagtttagtataacaccgtcccacgtataccgcaatcacgcaaatgtatattgcctgttatagattgcgctgcaatgcattgcgattctcacgcgccttcttttgcccctgagttctgctcaccgcgcgccaaccggattgcacccgtcgccaattggtcgcagcgattgttctctggattgtccgcgtggcctttgacatacacaaagcgcaccttgtgcgtggaagacaaagccaccaattcttcccacagatcctggtttttgacgggctttttatccgttttgacccatccgcgcgccatccagttctgaatccactttttgttaaacgcatccaccaaatagctactatcggaatacaattccacctcgcaaggctcgcgcagcaaacgcaacgcctggatggcggccatcatttccatgcgattgttcgtggtggaggcctcgaagccgctaatttcacgtctatgcgctccgtagagaagcaccgcgccccagccgcctggcccaggattgccagagcacgctccatcggtataaatcgtcacgcgtttgatcgcttccaccgcctttaaagaatttcacatactctattataaccaaagcgagcaagcaaagcaagcgcaatttggcaatccttgccgcgcattttccctctttttgcaggaatactatttccaagcaaagggggaatgccgattgaaaaagcgcgtactggtactctatttgatctgcctggtttgcttcgcggctgtgggttgcatgcgctcgaccgcacggcaagcggtggatgaaaaggcggcaaatgcggtaccgaagttaccagaagacatcgccgttgtagatggcgtaccgcaaatcagcgtgtacagcgtggagagcgaatccatcgaaacaatggatttggaaacgtatgtgcaaggcgttctagcgggcgaaatgcgcaacgactggccggaagaagccctaaaagcccaagccattctggcgcgcacgttcgttttaaactttatttccgaaaaagattcgcgctatgccggcgctgatatatccacggatatcggcgaggcccaggcctacgatgcttccaacatcaacgaacggattcgggatgccgtaaaacagaccgagggttttgttatggtatacgatggtcgttttccgtatgcgtggttccatgcgcacgctggcgggattacagaattaccgaccgccgccctggaatacaaaaaggccgatccaccttacacgcaggtgatagagtctcctgactctgaacaagcgccggaaaacgtgcaacattggtccgcgagctttaccgcggacgaagtggcggaggcatgcgcggaaaccggggtaaagacaggaaaagtaacttcgctggaaatcggcaagcagggggactctggtagagcgattacttttatcgtcaatggcaaagaagtttccgctccggcactacgcttgcggttgggtgggacgcagttcaaaagtacgttgctggaaagtatagaagtaaagggcgatacgatcaccttttccgggcgcggttatgggcacggcgttggcatgtcgcagtggggcgcctatggcatggctgaggaaggcgcgaacgcccaggaaatcgtacaacactacttcaaaggggtttccatcgaaaaactctattgaccggcacaaaagcaccctgtcaaatcgcgttttgtgcgatttgacagggtgcagcgtcgtttcaatttttatgcacgaattcctttggactccatttgcgcaatcaccgtttccaactgcggattcatcacggtcgcgaagtaatcgcgcggagtttcgcggcggcggatttgctcaaactccccattcatcttcagcagcacttctgccgggcgcatctttccattgtagttgtagcccatggagtgcccatgcgctcctgtgtcatggatgaccacaatgtctcccatatcgatgtggggaagcggacgctggatagcaaacttgtcgttgttttcgcacaaagatcccaccacatcatacacgcgattgagcggcgcattttctttgcccgccacggtgatgtggtgatacgcgccatacatggcagggcgcataagatccgccgcgcaggcatccagcccaatgtagtcccgataaatgtgcttttcgtggatggcgcgcgcaacgagccatccggctggagccgttacataccgaccgagttctgtaacgatgctcacatcttttagcggcgtatgcgccagcacttgttcgtgcgcaaggcgcacgccttcgccaatggccataatgtccgcttcgctctggtcaggacgatacggcacgccgatgccgccagaaagattgatcataaagaacggcgcgccggtcttttcgtgcaattcaaccgccaactcaaaaagcatgcgcgcgagcactggataataagcgttgtccgtcgtattgctggccagaaaggcatgcagtccgaaggattttacccccagttccatgagcttatgaaccccgataaggagttgctctttggtgaagccgtatttggcttcccccggatttcccatcacaaacgtaccaaattgcagcgtgccgccaggattgtaccgcaggcaaatgcgttccggaattccaccatgccggcgcaaaaaatcaatatgcgtgatatcgtccaagttgatgatcgcgttgagcgagcgcgcatattcaaactcattggccggcgtcatattggaagagaacatgatttcctcgccggaaaatcccaatgcttgcgcaagcatcaattcggtgagggaagagcaatccgccccgcacccttcttcccggaggatttgcacaatccgggggttgggattggctttcacggcgaaatactcgcggtagccgccgttccaggcgaaagccttttgcagcgcgcggacgcgcgcgcgaatcgcgctttcatcgtaaaggtgaaatggcgtgggaatctcctgaatgatgcgctccaacgtttctttgctaggtgctgtcttcgtaaccggcataaaaaccatccatcctctgttcatttggcaatacagagattttacaccatctccgcgcatttcgcaaggggtttgaggcggaatttggattgaacacaaaacttttttgtgttacaatagaggatatggcatgcaagcaggagggaaccatggaactttcggaaaaaatcgatgcgctgctttcgcaggtggaaaaacccgttcgttatatgggcggtgaatttggcagcgtaatgaaggatctgggcacggtagacgtgcgctatgcctttcttttccccgatgtgtacgaagtggggatgtcgcacctgggcatgaaaattctctatcatgcgatcaaccgcatggatggggcatggtgtgagcgggtgttttccccttgggtggatatggacgcaaaaatgcgcgaggctggtgtaccgctgttctcgctggaatcccgcaccccggtgagggagtttgacctgttggggatcactctccagtatgaaatgtgctataccaacattctttccgcgctggatctggcgggcatcgagatcttggcgagcaatcgcaaaagcggcccgtttgtgatctgcggcggtccgtgcgcgtgcaatccggagccattggcgccctttgtggatgcattcgccatgggcgacggggaagagctcacgctgaaaaccatcgaagtgtaccgcaaatggcgcgacacaggccttccgcgcgaaaaatacctggagatgcttgcgcagctagacggcatttatgtgccctcgctgtacgatattgcttataaagaggatggaacgatcgccaatatccagccgcatgcgcctgcgaagatgcccgtaatgaaggcgctggtcaacgatctgacggcggcggattaccccgatacgctggttgtgccctatggcgaagtggtgcacaaccgcatcatgctggaaatctttcgtggatgtacgcgcggatgccgcttttgccaggcaggcatgatttaccggcctgtgcgcgagcgctcgatggagcggctcttggaactggcggaaaagcttgtgcgcgctacggggtacgatgaaatatcgctcatgagcctatcgagcggggattattcttgcttgccggatctggcgcgggaaatggtcaagcgctatcaagaaaagcgtgtgaagatttccctgccttctttgcgcatcgattcttacttgacggacacgctcaaggaaacccagaaagtgcgcaaaaccgcccttaccctggcgccagaggcgggaagccagcgattgcgcgatgtgatcaataagggcgtaacggaagaagatttgatccgctcggtaaaagaagcgttcgaaaacggctggtcggcagtcaaactatattttatgatcggtctgcccacggaaacggatgaagatgtgatgggcattgccgatttggcgcagaaagtccggcagtgttatttcgctgtgccgaaagggcagcgcgcgcccgggcttcgcatcacagtgagcgcttcggtttttgtgcccaagccgcacacgccctttgaatgggccgctcagctcaatcgcgaaaccattcatcgccgccagcaaatgctgcgacaggcgctggccacgatgaaaggcgtggatttcaaatatcacgagatggatgtgagctttgtggaagccgcattcgcgcgcggcgaccgaagaataggggaagttttgctgcgcgcatggcagctcggttgccgctttgacggttggacggaatacttccacatggatctgtggatgcgcgcgtttgccgaagccgggctagatcctgcgttttacgcgagccgtgaacggggcgaagaggaaatctttccctgggaacacatcgatgctggcgtaaccaaggaatttttgttgcgggaatggcacaaagcgctcaaggcggaaacgacgcaggattgccgcaaagggtgcgtaaactgcggcatccgccgctataagggggcgtgtgtatgagagtgctctaccggtttgccaaaaaagaacggctgcgctttgtgtcgcacctggacttgcaacgatttatgcagcgggccctcaacaggacatcgctgaaaatcgcgtattccaatggcttcaatccgcaccccattctttcgtttgcttctgcgctggccattggctggacgagcgaatacgaattgtttgatattaagctcgcggaacccgtctctcgaaacgtggctatggaggagatggaaagggcgctaccgcccgatttgcccattctggatgcgcgcttggtagaggataagcatcccgccttaatggggcggcttgtaatggcggattataccattcgtctcgcgggagacgtcgcgcccattcatgccgcaatggaagaatactgggcgcaagatgtggtattggccatgcgaaagaccaagtccggcgaaaaacagaccaatatacgaccgatgtctattttactagaaaaagaaccgaccggattatatgcgcgtctgatgcttacagagcgagaaacgcttaagccagatttgcttgtggcaacgctggcaaaaatggctggtgtggagttgccccaaacgcgcattcatcgcttactcctgcttggcatggatgcaagcgggagcccaacaccgctgctagaactttgaggaaattcatcggaaggacaaagattcgaaggaatgaaaaagctgattcttgcagaagcgctctgtgggcaaacgcgtttggccgtattggaagacggcctgcttgcagagatttacagcgagagcgcagaaggcgaaaggtgcgtggggaatatctacgccgggcgcgtggaaaatgttttgccgggcatgcaagctgcatttgtgaatatcggcctggaaaaaaacgcttatctatccgtggcggatattcccgtggacaagagcgatttggggatcgacgaaaaggatgtgctgcgcaacgcctccatcaaaacgctcctaaggcccggccaagagattttggtgcaggggatcaaggaacccggcggcacaaaaggcgcgcggatttcctgccacattacattgccaggccgttattgcgttctcatgcctacggtggattgcgttggcgtatcgcgaaaaatcacgcaagcggaagagcgcgcgcggttgcacgatttggcagacgccttgcgcccgcagggcatgggaattattgtgagaaccgccgcagagcacgtggaagaagcaaaattgcgcgacgatattgcggcgatgctgcgtttatgggaaaccattcaaaaccggcagcgctacggcgtcgcccctgcgctattgcaccgcgatttatccctcatttaccaagcagttcgcgatatgctcgctggcgaggatgtggaaatgctcattgagaatgaggcgcaataccgtgcggcgcgggaagttgccagcatgttttctcccgaatgcgaaagccgcgtgcgtttttacgaaggaaacgaaccgctttttgagcaatacggcatagatcatcaaatggaaaaggcttatgagcgccgcgtgtggctgaagtctggcggctatttggtgatcgaccacgcagaagcgctcaccgctatcgatgtgaacactggaaaattcgtaggaaaacattcctttgaggaaacggtgtttgccatcaattgcgaagctgcggcagaaatcgcccatcagttgcgtttgcgggatgtgggcggcattgtcgtgatcgatttcattgatatggaactcgcggagcatcgggaggagttgctttgttgccttcaagacgcgcttgcgcgagatcgggcaaaaatccatctggcgggcttcacgactcttggcctggtggagctgactcgcaaacgcattcaacagccgctttatctgcgcgacatgcagccctgcgccgcttgtcgtggtgctgggcttgtgctctccccgcaggccgtcgcccgcaaaattcagagggatttgcgggcgcgagtccaggttggcgaagatggcccccatctgatcgacgcttcgaaagaagtcagcgaagcgctatatgccatgggcgtgccagcagagcgttgctatgcgcattgggatacgaacctttctggcgcgcaataccacatttcccctgcccaggaaagcgcgttgccgccaaaaactagaccattgccaaggagcgaaaattcatgaaggaaaagccatttgtgccgcaggaagagcttgcgcgccagcgggaattcgtgcgcgaaatcggcgaagcatttgccgggagaaaaacataccacattgtcactctcgggtgccaaatgaatgtgcgcgatagcgaaacgttggcaggcacgcttcaagaaatgggctttgcccaggcagaaagggacaaagccgatatcgtgctatataacacctgctgcgtacgggaaaacgcggaaaaccgcgcgcttggcaatgtcatctggttgaaagaactcaaaaaagagcgcccggatatggtgatcggcgtttgcggctgtatgatccaggaggaaggcgtggcagagcggctgcaaaagcaatatccctttatcgatctagccttcggaacgcataacgcctaccgttttccggaatatctctaccaggtgcttttgcaaaagagccggatctttgccgtggaggaaagcgatggcgtgattgcggagggactgccggcgctgcgttcacacgcacatagcgcgtttgtgaacatcatgtttggctgcaacaatttttgttcctattgcatcgtaccctatgttcgcggccgggagcgctcgcgggaggcgacggatattctgcgcgaagttgaggcgctctgtgaggcgggcgcaaaggaaatcactttgctcgggcagaacgtgaattcctaccaaggcggggagttcgccaacctgttgcggctgctgtcgaaaacgggcatcgagcggatccgcttcatgacatcgcatcccaaagacctgtcggacgatttgattgccgccatgcgggatctgcccaacgttatgccgcagctgcacctacccgtgcaatcgggcagcagcgaagtgttgcgccgcatgaatcggcgctacacgcgggaacactatctcgcgcttgtaaaaaaactgcgcgaggccatcccggaaatcggcttaaccacggatatcatcgtgggatttcccggagaaacgctggcgcagtttgaagagacgctttctctcgtggaagaagtgcgctacgatagcgccttcacgtttatcttctcaccgcgccggggcactgccgccgcggagtatccggataatacgcccgaagcggaaaagagcgcgcgcattcaacgcctgatcgatcggcagcagaccatttcccaggaaatcttgaatgcgcagatcggacggaaggaaacggttttggtggacgatgtgtcaacgcgcgatgcgggatgcgtttgcggccgcacgccgcggggacatatggtaaatttcccaggaaatgcggatgccgtgggaacgcttgcgcgcgtgcgcatcgtttcggcaggacgcaatacattgagaggagaaaaaatcgatggataaggtatttgaaaagacccgcgagctcgcaatggccattatggaatcggacgcgtaccgcacaatgcacgaggccgaacaggccgccatgcgcaatcccatggcggcttcgctgatgagcgattacctggaagccaagggcgcggtagagacggttttgcaggaaaacgatcccgatccagcgcaattgaaagcgctctcggaaaaaatggaatcctgccaagaaaagctcaatatgttggatgaagtgatcgccctttcccaggcgcgagaagaattttccgggctaatttcgcaagtcaaccagcttttgcgcttcatcatcaccggccagatggacgaaggcgaatgcagcggctcttgcagttcttgcagcggctgccattaaagcgcgtggggaatagcggtttgtggcgaaaggatggtagcgtagaatggccatttctccgatgatgcgccagtatctggaaatcaaggagcagcattccgactgtattctgttttttcggctgggcgatttctatgaaactttttttgaagacgcggaacttgtgtcgcgcgagttggaactcactctcaccggtaaggattgtgggctggaaaaacgggcgcccatgtgcggcgtgccgcatcacgcggcggatgtttacgtcaaacgcctgatcgaaaaagggtataaagtcgcgatatgcgaacaaatgagcgatccggcactttccaaaggcttggtagagcgcgcggttacgcgcgttatcacgccaggcacgcttatcgattcttccatgctggaagaacgcgcatccaactatattctcgcgctatattttcaaaaagaacgcgcaggatgcgcgttttgcgatgtttcgaccggtgaattcttcgcttaccagtttgatcacgccacggcgcaggtgctggatgagctttcgcgcatccagcccagcgaaattctttccaacgaggtggagcgcattccacgcaccagcggcgcgctcattacctgccgcaaggcagacgattataaagaagccattcaaaaactgacggggcatttttcccattccatggaagaaatgggctttgccggcgaacgattggcgattgtggccgcaagcatgctgttgggctatttaagcgaaacgcagatgaacgcgctttcgcatattctcaccatgcagcgctacgattccaagcgcacgatggagctggatgccatagccgccgcaaaccttgaactgacacaaacgctgcgctaccataaaagggagggttccctgttctgggtgctggataaaaccgtaacccccatgggtagccgtatgttgcgcgcatggattgaacgtccgctgtgcgaaatcgcagaaatagaatcgcgtttggacgccatctcatatttcatgcaaaatgccatcaagctcgacgccttgcgcgaagcgctacggcccatatacgatatcgagcgcctactcagccgcattgcctatgacgccatcaatccgcgcgattgcgtagcgctaggcaaatccttggcagcagttccgggcatccgcgcgttgctcaaaggagaaagctctcgcatggtggcatctctggtggaaatgctggatcccatggaagatatctgtgtgcttttgaacaacgcgatctctcaggacgcgcccatcagcgtgcgcgaagggggaattttccaaccaggatacaatgcgcagttagatgaataccgggcagcttcccgcgatggaaagacgtggatctcgcaaatggagcagagcgagcgcgaagaaacgggcatcaagaacctcaagatcaattataaccgcgtttttggctattacatagaggttacgccatcgtattacgaccttgtgccgtttcgctacatgcgcaagcagacgctcaccaattgcgaacgctttatcacggaggaactcaaggaactggaaaagaaagtgctgggcgcagatgaatccgctgtgcagctagaatatgaattgttcgtatccatccgcgagcgcctcaaagccgctatcagccgcctgaacgccacggccaccggcctaaaaaccctggatgcgcttgccagccttgcgcaagtcgcgttggaaaaccggtattgccgcccgcattttaatgaagacggcgtctatgagattgaaaacggccggcatcccgtagtagagcgttcgaccggtacggaaggattcgttcccaacggaacccatctcacgcccgaaaagcgcgtgatgatcatcaccggccccaacatggcaggcaaatctacctatatgcggcagaccgcactgatcgtgctaatggcgcatgtcggcagctttgtaccggcagacagcgcgaatatcgcccttaccgaccgaattttcacgcgcatcggcgcatcggacgatttgtatgcgggcgaatcaacctttatggtggaaatgaatgagctggcgcacatcctgcgccacgccacggcaaacagcttgctgattctcgatgagattgggcgcgggacatccacgttcgatggcctttcgattgcctgggcaacggtggagcacgttgcgaaactgggggcaaaggcgcttttcgccacacattaccatgagctttcgcagctggaaggcaagttggacggcgtgacggattatcgcatcaccgcgcaggaacgcggagatgaaattgtgtttttgcgcaaaatcgtgcccggcagcgcagatcggagcttcggcgtggccgttgccagcttagccgggttgccaaattcgctcatcgcgcgcgcgcgccagattatggcccggctagaagtgaattcgcaggtcaatattggcaagcaaattctcgataaccgcaaaaattccggcaacgtgcaacttggctttgagaattacagcgccatgagctttgtagatgaagtgcgcgaactggatgtaatgagcatgtcgcccatcgacgcgctcaataagctatttgaattgagcgaaaaagcgcgcaatttgtgaggtaaggaggcgaatcgctttgcccattcgaatcttggatgcaacgaccgtcggaaaaatcgccgcgggtgaagttgttgagcgtccttcatccatcgccaaggaactggtggaaaattccctggacgctggcgcgacttcgattgccattgaattgcgcgaaggggggatctcttacctccgagttacggacaacggctgcggaattcccgcgggagaagtgcgcctcgccttcgagaaccatgcgaccagcaaaattgcgaagagcgatgatttgctcactttgcgcacgttgggttttcgcggcgaagcgcttccatctattgcggccgtttccaaggtagaaatgcaaacgcgaaccaaaggtgcggagcaaggaatgcgggccttggtggaaggcggtgcgatagtatccctggaaagcgcaggctgtgcggagggtaccaccatcgtcgtgcgcgatttgttttataacgtgccggcgcgtcaagcgtttctcaaaaaacccgcctacgaatatggagcggtcaacgaagtggtcacccgccttgctttgggcaatcccaaagtcgcttttcggttgatacacaatgggaaaaccattttttccacttatggcgatggaaatctgcgccacgccgcaatggccgtatacgaccgcgaaaccgcaaatggtatgctggaaatcgacgaagcggaaggtggctttcatctgcgcggcttgatcggtgtaggggaattttccaaacaaacccgggcatttgaatgcttttttatcaatggccgctctgtgcgttgtcaactcatcgcgcaggcgctagaggcctgcacgcaagggcgtgtaatggttggcaaatacccaatgtgcatcttgaacatctccatgccgcccaatagtgtggacgtcaatgtgcatcccaacaaactagaagtacgttttaaaagcgcatacgatgtgcggcgcaccatggaagcgcttttataccgggctttccagggagaaactatgttgtcactggaagaagaaacggcggaagcggcatcaagtataaaacagaccgaagttcataaaaataatactccagtctgtacgaaaaccaacacaccaagcgcatccattaacaaaaccgactcgaaacagacgatagattatatccgaagaacccctgttttctccggtcaacctatgacgttgcgggaaatgcgcgaggccttctttgccccgaaagcgccagcgcaagcccaagagccggaagtcacaaaaacaccgtctgcgtcgcagccggttttgccattgcgagaagtggagaagagccctcttcaagaagaaacgctctcgcagctaaacgccggtactgaagtgcaagtgcaggaaatggtgcaaaaacccccaaaagaggaatctcctgtacaacaagccatgcccactggccccgcataccgtgtgttgggcgttgtttttaaaacgtatattctcttggaaacggcggattcgctgatcgtgatcgatcagcacgcggcatttgagcgcttaaagtatgaggagtatgttcggcttctggagggtggcaacgcttcgcagcagcttctggtggccaatattatgcgcgtttccgcgcgagaacgcgcagatctgctggaaaaccaagcgttgttgcgcgaattgggctttgaaatcgaaccgtttggcgaggcggatgtgaagattagcgcagtgccgcatgtgcttggacatacagatccccaaccgctcttgcacgatgtacttgccaatttgcattctttgcgcagcgcaaacttggccatgcggcgcaaagagatcttgcaaatgtcgtgcaaacacgccgtgaaggcgggggatgttcttacgcgcgaggcgattgacgagttggtggaaacgatgctcgtcactggcgcgccgccattttgcccgcacggcaggcctgtggccaagcggctaacaaaacgggatatggagcagatgtttaagcgagtatgaacaagcgaaggttgtatggcatcgtggggccaaccgcgtccggcaagacgggcgcggccattgcgctggcgcgcaaaataggcggggagatcgtttcctgtgattccatgcagatttataaaggcatggatattctctccgccaagcctacggcacaggaatgcgctgccgcgccgcatcacatgatttccctgctggaacccacggaaaaatgcacggccgcccgtttccgagatatggccaatcctgtgattgaagatttgtttgcgcgcggaaagcagcccatcctgtgcggcggaaccgggctgtatatcgacgccattaccaagcctcggagctttgccttggagggcgatgaggcattgcgcgcgcgcctaatgcagatggaacgctcggcattgcacgcgcggttacaagaagtggatccacaaagcgccgctaggttgcacgaaaacgatgtgcgccgcgtggtgcgctcgctagaagtctatatactcaccgggaatacgatgaccgaaatcgcccaaagggacgctgcccaagaagcgccctttgacgcgcgcctcttcgcgctggattggccgcgcgaaatcctctacgcgcgcattgaccagcgcgtagacgagatggtcgcctccggaatgatcgaagaagttcgcggtctaatgcaggagggagctatgcatcccacggcgctacaggcgctggggtataaagaaattctcttggctttgtgcgaagagatttccatggaggaagccattgcgcgcgtgaaacagggcagccgcaattatgccaagcgccaacttacatggttccggcgcgatgcgcgcatccgctggatcagcgcgcagggaaaaacggcggaagaaatcgcggaatgcattttggccctggaagaggaataacgcgccatgcgaaaacgcctcctgtcaggagaaagtttaacacaaaaccccgcgctggatgctgtacttgcaaggagagcatccggcgcacgatacagaaaggtggtcttctttcgatgaacccagaacgcgcccaggcgctcatcgcccgggcagagaaagattgcggcgccatttttgcgcaaatagacgccaacgaggaacacaacacgcaaaaggttttgcgcgcatttcgccgccacgaaatcgctgcgcggcactttgcgcccaccacgggatacgggtatgacgacattggacgcaccgcattggaagccctgttttgcgatgtgctcggttgcgaggccgccctggtgcggccacaaatcgcctccggtacgcatgcgctcgccattgcgttatacggcattttgcgcccaggcgacgcgctgatcgccggtgcaggcaagccatatgacacgctggaagaagttattggactatcgggcgagcgggggaatggctcgctgcgcgactttggcgtttcctacaggcaggtagagctaaaggacggaaagctggatatcccaggcattctggaggcgctgggaagcgacggcaaacttgtgttgctccagcgttcgcgcgggtatgactggcgttcttctttgagcgtggcggaaatcaacgaagctgtgcaggccattcaccacaaaaaggcggatgtggtggttatggtggacaattgctatggcgagtttacccattgcgaagaaccacaggcggatgtgctcgtgggttcgctgatcaaaaatcccggcggcggattggcgcctacgggcggctacatcgccgggcgtgcggattgcgtagaaaagatcacgtaccgctatacttcaccgggcgtcggcggagaaattg

SEQ ID NO: 905 - DNA, 10700 bp, Unknown
  16S sequences of unknown bacteria
gatacgtggccgccacaatccggtcagcaatgatcgtgtgctcacaatcgtgcagcggcctgccgccctgcaccacaatcgtagaactgcccgcgccgcgcacatccgcaccgcaggcattcaaaaagttctgcaaatccacaatttctggttcccgtgccgcattgcacagcacggtggcgccctcagctccgcaggcggccagaatcacattttccgtggcccccacactgggaatgctcagcgtgatctcgcagccccgcagcttttgggcacagcagtgaagatagccgcccttttcttcaatttctacgcccatggcccgcagagccgccaaatgcagatcgatgggccgcggccccaactcgcagccgcctggataggacagcactgcatggccgcaccgtgccaggatcgcacccagaaaaataacagatgagcgcatctcccgcatcatggcgtcgggaatttcaccgcaggccatggcgccggtatgtacacacagcgtgtccccctcccactccgcactgcagcccaaacggcgcagaatacggatcgaagcgtccacatcctgcaggcgcgggcagcgatggagtacgctttgcccccgattgagcaacgtcgctgccaaaatcggaagcacgctgttttttgctccctgaatctccagttccccctgcagggcgcggccgccaatgattcttaaataattcataggctcctcctttgcatttctactacctcatcgtatgcaaaggaggggcctttcgttttagatttccgttttttccgccttcggcaccagcgccattaccgtatgataaatgcgttcggcagcgtcagccacactgagcgaaagcatagctttgtgcattccctcgcgcttggtgctgtcgcccaaaatctccatggcggtatcgtaaatcgccttgccgctgctctcattttccagcatcaggcagataccgccggctttctccagcacgcgggcgttcttttcctgatgattgttgaccacatacggcgagggtacaataatggacggcatgcccagcgccgtcagttcgctgatggtggaggcaccgccgcggcagatcaccagatccgccgcgcgcatcacggtaggcatatcgtaaatatactcccgcagatccacatccgtatgcgccagatctattccggcagcgcgcagggcttcctgcatcttgggataacccgtggatcccgcagcatggatatgatgaaatgggctgcccgaggaaagctccgcacggataaaatccaccatctgttcattcatatgggcagcgcccaagctgccccagaaggataccaccaagggcttgtcgtctgcatagcccaatcgggcacgggcctgggcacggctgcaggcaaaaaagtcgcctcgtaccggggtaccggtaactacaaccttttccggatgctgataatacgggcggcaggcctcaaatcccaccatcactttatccaccagcggctccagcgttttcgtggtcagtccaggcaccatattggattcatgcactgcagtgggcacaccggccttagcgccgtatttaaccatcgggtaactggcatagccgccggtgccaacgatcagatccggcttaaattcctccagcacggctctggcctgtcggggcgttttcaccaccagcgccgctgtgtgcagattgtgccgaatatccgcaaccttgaaggagcggcggaaattgtcaatctcaatagctcgaaaggcatagcccgctttttcaacaagcttcccttccataccccgcttgctgcccacgaacaggatgttgacggatgcatcccgctcctgcatcaaccctgccagggccagcgctggatttacatgaccggccgttccgccgcaggtaaaaatcacgttcatcgtttttccgtcctttgtcgtaaaagtaaagtgcacattccgatgcaaaacgcagtcggctccacaccgcggaagacgtttctttttgatggaacgaaccgcgtttgacacggagccctcccggcttcttcttaccccgatttcggtcccgggatttgccgcgatacgctgagcagcacgcccatttcaaaaagctgaatcatcagcgccgtaccgccgtagctgaaaaagggcagtgagatacctgtgttgggcacaaaattggtcaccaccgccacattaaggaaagtctgcacggcgatcatggtagtaattcccaccgccagcaagccgccgaaacggtccctcgcatgcagggcaatccaatagccccgcagcaccagaaaacagaacagcgccaaaatcagcgccgcgccgataaagcccagttcctcacacacgatggaaaaaatcatatcattgtgctcttcaggcagatacagcagcttctgccgcccttttccaaagcccaaacctgcaagcccgcctgaaccgatggccagcaggctctgcaccgtctgatatccctcatcggaagcataggcccagggatccttccactgaaggatccggctttgtccatagggcagcacaccggaaatcagcaccaggatgccccccacgcctaggctgacgcctagcgccaccatttttcgagagatgcctcccacaaacatcatacatgcaccgatacacaaaatcagcacggaaccagacagatgcggttctttcatcatcaggatcacgatcacgcccaggatcaggaaataggggaagatgccatcctgcagcgtttccattttatcctttttcacactgatggtcgcggcaaaatacaggataaccgcaaactttgccacttcggacggctggaacgtggtaaagcccacattcagccagcgggtagcaccgttggatgtgatggcgatgggatagggcagcacaatgaccgccagaagcagcagaatcgtcagccccagcaacggcaccgcccagcggcgccaccagtgatagtcaatcttcgaagtgataaacatcaccacgacacccgccgcagcaaagaccgcttgacggagaaaaacgctcagcgccgccatggccgaagggtcttccgcttcataaaacgcccgggcaaaagacgccgaaaacaccatcagcacaccgatggctgtcagcagcagtaccagcagggcaaaaggcaggtcaatggggcctttggccatcaggcggttgatttgcgctttctgccgtttttcttcacttgtcaccgccatcccctcctttccaaagccagtcgggtccacaacaccacagcgcagaacactgcccggctcaaaccgcaaagcggtccatcacacccaacagcgccagggcacaaaacacagtgctgaccgccgtaaataccaaaacgattttcacttcgctccagccgcacatttcaaaatgatggtgcagcggcgccattttgaacagacgcttgccgtgagtggccttgaaataagttacctgaatgatgtcggacagcgtctccactacataaataatgcccaccaacagcaaaatcagcggcatatcgtaggcaaaggccatggccgctacgcagccgcccaggaaaagggaacccgtatcgcccataaagactttggccgggtggaaattgtaaaagagaaacgccaccaggccgcccagcatcgccgcagcaaagatgcccagctgcgtatagccccaccagaatgcacagcatacgaaaaacagtgccaccggcacggacacgctgcccaccaggccgtcaatgccgtcggtgatgttcaccgcattcaccgtacccacaataacaaaggccgcaaaaatcagatacaccacccaattcaggtggatatgcacattaagaaacgggatgtatacattgggcgtgagcagatgctcaaagcgcatcagcgtcaggaacgccaccgccgcagccagctgcagaacaaatttctgcaacgccgtcaggccttcgttctggtgccgggtcactttcttataatcgtcgatatagccgatgataccgaaaaccagggcaaagacaaacacataaagatgtacaaagctgcccatcatcataccgcggagcccggcaatcaatacagcggcgccaatgccaatgataaacatcagtccacccatggtgggggtaccctgtttgctcatatgccaggtagggccatcctcccggatactctgccccgctttcaggcggcgcagagccgggatcagcatccgccccacaatcagtgtaaccgcaaaggcgatcacacaggaaagaatcatttccactcttgaaccaaacccttctcttttgtttcttgtcgctcacaggccgttgtgcgtctgtttccagtgcgctgcaacgatctcacgctcatccaggtggcgtttctccgcgcccacaatctgataggtctcatgcccctttcccatcagtacaatcacatcgtctttctgcgcctgatccatagcgtacacaattgccgcagcacggtcttccactacaatatggggcgtctgggaacgatacatccccgccagaatatcctgaatgatacctctggggtcctctgtcctgggattgtctgaagtgacaatcaccagatcggccagcgcggcggcggcagcccccattttggggcgtttcgtcttgtctcggtccccgccgcagcccagcagcgccaccacacgccctttggcaaagccccgcaccgaacggagcacattctccaccgcgtccggcgtatgggcatagtcaatcagcacagtgtactctgcccccggcagggggaccacctccacacggcccttcacatgacggctttggcgcagcgctgcagcactgtctttcagcgggatacccagtgccagcgccgctgccagaacatccagagtattatataccataaatccgcccggaataccaacaaaaattgcctggcgctccgattttgtcaccgcatcaaaggcaacgcccgccgcactcagcgacacgttttctgcccgcagatccgccggagcctgttcagcataggtcagcacctgacacgccgcatgttccagcaggcgtttgtgccagggatcgtccccgttgacgacacccacgcgacacatggaaaagagccgggctttggcgtcgcagtaggcttccatcgttttgtgaaagtccaggtggtcctgggtcagattggtgaaaatgcctacctcaaaggggatgccatacacccggtcaagaaacagcgcatgggaggacacctccatcaccacataggtacagcccgcttcgcgcatcttccggaaaagccgatgcagctcgaaagattccggcgtagtgcgctccgcttccaacacttcggtaccaatcaggatctgattggtaccgatcagccccaccgcggccccggcctcccgctccagtacttctttcaaaaggtatgtggtggtggttttgccgttggtgccggtaacgccaatcatggtcatctcctccgccgggtgggaaaaccagttggcgctgagcagcgccagcgcccggcggctgtgggccactttcacccaaggctgcgcatcctccggcgcgcgctcgcacaaaatacacaccgcgccttttccccgtgccatgggaataaaatcgtgtccgtcggctgcgtagccggtcatggcaacaaacaggtcccccggcgctgtttctcttgaatcatagctgacgccgccgatttccaactcctccggcgcgtgccactccagcacctccacaccggagagcagttcccttaatttcatttctgaatcctacctttcattgcagcggaaggtccctttcctgattttacgtacatttccccagaccgcacccggaacatcccaaggggcagcgtctcattgaatatccggcgttgccgcccgtgcggcggcggaagcagcagcgccttctgccgaaaaaccgtttccgcagacgccgctccttcgtctgcagtccggtcaatccaccattgctgtgtccgtaagctgcacagataccactgtgcctgcttccacttcgccgccttccgccaccgactgggtgctcacacggatcgtaccggagttgttggacgtatcgcccatgactttcataatcaggcctgcgttggtcaaagccgtgtttgcctgctcagcagtcataccaatcaccttaggcaccacgcattttttggtgggcttctcttctcccagatagagtataatctccgccgtacccggcacaatggaaccgcctacaggtgtctgatcggtcacctccgcgccgctgcccaccgtgcggcaggaaaagccgttttcgctcagccgctgtttggcctcttccagcgtcaggcccacacagttgggaacattggcatctgctgcagccagttcctcgctggaataggtcggctcaatgccaagatacggcagaatctgggaaaacaggctacccgccaggggcgccgccatattgccgccgctgggatatgtgccggtagtgcggctgggcgtatccagcgcgaccagaacaatgacttccggatcgtcgatgggcgccacgcccacaaaggaaaccacaatgtcgccctgcggattttccgcggtcttggtgccggttttatcggcggtaccggtttttccgccgatgcggtaaccggaaacataggcgttcttaccggtaccgccatctaccacaccttcgagcaatgcacatacccgcttcgacgtctcctcactgaccacctgacgcacctgtgtagcgtcgtgctcgtaggtcacgttgccctcgctgtcgagcacctcctgcacaatatagggctggtgcagatagccgccgttgacagccgcggcctctgccgttaccagcgcaatgggcgtcacggtaaaggtttggccgaaagccgccgaggccagggaaaccacgtttgtgccgaactgttcctcatcaaagaaaatacctttctgctcgccctgcaagtcaataccggtcttctccaaaaagccaaaatctttgatatactgataaaatttatccgttcctaccttcaggccgatggtgataaacgcggggttgcatgaattggccaccgcctgagccagagtctgatggccgtggcccgcctttttcgagcagtaaatgggtttgggccagccggtcacattgatgtggccggaacactcgaaggtactgctttcgttgaccagcccctcttccagcgccatggccagcgtaatgatcttgaaagtggatccaggctcataggtatcgttaatggccttgctgcgccactgtttgagctgcagttcgcccaatttttctttataggcgtctccctccaacccttcaagctgcgccgccagacgctcatcgtaaatcgtgcgcggatcattcaaatcataattgggcagcgacgccatcgccagaatcgcgccggttttaacattcatcacgatgccggtggcaccgtttttgacatcgtatttttctatcgcatcttccagcccctgttccaaatagtgctgaatggtcgcatcgatggtcagcaccaggctgtcgccatcctgcgcgtcataatactgttcatatttatacagcacatcttcgccacgggcatttttctccgtcaccaccaggccagcagtgccctccagctcctcttcatacagcgcctcaatgccgtacagacccacattgtcgctgcttacaaaaccaatgacctggctggccagggagccgaaggggtaatagcgtttgctgtcgggcaccagatagatgcccttgatctccttttcattgatgaactcccgcacctgatccgcttcgtcctgttcggccttctgcttgaccacctggtaataggattccaccttatcttcttttttgcggatgttctccgcgtctacattcaaaatttctcccagcgtctgtgcaatcaaatccttatcgcactcattttcagtaatctcgtggggcgaaatgaaaatcgtctctgccgtggcggaaatggccagcgtctccccattggcatcataaatggtgccgcgggaagcagaaatggtggaagagcgggtctgctgcgccaccgctttctcctgcagctcctcatggcgaacaatctgcagataatacagccggcacaaaagcgccgcaaatgttgctactcctaacaccgccgccagcaccagcgtacgggatttcaatacctttgtggcccgctttgcggacgtttctcttcggtctttctgattcggcaatgcttttatcctcccatgaatggcaagcaaggagcaagaaattcctttcttactccttcctcgtttgttccactatatgcgtatacaagcgctcttagactgactgctcacgtaaaatattccaccactgcatgcagcttgtccccaatgatggacaaaatctgccccgcaccgctgctggcggtggtatacaccgaagcgctgtccggcagattggaatccagataatagatctggctggtgctgggcttgctcattcccgcagcgcgggcggcgctctccaccgtttccagatcaaatgcgcgttcataggccgtcgtcagcgtcacattctccgtctgcagcgttgtcaattctttctgcagcgacaccacagaatcggacagagccgtcagctgcacatagctcatcagcaccagcaccagcatggcgccggctaccagaaagcccagtaccgcggatacggacacctgctcggccgggcgcagattgactttggggcgacggatggtgcgcacctgaggatgaggcgtcgggcgctcctgcacccggcggcgctccaaggcattgtaatcataagccagattgctgcgatcagccccatagccctgccgggcggcgcggtctgtgtacatgcttcttccgctccgattctgtttgcgctgtgcagccatggcaatcagtcctctttccattcaaattcggtgcgctcagcaatgcgcagcttggcgctgcgggcgcgggggttgtccattatttcatcctgccccggcaggatcggtttccgggatacgatacgcactttcggcttgtttccgcacacgcacaccggaaaatccggcggacaggtgcagccctgggccagtgcctgcatcgtctttttcacaatgcgatcctccagtgaatgaaacgtaatcacacacaggcggccgccgggattgagccccttcactgcgccgcgcagcatgggttccagtacccccaactcatcgttcacggcaatgcggatggcctgaaagctgcgtttggcagggtgctgtttttcccgttttgccgcagccggcagggcggatcggatcacttccaccagctgcagtgtggtgccaatgggcgcatcctcccgcgcccgaacaatggaacgggcaatggcgccggcataacgttcttcaccatactcatataaaatgcgcttcaattcttccgcgctccaggtgttaacaatatcgtgggccgtcagcgccgcacggcgatccatccgcatatccagcggggcgtcgtgcatataggaaaagccccgctccgcgtcgtccagctgcggggaagacacccccagatcaaacagcatcccatccgcgcctgcgatacccagctcccggaggatttctcccaccgcactgaaattgctacgcaccagtgtgatgcggtccatatattctgccaaacggactttggctgcctcaatggccgcctcgtcctggtcaatacagatcaggcgtcctgtcgtcagtcggcgggcaatctccagcgagtgccccgcccggcccaacgtaccgtccacatagatcccatccggccgaatggccagtccttcgatgcactcacggagtagcaccggtacatgcgaaaattctctctgcatatcagaaattcagctcatccacggccgcttccaggctggccggatccatttcaatctcagataccgctgcccaagcatccttgtcccaaatctcagcgtgattggaaacgccgagtaccatgacatcttttttcagtcctgcataaccgcgcagtttctggggcagcagaatgcgtccctgggcatccaaagtgcatttggctgcattgacgaacagcggacggatacggcgggcctgtgccgaaggcagcgcattgaatttttcttccttctcccgccaggtttcttcggaataagcagcaagggcgcgctcaatgctgatggtgacataaatcgtgtctcccagctcttcgcgcagactggcaggaataaacagacggccttttgtatcaatggaatgctgatattcgccggtcatacctgccacctcgctttctctttatgggacagccagggattttgaaccacttttcaccacttcgccccactttttatgttaagtataagcgaaataatttcagattgcaagaaaaaatttcccgatttgtttccgtttctcctctgatttgaaacaattttgttacttttttgatacaaatacatttgtttcaattttttattttttccctttatcccgcagaaaacacaatatattgtatctaaatcaaaaataaaacacaatttgtattatctgtacaggcaggtgcaaataaagtcgaaaaatatttacaaaaaaaagtgcaaaatcaactgaaaaaaattttttcgccgcagcaaaatgacgacaaaaacaaagcgtcctgtggggtgttttcccac

SEQ ID NO: 906 - DNA, 5295 bp, Unknown
  16S sequences of unknown bacteria
tcgcaagaacgcgcagccacagattgaaaatctgtgttccaagggggcttgggggacttccctcaacaagcgcgtggggctatctggatagccacaggcatcgcttgccgctttctttgcagaaatgaaaagagccagagaggaaaccgtcaaatttcactcactggctcaattcgcttcaattttcttagatagttctgttaattcctgcatggtctcctgtgtatggtgcagcagggtttcacgcatttctgacgggcaactggaataaagcattttcatctggttggctccctcatcttctggagaaacatccggatttattagagagtccagagagatgttcaaaaccttggccaatgctcttaaaatcaaataggaagggttcatctgccctttttcaatgttggcaatttgttttacagaaacatggctcagatctgaaagctcctgctgtgtcaggtcttttttctttcgggcctcccgcattatttgacccaaagcggttaaatcgtcaatcggcataatcattcacctcaataacattgtatcgtgccgatttgttttgaggaataaccttattatgcccgctaaaaggtatgataatgccgattttgtaatataaaaaacgaatagggcgcaaagacccttgatatttttatatcatgagtccttacaccctactatgagtttttatcttgagataatttttttaggatatattctgtttatgtgaattacccatctgctctttttcttgtgttttcagatgcgtttcccgcttatcggttgcttctttcaaaagagcgtaagtggctgctgcggcaggtacgccaagcaacataccgattggtccagccagattgccacctattgtgattgccgctaaaacccacatggcaggaaggttgatttttgcgcccacaactttcggatagattgcatttccttcgatctgttgcaaagtaagcaggaaaataatgaataccagtgccttaaaaggattgactgtcagaatcaaaaatgcacccacaagtgtagcaatccaggcaccgacatagggaatcagtgctgttaccccaacaagcgcaccgatcatcggcgcatatggtattctcagaattaacataccgattgcacacaggctgcctaaaattattgcctcagtcgtttgccctgctacaaaaagcttgaagtttttttcacagacagctgccacatgaatgccccgctcggcaaaacatgctggaatccatacacggacaattcgggtgatctgactttttaatttctccttattggccaaaatataaattgagaacacaagaccaatcgcaaaatcgactgccgtcgcaaccacgcttccaaatgcggaagcagcagtgtccataatggtggttcccaattgattcaaccattcattcaaattgtctttcagttcaagaaaatcaatatcaatttgggacagctgttctccgaatgggattttagaatagtcagccgtgctttcaaatgccaccagttgatccagaccattcgtcaaggatgatatgacaatagatactgcatcgatcaattcgggaataacaagaaaagcaacaccgacaaagacccctatcaccaaaataaatgaaagcaggatcgcaagcgggcggcgcattttcgttttcctagatgtcggatgtttggggaacagatgtctttcaataacccccaacggaacattcagaaacaacgccaaaatcaatccaattaaaagtgggttcagcaggtctttcaaccacatcacggcatcagctacatgactaatatgtcggatgccaagataaatcaaaatgcaggctgtaaacgttccgataatccactttgataattttttgtgtgtttcaatatcttcaaacattcaagaccctccttacattagtggtgcaaatagccgcagtatatcctggagcagatgcactacgatatttgttttgcaatccttttctgtcacctgttggcatatctccagcgtttgcagaaaatcctccttgacttccataacagctttggcctcatagagcagagcaccacattcatagtgcagatataagctgcgaaaatccaaatttgttgtcccgactgttgcagtacggtcatcggacacaaaggttttggagtggatgaaaccattggtatattcgtagattttaacgcctgattttatcagctctcggtaatacgagcgtgtggtcatgtgtacccaccatttatcccagcggtggggtgtgatgatgcgtatatctacaccactttttgccgcaagacgcaaagcggaaagcatactatcatcgacaatcagatatggggtgttgatatacacgtacttctttgcattgtttaagatatgcaggtaaacgtgttcgcccacattttcttcatccattggactgtcagcgtatggctgaacaaacccctttgcagtaacagggcactcttgttctttccatgggtagaagatttcgtagtcctcgtctgtatgggtacaaatttcccacgtctgtaaaaaaattagtgtgaaactccatgcggctttgcctttcagcatgatcgctgcatctttccagtgtccgtgtttctcaatggcgttgatgtattcatctgccagattgatacctccggtaaaagccacctttccatcaatgaccgctatttttcggtgatctctgttattttgctttacggtcagaacaggtcggaagggattgaatacggcgcactggataccgtgtttttttagctgctttgcgtagtctttcggaagagtgagaaagcaacccatatcgtcataaatcagtcgcacagttacgccttgcgtggtttttcgcttcaaaacttccaagatgctgttccacataacgccttcctgcacgatgaaatattccagaaatatgtacttctcggctttttcaagttccgccaaaagtgtttccagctttcgttcacccggtgtaaggtaatgtgtttctgtatctgcatatattggaaaccccgtgtattcctgcaagtaatgaatttgagggtaatattcaggcagttgttttgttgcgctttcatagcaaatgccggggagtgcatagagtggttttgccttttgttgtgtatggaggacactttttgcaaagcgccatttcgaggattgtgcattagacaaaagatacatcagtccaccaaacaacgggaaggttaggatcaggatcgcccatgcagttttgtaggcgcctttgtctttctgggaaacgatataaagcaccgcaatgatactgacgattgtcagtaggcgactgaaatttcgggaaagctgacttcccccaagtacaaggcatataagaaaatatacctgtaaaagtagcaggagtatcgtcaacatccttctacggaataagacacggagccaacgctggcgcataatgattcccccccttcaaactcaaatctacggattctttttccgctgttcgcaaaattcccaaaactcttttgcaatgcgctcgtaggtgctttttcctacgagatagctcatacagtggtcagcgcccggaacaatcagcagacgcttttctgatgtacaggctttatagttttcgtatgtcatttcaaccggaacaaagtggtcatctgttccgtggacaaaaagaacaggaatttggcagtgcttcaacgcttctgtagttgaggcagcatcagcatccatttggatgcgctttttgcacatcctatcggcacctgttttatgcagagcataaggaatatgcagattgctttcggagacatgtttccaaattgcatggagcgaagtaaatgcactgtccgctgcgattccaaatacattatccggcagttccagttcggacgccattagcacagaggttgcacccatggataccccggcaagatagatgggaatgctttttcctgttttctcgtttatccaatttgtccatgccaggcaatcgtagcgttccagcaaacctaaactcatatggtcgccgccgctattattttgtccccgctgctctgcgtagagtacagaacaatgattattgcgccagaaatctgcgattagaccaaaatcatgtgaccaggaggaacgccacccgtgcatggcaactatagttcttttcggttcttcgcagggacaccaatgcccaatcaatgaaattccgtcgtgagcagtgatttccaccacgtcacagccgcttttttcgagctgaccagctgccttttttacaatttcagtggtttctatcatttcaggtgaaccggacacacgcatttttccgttgcttctgtcctgcggcgcaacccgatccatggcgagctgcatcatctttttggttagaagatgatgccaaagcacacaaatcgcactaccggcagcacctattatcaatccttttttcaatgaatccttcatagcacgtcctttcataacgtgggtataacttactctttgtcattggcagttttcttacttaattttctgcgatatgcgtaatataacagaatcgacattgaggctttttcataaccaaacttgccgaagcactggaacgccgcattgagaatggtcaatctcttttcttcggtcagggccaaaaatttgttcaattcatttccttcttcttacacaataaccgtttcggttattcagagtatagcaccaataaccgaatcggtcaagtgttaatgcagcaagtgtattgatgcgctttttgcaagcgtcatctgcgctcatgtctggataaaagaactgatccaccgatatatcgaacattgtcaccatctgataaaaagtgttcaagctcggatgctgaccgtcgttttcgttatatatgatggtgcggggatcacggtcaatgataagggccagttgatcctgtgtcatcccgctggtttctcttttgcgctttatctcgcaccctatatcgtggaaatcaaatttgcgctcatcgcgttcaaatttcatagacatcacccaatgtaattttatatttcaggtagtagtatttgaacgaattacattttcgtgcaactgctgacttgaacacaccggtactttcgagactaatcttcgttggtctaacagtataaaaagaaaacttttgaatcatactccaaaatacttgaccgtttcggttattggtgctatactctgaataaccgaaacggttattgtgtaaaaaggaggaaatgaattggacaaatttttggccctgaccgaagaaaagagattgaccattctcaatgcgg

SEQ ID NO: 907 - DNA, 27826 bp, Unknown
  16S sequences of unknown bacteria
ttttgcgaaaaaaccttgcactttaaaaagaatcacattttgattctttttaaaatcaggcgacaatcaatggatactgacggtcaaaacaaaggttttgacccataaaatcaagattttaactcggttttatataattgcatttgctaatgcaattattcagtagacattatattatcatcaacgcatcgaattattccgagcggaaatcaaggcgttttataaggctgccgtcacagtcggccttagcatacgccgtttgcatatgtaaccggcacaacccgtttgatgcgtccgcctttgatgaaagccgattcatttgctcgccgttaataaaaagcaccgttgtgccaagtcacgtatcaaaccttatttcagcctcgctcggtttgttcctttgttataacctcgcaaaatcccatccctttaaatcaattcaaaggtaagggaggggaaatttgttgaatataaaagcagtgctgtttcttaaaaacggcattatccggtcaaatcacaaatttttcaaataagcgtcaagaatatcaagcgcggttttaagctgtttggggtcaaggtcctttaatcgctcggttatctcgtcaaaaacatacggtgcgccggatggcagctcattgcacagaatataatctgccgaaacattaagcgctcgcaccagctttataaatttatcaagcccgactaccttcttgccgcgctctatttcgcccaaatataccgtactcatgtcggaaagctccgccagcttttcctgtgtatagcccgcctcggcgcgcaggtatctcaaccttttgccgaattctgttttatccattttttacacctctgctatagcattgtttatactttataaagtatagcttaattaatgtgaaaatggaatactcaataatatgttaagtatgctataatatatgtcaatttaaaaattttacagcgtcaaatttccgcgaagaaggaagcaccggtccgtcattcgggtgctgcataaagcgcttcggcgctgtgcgcgaaaaatccgccccgctgcggtcgttaaacgactgatgcggggcggatttcttgatttaaccgtttacggctaaatcaaagagcaccgaaacacatccgatgctctccgtcttagtacacacatcatcggcgcatacaactgcgcgtaaaaaatgtgagtactaaatttcggcttaatgccttaaaatcatattaactcgataattgccatttcggcagcgtcgccgcggcgcggtccggtcttaacaatgcgggtatatccgccgttaacatccgaatacttgggagcgatttcgttgaagagctttgcaacaacatcctccttagtaataaacgccaatgcctgacgcttgctgttcaggttattatccttagcgagtgtaatatacttctctgccattgctcttacttccttagcgcgggtaacggtggtctcaattctgccgttttcgagcaggtaagtaaccattgccctgagcatagcagttctgtgatcgctggttcttccgagtttacgggtacctggcatttccattcactccttattgcagcaaaaattgctgcggttttgctttattcgtcgtcgtttttaagggtgaagccgaaagaattcagctttgcaatgacctcttcaagcgacttgcggccgaggtttctcaccttcatcatgtcctcctcggacttgttgataagatcctctaccgtatttatacctgcgcgcttcaggcagttgaagctgcgtacagataaatccagctcgtcgatcgttaaatcgagaaccttttccttctcgttgtcgttcttttctgccataatgctctcggtctcgcttacaccctcggtcaaatcgaggaaaagctcaaagtgctcaataagcaccttcgccgacatagaaatagcctcgttagctcttatagagccgtcggtccaaatttctattgtaagcttacccttatctgtgacattgcccacgcgggtattgtcaaccttaaagttagccttgagtacgggcgtatagatagaatcaacgggaataacgccgataacattctgcgccggtctgttctgctcggcggaaacatagcctctgcccttatcgagagtcatctccatattgagctttgctcccgcgtcaagagtggctatatacatatcgggatttaaaatctcgacttcggaatcggcttttatagaagcggcggtaaccacacaggggccctctgcctcaatataaacttttttcgccgtatcggcatggagcttcgcaatcagaccctttatgttgaggattatttcggtaacatcctctttcacaccgggaatggtggaaaactcatgcacaacaccgtcgatcttgaccgaggtaacggcaacgccgggaaggatcgaaagcagcacgcgcctcatgctgttgccgagggtcgttgcatagcctctctccagcggttccataacaaacctgccgtaagtgccgtcgcttgtcaattcagcggtatctattctgggcttttcaatttctatcatttaaaagctccgtttctccgtaccgtaattttatgttccgcagtgcccggcacggtgaacgctgcgttatttcgggtctattacttagaatagaactcgacgatgagctgctcgtcaacaggagcttcaatctgttctcttgtcgggagagctataacctttgccgaaaggttgttgcggtcaacgtcaatccactccggaacgggtcttgcgctgttagcctctacaactgctttgattttctcgcttgcgcggctcttctcgcagatagaaacaacatcgcccgctttcaggagatatgaagcaatgtcaacgcgcttgccgttcacttcgtaatgaccgtgacctacaagctgacgagcctctgctcttgacgaagcaaagcctactctgtaaacaacattatcaaggcggctttcaagtattcttaaaaggttatcgccggtaatgccctgctttctttcagcaatttcaaaataatgatggaactgattttcctggacgccgtagaaacgccttgcggtctgctttgcgcgaagctgcataccgtattcggacgatttctttctgccctgtccgtgctgaccgggagcatagcctctcagtcctaccgagcatttctcggaatagcagcgctcgcccttaaggaacaatttctgaccctcacggcggcaaagtctgcaaactgcaccggtatatcttgccatctgttacacctccaaaattttagctgcaatataaattgcaaattagttttaaccgattatacgcgtcttctcttgggaggacggcagccgttgtgcggaatcggggtaacatccttaatcatgcttacctcaagacctgcggtctgcagtgcgcggatagccgcttcacgtcctgcacccggaccctttacatacacttcaacagtcttaagaccgtgctccatagcagccttggcagcagtttctgccgcactctgagccgcgaaaggagtagactttcttgagcctctgaaacctaactcaccggcagatgcccatgaaagagcgttgccctgcgtatcggtgatggtaacgatagtgttgttgaaggtagactggatatgagcagagccacgttcgatattctttttctcacggcgacggcgtgtagcggtcgtcttgccctttgcagtagccatattatcttcctcctacttatttcttcttgttagctatggtcttcttcggacccttgcgtgtacgcgcattagtctttgagcgctgccctcttaccggcagacccttcctgtggcgtaaaccgcggtagcttccgatttcgataagtctcttaatatcaaacgcaatcgtacggcgacggtcaccctctacctgaaggttgtggtcgatatattcacgcagttttgaaatatcgtcttcggttaagtccttgacgcgggtatcgggattgatacctgtatcggcaaggatttttttagatgttgtaagacctatgccgaaaatgtaagtaagtccgatttcgactcgcttttcgttcggaagatcaacaccagcaatacgtgccatttatcaaagcacctccatttttttcttcacgcgcaattaaccctgacgctgtttgtgcttggggttttcgcagataaccattaccttgcccttgcgcttgataattttgcatttttcgcaaatctttttaacagaaggtctgactttcatttggattatacctccttaaatttttgactgttattttgaacgccaggttatgcggccctttgaaaggtcgtacggagacatctcaacagtcaccttatcgcccgggagtatgcgtatgaaattcatacggagctttcccgatatatgggcgaggattatatgtcccccctggatttctaccttgaacattgcgttaggcattgcctcaacaacgacgccttcaagctctatcatatcttctttagacatttcggttcctctctttcaagccttcgtctctgaaacgcgccaattcccgcctcagagccttatcggttttatagctgtttttatcaagaaatgtgtttgtaaacgctgcgtgcttcacatttttgcgtttaggtttttcaagcgggcgttccttaccgtcacaaaggtaaaggaatttatcgtccgcgttcacaaccaccatcgggtgattcttatcgcgtcccgcctttgaaaagactatgcgacccaccataagcgtttcctcaaaccacggtcatgattttaggaccgtcggcggttatcactatcgtatgctcaaaatgagccgaaagcgaaccgtccttggttaaaacagtccacccgtccggctgaaccttaacatcgtagccgccggcatttaccattggttctattgctatggtcattccgggcagtaggcgtattcccctgccgggtgtgccgaaattgggaacctcgggagcttcatgcaggtgtgtacccacgccgtgaccgacaaactgccgcacgaccgaatacccacgcgcctcaacataactctgaacagcgtgacctatatcaccgattctgccgcccgcgcacgccgcgcgtattccctcgtaaaggctttcgcgcgttgtgtccatcagccgcttcgcctcagaagatacatccccgcaggcgaaagtggcggcgttatcgccgtgatacccgtcgaacttggcgccgaggtcgatacttactatatcgccggcgcgcagcttgcgcttttcggaaggtatgccgtgaattacctcgttgtttatagatatacaggcagtagcggggtagccctcgtaatttttaaagttgggctcgccgccgcggcgtcggatgtattcctccgccagacggtcgatctcagccgttgttactccgggctctaccgctttgccggctgcctctaatgctccggccgatatactgcaagcctctttcattattttaagctcgcggccggttttaagcactatcatatattcttctccagcgcttcgagtacaagacgggtagtatccttaacctcgtcctgtccctcgacagtgatgagctttccgcagtttttgtaataatctttcagcggctcggtctgctcgtgataaacgttaagtctgtttttcacggtttcgggctcgtcgtccttacggataacaagcgcgccgccgcaggaattgcaaacgccctctttagccggttttttatactcggtgtggtagctggcgccgcatttttcacaaacgcgtctgcccgacatacgctttactatctcgctgtccgcaacctcgatagagagtgcggcatcaataccgaagcccatttcgtcaagcgcctctgcctgcggaatcgtgcgcgggaagccgtctaaaatgtaaccgtttgcacagtcgctttcagccaaacgctccttaatgatgccgataacgacatcatccggaacaagctcgcccgcgtcgatatatgattttgccttgagtcccatttccgttccgtttttaagtgcagcacgaatgatgttgccggtggaaatggtcggaatattatatttttcggagattatctccgcctgggtgcctttaccggcgcccggtgctcccaaaagaatgagcttcataatttaatactcctattcttaatcgaggaatcccttgtaatgacgcatcatcatctgggattcaagattacggacagtgtcaagcgcaacgcctaccataataagcaccgacgtaccgccgagggaaatattgattccgccgacgctgccgatgagtatgggcaggatagcgataacgcttaagaatattgcacccatgagcgttattcttgacaaaatctttgaaatgaagtccgaagtggacttgccgggacggattcccggaatagcgccgccgtttttacgcaggttgtttgccatttcaatcggattaaactggattgttgcatagaagtatgcaaatccgattatcagaacgaaatagattactgcgtagaaaacgccctgaacgctgaagagtcttaataccttatagaaccagtggttctcgttcttccagaacgaaagtatcatcgtggggagcataagtatgctcgaagcaaagattatcggcataacgcccgacatattgaccttgatcggaatgtgggtgttctgtccgccgtacatcttattgccgacaacgcgcttggcgtactgcaccggaatgcggcgctccgcctcggtcatccaaacgatgaaggctataaccagtaagaacataactactattccaacaaccgcaaactgcttatcgagcttccagtaagcgataagtgtgttaagagcctgcgggccgcgggagataatacctgcgaaaagcagtattgaaataccgttgccgatacccttaacatctatctgctcgccgagccacatcacaagcgcggaacccgccgtaaaggcaagtattataacgaacgccgcaaagatgacggcaccgccggacacgcttaaatagttgctgtttttgagatagaagaaatatgccgtaccttgaatcagcgccaaaataaccgttgtgtaacgggttatctgggccaatctcttctgtccttcctctccctcttttgaaagcctttcaagataagggatagccacacacagaagctgtactataattgaggagttgatgtacggggtaacagacattgcgaatattgcgccgtactcaagaccgcctccggtaagaatagacaggtagctgaaaaattcattcgttgttcccgattcggttgcggattttaaagcagcaacatcaatgtacggtacaggtattaccgaaccgatacggaaaatcaaaacgatgaaaacggtaaaaagaatcttattacgaatttcttttattttccaggcgtttcttaatgtttctaacatcagatcacctcagcctttccgccgactgaattgattttctcagcagcagccgcagagaaagcgtttgccttaacggtgagcttctttgtaagcttgccgttagccaaaaccttaatgggaaggcttgctttctttactatacccttatcagccaaagctgcagcgtcaaccgtagcgccgtcctcgaacacctcaagtgcggaaaggttaatcgctatccattcttcggcaaaaatattattgaagccacgcttaggaatacgcctctgaagcggcatctgaccgccttcaaagccgggtctcataccgtgacccgcacgagccttctgacccttatgacctttaccggcagttttgccgttgcccgagccgtgacctctgcctatacgcttcgcctcttttgtagagccgaaagccggagataattcatgcattttcattgttcgcacctccttgcttaattcgcgcggttaaaaccgcatttccgctttatgcggattgaaaaaatcattttgcggccgtaacctcaacaagatgagaaatcttgttgattttgcccttggtctgctcgttatccggctgaattctctcatcgccgattttgaagagaccgagagcgtttgcggtagctatctgatcctttttggcacctatggtgctttttaccagctttactttaaggccggcagccttttttgttgccataacgctgctcctccttaaccaatgatttccttgacagacttgccgcgtacagctgctacttcctcggcgctgcgaagcgaagcgaggccggcaacagtggcgcgaacaacgttgcagggattgttcgatcttaaagccttggtacgaatgtcggaaataccgacagtctcaactaccgcacgaacagcgccgccggcaataacgccggtaccgggagccgcgggcttaagaagaacgcggcctgcgccgaattcgcctataacctcgtgcggaattgttgtaccctttaaggatacctttataagattctttttagcgtcttcaattcctttgcggatagcgtccggaacctcgcccgccttgccgagcccgtagcctacgatgccgttgccgtctcctacaaccacaagcgccgcgaacttcataatgcgtccgcccttaacggttttggaaacacggtttatggcaactacgcgctcttttaaatctaatgttgatgcgtcaatatttgtagccaaaagtattcctccttatcagaacttgagtccgccctcgcgggcaccttcggcaagctccttgacacggccgtgataaatgtatccgccgcggtcaaaaacaacctcggtgatgcccttttcagcggcgcgttcagcaattaactttccaaccttgtgagcgccctctttgttgccgccggaaattccgaaatccttctcgttggaagaagcggccgcgagtgtaacgccgtttacatcgtcgataagctgggcgtaaatgttgctgttggagcggaatacatcaaggcgaggacaagccgccgtaccgctgacctttgagcggacgcgggcgtgacgcttaagtcttgcctgattgctgtttggtcttgtaaccatcgtttatacactcctttattatttcttagcacccttgccggctttaccttccttgcggcggatatgctcgtcggcgtacttaatacctttgcccttataaggctccggcggacgcttctcgcgaacttccgcggcaaactgaccgacctgctgcttatccgcaccgcttataactacctggttgggagtcggtacgtcaatggtgattcccggaatctcaggaatgattacctgatgagaatatccgaggttcattacaagatttttgccctgcttctgggcacggtagcctacgccgttaacctcaagcgtttttgagtagccgttggtaacgccctcaaccatattgtggataagggtacgggtaagaccgtggagcgcacggtgatttttgtcatcggtcgggcgggtcacgattatttcattgccctcaagcgcaatgtttatttcgttattgaaggtgctttcaagtgtacccttgggtccctttacggtcaccttgctgccgtcaaccttaacctcaacaccggcagggattgcgataggtttctttcctattcttgacatcctctcgcacctccttaccagacgaaagcgaggacttcgccgccgacattggctttgcgtgcctgcttgtctgtcattataccctttgaggtggaaaggatggctatgccgaggcccttcataaccttgggcatatcctctacgtttgtgtagatacgcaagccgggcttagaaactcttctaatgccgcttataacctgcgatttattatggccgtacttcaaagtgatgtgaattacgccctgctttccgtcttcttcgacctgaaagcccgagatgtaaccctcgtcaagtaaaatctgagcgattgccttttttacattcgacgccggaacatctaccgaatcatgctttgcagcggatgcattacgaattctcgtaagcatatccgcgattgtatcgctgatttgcatgccgtcaacctccttcagctttgtgccttaccaactggccttcttcactccggggatctcgcctttataagcaagctctctgaagcatatacggcaaatgccgtacttgcgaagataagcatgtgggcggccgcagattttgcatctgttatactctcttgttgaaaacttagcaggtcttgcctgcttaactttcatagcagtcttagccattattacttctccttatctcgcaaacggagcgcccaaaagcgttaataactcgcgggcctcttcatctgtcttcgcagttgtgacaaaaattatatccataccgcgcaccttatcgatcttatcgtactcgatctcagggaaaataagctgctccttaacgcccatagcatagttgccgcggccgtcgaaagcgttcgggttaattcctctgaagtcgcgaacgcgcggaagagccgcattgaaaagtctttcaatgaactcatacatacgctcaccgcgaagcgttaccttcgcaccgatcggcataccctcgcggagcttgaagttcgcaaccgacttctttgcgcggcagggaattgccttctgaccggtgataagactcaggtctcgcagaatagcgtcgatgaccttggagttttccttggcctcgccggcgcctacattgataacgaccttttcgagcttcggaatctgcatgacgctcttgtagccaaattttgtcatcagtgcgggagcgatcgaatttttatattcgttcgacagtattgacatgtcatgtcctccttatctcttaaaaagtctcgccgcattttttgcacatgcggtcttttttgccgtcctcgtagaccttagtgcctactctggtgggcttattgcatttcgggcaaacaacctgaaccttgcaggcataaacagcaccgttggtttcaattataccggacggatctcctgcctttttcggtttagcgtgttttttaacaacgttgatgccctcaactataaccttaccctctttggggctgacctcaagcaccttgccggtcttcttgcggtcctttttgtctcctgtaaggaggactacggtatcaccggttttaacgtgaagcttactcattgttttctacctcccattaaagcacttccggagcaagggacaggatctttgtataatccttgtcacgcagctcacgggctaccggcccgaaaatacgggtaccgcgggggttcttgtcatcacggatgataacagccgcattttcgtcgaatctgatgtatgtgccgtcattgcggcgaagacctcttgcggaacgaaccacaaccgcctttactacatcgcccttctttacagtaccgcccggagcggcctttttaacagaagccacgatgacgtcgccaatgttggcatacctccttctggagcctccaagaacgcggatgcacataatttccttagcacccgtattgtcggcaaccttgaggtaactctgttgttgtatcacagtgttttcctccttgtagactacttagccttttcgattatttccgccacgcgccaacgcttatccttggagagtggtctggtctccataataagaactctgtcgcctacgccacaggaattgttctcatcatgagctttgagtctgatagtgtttttaatgatcttcttatagagcgggtgcttaacgttgtcctcaatggcaactacgacggttttatccatcttgtcgcttacaaccttacccactcttgttttacgaaggtttctttcgctcatttagcctttcctccctctctcaagcgttggtgctgtcgtttttgagctcgttctcgcgaatgattgtcttaacgcgggcgatgtccttcttaacggcagctatacgcatggggttgtcgagctggttaatggcgagttggaaacgcagattaaataattcctctttaagctttgtcaactggtcattcagctccggcaaagtgttctgtctgatttcctttgcattcattactgctcaccacccatttcctgctttgttacaaacttgcacttaataggaagcttgtttgcggcgagacgcatagcctcgcgagccaattcctcgctaacgccgccgatctcgaacattacgcgaccgggcttaacaaccgctacccagtactcgggtgagcctttacctgaacccattcgggtctcagccggcttttcggttatcggcttatcggggaatatctttatccaaacctgaccgccacgcttaatgtagcgggtcattgcaatacgcgcagcctctatctggttagaggtgatccacgccggctctaaagcctgaagaccgaaatcgccgtgtgttacggtgatgccgcgtgaagcggtaccggtcaaacgtccgcggtgaactctgcggtatttaactcttttaggcattaacatcagcgggcgcctccttcctttttaaccttgcggttatcagcgagaacctcacccttgtaaatccaaaccttaacgcctatacgaccgtaggtggtgtttgcctcggcaaaaccgtagtcgatatcggcacgcagggtctgaagcggaattgttccctcatgatactgctcgcttcttgcgatttcagcgccgcccaagcgacccgaaacctgagtttttataccctttacgcctagacgcatagctctgcctatggagagcttcatagcgcggcggaaggaaatacgcttttcaagctgagccgcaatattttcggctacaagctgagcgttagcgtccggattctttatttcaacaatgttgataagaaccggcttgccgagcatctgctggcaggtggcgcgaagcttttcgatttcgctgccgttgcgtccgatcaccatacccggctttgcgcagtggatatgaagtcttacgcgcttgtcgtcacgttcgatttcgatttttgcaatacctgctgtgaagagggtcttcttgaggtatttacggaggttatagtcctcaaccaatgtgtcgccgaaaacgctgtcattggcaaaccaacgtgagtcccagtttttaattacgcctacacggaaaccgtgcggattaaccttctggcccataacttaacctccttcttagatttcgcgttctttaagaacgattgtaacatggcttgttctcttcaaaattctgtgggctctgccgtgatccttcggacggattctcttaagagtcggtccggggcagacaaagcactctgcaacataaagacgggaaacatccatgttatgattgttttctgcattagccatagctgacgctaaaagcttctccaaatactcgcaagcggacttaggagtaaatttgagtatagccatagctttttcagcatcctgattgcggatcaaatccaaaacaatcttcaccttgcggggtgaaatacgggcgtatttaagtgtagcccttgcttccatagttaaactctcctttcagccgcttacttaccggtggtctttgaaccggcgtgacctttaaaggttctcgtcggagcgaactcaccgagcttgtgacctaccatatcctctgttacataaaccggaacgtgcttgcggccgtcatgtaccgcaaaggtgtgtccgacgaaatcggggaatatggtcgaagaacggctccaggtcttaagaactctcttttcaccggcttcgttcatttccttgactcttttgagcagaacaggctgcacataagggccctttttaatgcttcttcccatgattaatctcctttcgtcgaattacttacggcgctttacgatatacttatcggtgcgcttattcttctgacgggtcttgtaaccgagagcaggtttaccccacggggtaacaggtcccggacgaccgatcggtgatttaccctcaccgccgccgtgcgggtgatcgcacgggttcattacagaaccgcggacggtcggtctccagcccatgtgacgcttacgtccggctttaccgtaattaacgtttgcgtgctccggattggatacaacgcctacggttgccatgcagtttgccggaacgttgcgaagctcgcccgagggcaaacgcaaaagcgccattccgttttccttagccataagctgagcggtgttgccggcagaacgtgcaagctgagcacccttgccggggtaaagctcgatattgtgcaggaatgtacctaccggaatgttgataagcggaagtgcgttgccgggcttaatatcagcctctggaccgcttactatcttatcgccgacctttaagtcctgcggagcgattatataacgcttctcgccgtcctcatactgaacgagggcgatgaacgcagaacggttcggatcgtactcaagagtctgaacggtagcggttataccgaaacgctctctcttgaaatcgataactctgtactttctgcggtttccgccgcctctgtggcgaacggtgattctgccgtagctgttgcgtccggcattctttttaataggctcaagcaagcttctctcgggagcaacctttgataacccggaataatccatagttgtcatattgcggcggcccggagtagtcggcttgtaaaatttaattgccatttgtttcactctcctgttttggcttagcgaagttatctttaaaaaacttcatacatcaccggaaatccttgatttcccggtcgcggctatcagataagaccgtcgaagaactcaatcggctttgaatcagcctttaaagtaacgattgcctttttccaggctgcggtatagccgttgtaacggcccatacgtcttgcctgaccgcgaacgttgattgtgttgaccttagcaacatcaaccttgaaaagctttgcgacagcgtcggctatctcaatcttgttagcgtccttagctaccttaaaggtgtatttcttatcggctatacccgacatactcttttcggtaattaccggagctataatgatatcctgtgcggttttcattatgcatacacctcctcaagctttgctacggcattctttaccaccacgagagtgtcggcattgattatgtcgtaggtgttgattgttccgacctgtgcggatttcgcacccgcaatgttggcaatgctctttacggcgaacgcgttgttatcctcaagaactatgagagtctttttaccggcgcctattgcctttaagcaatcggcaacgaccttggttttgtaggtctcggttttaagctcgtcaagaactatcatatcgcctgtgagcaccttatccgacaaagcggatttgagagccagtctcttaacctttttattgagagagtaagaataatctctcggcttcggcgcgtgaactataccgccgtgtctccactgcggagctctggtagagccctgtcttgcgtgaccggtacccttctgtctccacggctttttgccgccgcccgatacctcggtacgagtcagagtggactgcgtgccctgacgctgatttgcaaggtagtttacaaccgccgcgtgcataaccgccgcgttaggctttattccgaaaacggcgtcgctcaaggtgatttctcccacgcttttgcccgccatatcgactactgctatattaggcataatttagaacactccttcccttacgctttaacgctgtcgaaaagaaccactattccgcccttggggccgggaacggcgcccttaaccgcgatgatgttcttttccgcgtctactttaacgacactcaggttctgaacggttacgcgctcattgccgaggtgtcctgccattttctttcccttgaaaactcttgacggagttgagcaggcgcccaaggaaccgccgtgacggtgaacagggcctgtaccgtgagtttccttaagtcttccgaagttccagcgcttaatggtgccggcgtagcccttaccttttgaagtgccgcgcacgtctaccgaatcgccctccgcaaatacgtcagccttgattatatcgcctacgttcatagcgctgatatcttcaaagcggaactcgcgaagaacctttttcggagcaacgtcgcccttctggaagtgacccttctggggcttgtttaccttagaagccttcaaatcgccgtagcctatctgaacagcctcgtagccgtcgttctcagcggtcttcttctgcgaaataacgcaggggcctgcctcgataacggtaaccggaacaacgtttccgtttgcgtcaaaaagctgagtcataccaagctttttgcccacaataccctttttcatatgattttcctcctttggttattggttggttttcaccaacttgacctgcggtgtgcgattaaagtttaatttcaatctctacaccggcgggaagctcaagattagtcagagcttcaacagttttgttggaaggtctgattatatcaataagccttttgtgcgttctcgtttcaaactgctcgcggctgtccttatctttatgaacggcgcggagaatggtaacaacctctttttcggtgggcagcggcacggggcctgatacccttgcacctgtacgtttagcggtttccactattttctcagcggactggtctacaagcgcgtggtcgtaacctttgatacgaatacggattttttctttcactgccatgtgaaattcgcctccttaagtagttggcgggcaaaacttacaacgcgccgtgtttttctttactgcgcattataaaaccggcattgctggggtcacagacaattccggacagcagatcgctctgccgctgtatacaagagccgcaagatctcttatatacttcctgacttttcgcccggtttaaaatcggacatactccgcggaaatttcccgactcaaggtcggccacctcccgcatcaacgcatgttttacgccgcattgaggcagcgtactgtagtatcataacacactctttttcaaaaatcaagctttttttgccgtttattttgatttttttcgcgtttcattataaaacgagtgtatccgccgaagctgaaaataggatatattatgtttccgtgcgttcggagcttaaaaaatgccgttttgcgttgttatacgcatgtaacactttttcggccgttacatatcataatagtgaagttaatgtgttgccccggcgatacgacttcaattattctacaggaggcttttatatggcagatttgaaaaacggctgcccgcccgagaacgctacatttaaggaagccgtatgcgtagacgccggcagagtatacgattcctgctgtgaccgcgattgtcttgaggatctccgctgctttttcttggcagaggatcaggcgcttataaacagcgctatcagcgttaggctgcgctcggcagaggtacttaatgtttttatcgatgttgaaccggtaaacttcaacaaaggcttttattcctgcgatttgaccttcttcttcctgctcgactttgatatttacaccgctccgcattcctgcccgcagtatatccgaggcatatcctcttactcgaaaaaggttatactcttcggcagcggcggcaatgtgaaggtattttcaagccgtgacagagaggacggagactgcgacacaagcgcgcgcagaagcacgaacatgccgaaatgcgtggttcaggcggtcgatccgattccgctttcggcgagaatcggcgaaattcacgattgctacgagaatgtccgctgcattccgaaatgcgtatgcgaggtgctcggcggcaatgcggtcaccgagctgcagaacggcacgccgaccgtttatgccaccttggggcttttcacgatagttcagctcataagaaatgttcagatgctgattccggtatacgatttctgcatacccgaaaagcagtgtgacgattccaccgaccgtccctgcgacaccttcagaaagatcaaattcccgaccgatgactttttcccgccgcgcccgtgcgacgcggataacgactgctgcggctgccaaagaaccgagcagtaggaatttgtgaaaaacaacgcctccctctgacgagggaggcgaaagccgcaattttctccgcacaccgaaagcagcaaagtctcctattcggcaagcagaataggcgatatatcaagcttatcaaagcctttaaagaaatccgctattcccgctatatcccttttaataccaccggggatgcggctttcaaagtttatgggcataaccgggtcgtgaacgctcagcctaagtaagaaaaatccgttttcggtggatattctcacgccctcgcggtcatcatcggcggttttgtaatcgggtcttgcttctgcgtattcgcgcagtttttttataaccgtttcgccgtattctctgaaattttccgccgttatattaaagcggaactcggcttcctcggcgggcattttaagcggagcgagaattttttcgatatcgcgcccgcgcgctaattctattactattttagtcactaaatacgcgccgtcgtcaagaaaatagttttcccttaaagccgcatgacccgaggtctctatggcaagggggcagtttatgccgtcacgacacaactcaatcgccttgtttataacatttttatagccgcggcggtagcggtagtgggtatcgttaagtgtattttcaagatattcgcgcagcccgtcgctcgttacggaatcggtaactatggtagcgccgcccttttcgcccgacaccatatatgcagcaagcgctataaggcggttgcggttgatttcctcgccgtcagccccaacgcagcccgcgcggtcaacatcggtatcgaaaataataccgagatcggcgttattattcctgactgccgcgcatatgcttctcatagcgtcctcgttttcgggattgggtatgtggttcgggaacattccgtcaggctctaaaaactggctgcccgatatatccgctcccaacctttcaagtacatccgtagcataaaagccgccggcgccgttgcctgcgtccaccgctattttatagcccgaaagcggcttttcttcttccgttttgcccacagcgtcgcaaatcattttgcgcagccttgcggcgtattttaccatatagttctgctttacggcaacgcccgcgcggttgcaaataatttcctctccattatcggcgagctttacaatctcggtaatatcgggcgaatcaagcccgcccgcgggggtgaaaaatttcagcccgtttcggtcaaacgggtggtggcttgccgttatttgaattgcggcgtcggcttttaaatcgaccgtggtcataaacatggcgggggtagagcaaagcccgcagtctattaccgatattcccgcgttaataagcgcgcttattacctgctttgctattttttcgccggttattctggagtccctgcccacggatattgtaagctttgagggatccttatcatatttatttatgtaccatgaaacaaaggcggcggtaatatcgtaaaccgcctcgtcggtaaggtttacctcttttccgccgaggggagaggctacgccccttatatccgtgccgcttttaagtgaaatgtaactcattttaaaactcctatccgaaaaaatatccggccgaaaaatagccgattattataagtattacggcggacgccgtgtaaagcatcgcctttaaaaacgcggtctttccgctgctttgcatatcaatcacccgataacagtgttcccgaatacataaaatttatttatcggaggcagacgaatgacggtatacaagctatcaggcgacaaaataagaatcgccctttccgacagcgaggtgctctcgtttttcgggacttatgaaaaattcgcctccttaagcggcggcacacggcttgcagtgagtcttttgcttaaggaaagccttgaaaaatacggtgatattttaggcgacaacctacttgtggaaataaaggcaagaaaatccgccgggtgtgttataaccgtatcccccgctgtcggcagagcgcacggcaaagaccgcgttatgctcattttccccgacagcgaaagtatgataagcgggattaaaaggctttattcacgccgcctgccgcacggaaaaaacagcctttaccgccttaaaaacagctaccgccttgtcataacggggcacagccgcgatttttattttatgaccgaattctgcaccgtaaaaaacgcaagcgagcccgaaatcgcctacaccgaggaatacggcggattgctctgtgaggataccgccgttgaaactgtaggcagggctttttctaaagatttttaaggtcggcaaccgccttgcccatatcctccgccgagaatacgcagctgcccgccacaagcaccgtggctcccgcatttaccgcaagcggcgcggtttcgtagtttatgccgccgtcaacctctaaatcaatgttcaagccctgttttttgatttcatcccgcagggtagaaagcttataaagcgccgagggcataaatttctgcccgccgaagcccggctcgaccgacattacaagcaccatatcgcaaagcggcagaaactcaaatatctcctcgggcgcagtgcccggctttattgtaagacaagccctgcagccgcgttccctgatttcggtaagagtagcacgcacatcgctgcccgcctcgtaatgaaagcccagaatatccgcggcctcggcaaactgctttatatacctgtgcggacggtctatcataagatgcacatcaagcggcagcgaggtatgctttttaatagactttataaccggcacgccgaacgaaatattcggaacaaagataccgtccataacatccaaatgcagcatatccgttcccgcggcctctaatttttttatatcgtccttaagcgtaagaaagtccgccgttaataccgacggtgaaattttaaccgacaagttgctcacccctgcatatatttaacagtaatattttaacccctgcggacattattgtcaatgaaaaagcgcattttaagcgccgaaataccttccgggagatacgcccgttgcacgcttgaacgcaatatgaaagtaagaggtgcttgaaaagcccaattgctcgcttacctccgaaatgctttttccttcccccaaaagctttaccgccatgcgcattcttattgaattgtggtattctattacgcccttgtcgcagaacatcctgaaaatacgcttaaggctgctgcagctcaaattgcaggcgcgcgcggtctcctcgacagtgacgctgcggcagcaggcatcctcaagatagcttacaatctgcctgtatatcgcggcataacgcgaatcctcacggtatgcggtttccttttctccgcgcagtcttaaaagaaacgcctcaagtcccaccgccgcggcattgctctgccaggaatattccgacatatcgcccttatcaaacagctcgattgctctgcggcaggcggcgtttatcccgccgaattcctcaagcagcaaatcgttgagcgtgaaaagccgatcgcggaagtaagccattccgtcgctctcggcctcaaaggatattataaagagtctcggcgcagtaccctccgcagaccacaccctgtgaaactccatcggcttgtgaaaaagcagattgccttttttgaggttatatacccgttcgtcggcggtcgccattgccgcaccctccgccacacagactatctcccaaaaattgtgcatctccccggggaaataaaaatccttcggccgcaccgcgtcgattgcggttataaccgattttatgaaaattttacgctccgttttatgaaattcaaatttttgcagcatatttttcaccgtttgtccgattttaaatcaaatccgcccgatttccgataatattataacatcagacaacacttatttcaagaacaaagagtgcattctcaaaaaaaccgcagacgcgcgcaattccacccgcggtagagcaaatttcgggcggctctaccgcggctttaccgcaattagagaccgcccgttcggcagttcattgctttgacggcaaaaataatttaaaataattttcggtgattaattatgatgaagctttgcaaaattataaggattataaccgtggctccgctcgcggcggcgttggctgtaacgctgcttttcctgcacggcggattttttgcaaacggtacgaattttgcggcggcgataatatctcttacggtctttccgctgcttgcataccctgtaagtcttattaaaaagggggatgaacggcgcagatttcagcgctcgctggcaatcgtgcttgccgttgccgggtatataggcggattgctgttttcccttgccgcaaacgccgctgagggtgaaagagtgctgtatcttacctatctgctttcgggcgttgccatcgccttcagctcctttttgttaaaaaagaaaagcagcggccatgcctgcggaatcgcggggcccgtggcgctgctggcatattatgttcacccgctttaccttttagggcttttgctgctgctccccgtcggatatgcctcacttaaaatgaaaaggcatacgctgccgcagcttatttcaggcgctgttattccgatagtctgccttattctctcgacggcaatatgttcactttcttgatttcccgaccaaagtctttgctcccgcgcatcattcccgattacggcttcggcgaatcggttctgcccaatatataatcggttgtggttttatacagatccgcaagcgccgttacataacggacaggtatctctcgcttgccggtttcataggtactgtagaccctttggtcgattcccaaatatgcggcaacctctttttgaacgaaatcattgtcttcacgcaaatccttaagtctcggataatacatatacattcacctcaaaattcagtatatgtactatcaaaagatagtattgattttactatcgttttatagtaaaatagtcggaaagccgctgcgaatcaaatatatataaagcccgtcttgaaaaattaatatttaaggtataaaataaagatgaaaaatttaaaaggagacggttatatgtcaaaaaaactggtggcatatttttcggcaagcggagttaccgcagccgttgcggagcagcttgcaaaggcagcgggagctgatatatacgaaatcaagcccgaaacgccctacaccgcggcggatcttgactggacaaataaaagctcgcgcagctcagtagagatgagcaacaaaagctttcggcccgcaatatcaggcacgccctgcgacaccgatcaatacgatgttatttttctcggcttcccgatttggtggtatgtcgccccgacaataatcaataccttccttgaaagctatgatttttcgggtaagacgatagtgctgtttgcgacctcaggcggcagcggcttcggaaaaaccgtatcggagcttaaatgcagcgtatctcccgatacaaaaataaccgaaggctggcttttaaacggaaggcacagcgaaaaggagcttgccgataaaataaacgctctcgacatttaataaaagaacaaaaatcctattgtgccttggcagataaatattcaatcggattataatttgaagtcaaaaaatccctgtgcggttctattttaccgcgcagggattttttatgccttgtaaagacctaacgatttttattcacaagctttataagctccgtcacggggactattgcaaatgccagcagcaggcagataaagaactgcttggtcgaaattacggtcattccgaaaacatagcccgcgggagtgagcataaggaagataagaataaacagcgtaagtattgccgaaaggtttaaaaacctgtttgcaaaaatacgtttgccgaaaagtgttccgttaagccggttattatagcagtggaatatttccgacataccgagcaccccgaacgccatggtcatagcggcggcgctgcccgcgcttttaccgagcgcaaaggctgtaagggttgcggcggtaatggttatgctttctattgcaagacctataagcgatttaccgtcaaagagtctgccaagtgcggtgtagggcttgcgtttcataaccgcgtcctccgccttttccatgctgagcgaaacggcgggcgcgcagtcggtaagcagatttatccataaaagttgaactgccgcaagcggcgtaccggaaaataccagcataccgataaatacagaaagcagctctgcaaaattgcaggaaagcagataataaaccgattttcttatattatcaaaaagcccgcggctttcctttatcgcgcatactattgagccgaagcggctgtttgatataactatatccgccgttccccttgcaacatccgcaccgaatttgcccatggcacagcctatatccgcacttatgagtgcctcggtatcctgcacgctgtcgcccgttacggtaaccacggcgccgttttgctgccatgcctttactattcgggtcttatcgtcaggggagacccttgcgtaaaccgaatagcttttaatgctttgcgccagctcctcatcgcttaatgacgctaactcttcgcctgtcacggcgctgctgtcgtcggttaaaataccgattctgcgggcaatcgattttgcggttataagattatcaccggttatcataaccgttcttattcccgccgccttgcaggcagctatatcgtctgtaacattatccctcggcggatctataattccgagcagtcccacaaaggtaagcccgtgctctatctcctccggattcgggtttgcgggtatactgtcaagcgggcgcattgcaatgcagacgattctcaaggcgtcctctgccatagcatcgttgatttttaatacttcctctgcgtttatgccgacgcattcggacagaaccacctcgggcgcgcccttgattattgcaaacggcttttcgtttatcatggaaataaccgtcatggtcttgcgctcggagtcaaacggaattacgccgagctgagggaaaaagcctgcaatatccttttcggacattgaattataggcaaggcaggctttttttattgcttcctcggtcggatcgttgcgcagggttgagcaggcggtggcaagctttaaaacaagcgccggtttttcagttagtgcctcgctttccacgtcggtcattttgtcgccgtcgtaaattcggctcagctgcattttattgcgggtgagtatgcctgttttatccgcgcagatgacatttgttttacccagtgttccaagcgcgtcggagtcctttattattattttatcctgcacaatgcgctgaatacccactgccaccacaacggttgcaaccgcgggcagcccctcaggtattgcggctaccgcaagcgccacggagtttacaagcacgcgcagggtcattgcggcgaaattgccgcttgaaaagttttgaataagcccgattataaaggctatgacacagattataagcaccgctatgtttacgattttgccgattccgtcaagctccttttcaagcgggagctttttttcgcccgtctgctgcaaaattgcggttgtgtgccctgtttcggtgttaagccccgttgccacaaccaccgcctttgcgttgccgtgggctacgcttgtgcccgaaaacaccatatttgagcggtcgcacgcggcggttatttcttcaaaaatttcttcgccgcttttttcaacaggtatttcactgcctgtgagtgatacctcgttacagcggaattcgttgctttctataattcgcgcgtccgccgaaatatagtcgccctcttcaagcagaataatatcgcccggaaccaaaagcgcggaatttatatttttcacaattccgtcccgcagcactgcggcggtgggattggtggcacttttcatgccgtcaagcgcattgtcgcaggtgtgaagatgatatgcgcttacagccgcgtttattattacgatgccgattatcagcagcggcgaaaagctgttcacctcgttatacataagcgaaactataaaggagagcagcgccgttataataagcactaaaaccaatttgctgttaagctgcgataagaaccgctttaaataggtgggctttcccgaatcggaaataatatttttgccgtatttttcaagccgcatatcggcaacaccgttgggcagaccctttttatcgtctacatctaattcctttaaaacggcggcgcggtcggtgctgtgccatatcattgtttttcacctcgtatactgttgtagtaatccttcatctgccttgcgtcctctgcctgcgtgccggctgattcgcatataaacaccgggtcgcagccgtatttataggtcagctccataaccggctcatattcgggtccgtacaccgtatcgtcaaaggttagatggcgcttttcgccgcccgcggtgtattcaatttttgaaaaatgagaatgaaagcttttaagcctgtcgctgccgagtgtatttttgattgcaaggaaaatctcctcaaaatccgccttggatttaagcgagccctgatcccgcgcgttcaaatgaccgaaatcaatgcagggtatcagcctttcgtccaccttgcacagctccaaaacctcataaagcgtgcccaactgattcaccttgcccatggtttcggggcagatatgaatgtttgaaagccccgcttcatcgagcgctgccaccgccttgtgcattgtgtcaactgcaagctcaagcgcattttcacgggagatcttgccgcatgagcctgtgtggacaattattctgctgccgcccatggcatttacggctttagccgacgccaaaatataattcacggaattaaggcgcttttcctcctcaacagaggacattgaaatataatacggcgcatgaagagagaggtaaacccccttttcctttgccttttcgcccaaaaggcgggccttttcctcgccaatgtttacacccctgccgcactgatattcgtagcagtcaagtcccatttcaactatataatcgggtacatccaggctgtttttatagcccattttcgcaaagctttcggcatttcccgccggaccgaatttaggcatttcagcgcacctccgtgtttttaattttataaagcttaaataccgcgcgttcaagccgacgcttgaatttaaagcgcgcagagctttcgggctttatggggtctaaaagcattgttgtgaccccgaaaaggttgccgccgagcgtatcggtaaaaatctgatcgcccactatagcggtgttcctcttgctcgtttttatgacccgcagcgcgcggcggaatttaaagggcagcggcttcagtcctaagctcacgtagggcaaatttattttttccgcaaacggctttacccttttttcctttgagtttgaaagaatgacaagggctattccgttgcctctcattaaagcaagccaagcctcaagtccttccgtcagcttttgaccgtggtgggtcgaaagggtattatccacatcgagtataagcccggtaatactgcggcttttcaaaagcgcaggggttatatcggtaattcttttaagtttaatgttgggtttaagcagcatattaactcctgttgtacctaaatcatgcctgacgactgattgatatgcttattacgccgaagctgtaattatatatatctgacattcagcctttcggcacggctgaattgtttattaagcataatataatgtctactgaataattgcattagcaaatgcaattatataaaatcgagttaaaatctcgatttt

SEQ ID NO: 908 - DNA, 22746 bp, Unknown
  16S sequences of unknown bacteria
gtctgtgtaatcgttcccaatcattcatctttctttacctcctgaattttgttttgatttgctgtcttcgccgcaatcatatacaccactcctttcgttattagatttatatcaacgctcaaaatgcgctatatacgaaaaaagaggttgcacatacaatttatgcgcaacctccgagaacacaaacatttaacaattagaaaaacaaaaaaaggggcagaccttacgaaatcaatcgtaaaatctgcccctaaaaccctatgaatttagttcaagtcctccccaaaggtcgatttggggaaatgatatcttttgaattccacattaaaaatcggcatgaaaaaacccagaaaccgttgtggcttctgggttttcagcaccgatatctttttcggtgctacttgttggttgcgggggctggacttgaaccaacgaccttcgggttatgagcccgacgagctaccagctgctccaccccgcgatattcaacttaactcaacaaatatattatacaccaaagcggcggataatgcaacacttttttcaaaaaaaatttaagatttttgcggcgggcggaaattctcacccgccgcaatgctttttaaactaaagtcttatgcgccgaacttagcaacattgagctttattccggggcccatagttgtagctataacgcaggacttgatatactgacccttagtagaagccggcttagccttaacaatagcagccataagcgcgtcaaggttttcctggagcttctcagcgccgaatgaaaccttgcctatggggcagtgaataatgttggtcttatcaagacggtactcaattttacctgcctttgcctcggtaacagccttggcaacatcgggggttacagtacctgccttcggggtaggcataagaccgcgcggtcctaaaaccttaccgagacgacccacaacgcccatcatatcgggtgttgcgattacaacatcaaaatcaagccagttttcgttctggattttggcaacgagctcctcagcgcctacaaaatcagcgcctgcctctttagcagcgtcagccttatcgcccttagcgaaaacaagagttcttacggttttacctgttccgttaggcagaataaccgcgcctctgacctgctggtcagcgtggcgagagtcaacgcccaagcgaacgtgaatttcaaccgtttcatcaaatttagcagtgccggtttttactgcaaccgcaaccgcctcttcagtatcgtaaaacttaccggtttcgataagctttgcgctgtcattatattttttaccgtgtttcattgtttacctcccaataagtggttaaatcggaattttcctcccacaagagagaatttaatcgacaacttctatacccatgctgcgggcagtaccggctatcatactcatagcggactcaatgcttgcagcgttaaggtcgggcatctttgtttcggcgattttcttaacttgctctctggtgattttggcaaccttggttttgttaggtgtgccggaagcactttcaatgccgcaagccttcttaatgagaacggctgccggcggagttttagtgataaaactgaacgagtgatctgcataaacggtgataacaaccgggattatgagaccggcatcattcttggttctttcattaaattccttggtgaacgccataatgttgacgccgtgctgaccgagagcaggacctaccggcggagccggagtagccttacctgcggggatttgaagtttaatgtaacctgtgattttctgagccatttgtttgcacctccattattcgtggtagcggcgaaaaaacgcctttcggaacggtcatatttcgttcctcccaccgtggcaccgtaagcctgtgccgggctcccgcgttataagcggataagttaataagcatttctgcgtattaagcatttagtcatcgagcgctatctggtcaagctcgaattcaaccggagtttccctgccgaacattgaaagcgccacgcagacgttattgttcgcagtgtcaaccgatttaacggttccggaatagccctcaagcgggccgctgatgatcttaacgttatctccctcgcggtagcctacttcaacgctgtgcttttcaacgcctaatgcaactacctcttcatccgtcagcggaacaggctttgaagccggccccacaaaaccggtgcagccgcgaatgtttcttacaacataccagctgtcgtcggtcactatcattttaatgagtacgtaaccggggaatattttacgttcaacctcgcgttttttatcttccttaatttcggttacggtttcggtaggaattttaatatcctgaattaaatcctgcataccgcggctttcaaccattgttgccaggtcgcttgcaaccttattctcataaccggaataggtatgaaccacataccatcttgcttcttgtgtatcagccataaactacctccggcggcttacacgcccaatatcagttttaaaagctgaccgagaccgtaatccaccaaccatataaacgcgccgactacagcgcacattataagcacgataaccgtgtttttaatcacgtcacgcggaccgggccatacgattttcttaacctcgctcttataatcgcggaagaaacgtataacgcgttttactatggtgagcttttcgccctttgattctgcaacctcaatataatcatctataaagagataagccgcagcaagcgctgtaaataccaaaagggcaattgcagtaataagcacaaagcttgagtaggtaacgccggtaacatccggtaacggacgcttatcaacaaacttataaggattgcttaaagcgataaccagcatataaattgtgcttaccaagcccactgccggggcaaagtagcgaagctttttggatttaaaggaaaaaatgctcaaaataaaggcaatagcggtcagtagcaggcaaaacagaatatcggacgatttagccattgtgtattccgttccgccgacagtaaccttgctgccgaaggcgagaaccgcacctactaccgaagcattgtttccgccgcttgtaatatttgcaaacggcataaagaacagaacgagcgaagcaagaccgaaaaccgacgccgcaaagcggcaaattttgtttattactttcattcgtccaccctcctacttcgtttccttgtgtaaggtgtgcttcttgcagaacctgcaatacttgttcatttcaagcctatcaggatcgtttttcttgtttttcattgtgttgtaattgcgctgcttgcattcagtgcatgcaagtgtgattttaactctcataacggcacctcccgctttacggaaatattttttgcttttactaattcaagccgatttattcggcaacgtaaaagtaaacgcctccctcggttttgcccgtcccgttgcacccgcacgcgctgaaaacgcgcacgaaaagcacacgcgcaggggcgcatggcattacaaccggttcctttgcaaaaaaaaagaacctttcagaggtaatagtattatagcatatactctgtaaaaggtcaagcattttttgtaaaatagctttccgggctctgccgcccgatttcttcatattgtctagccctttttactaatattacacttcaccccggcagccctttcggggtgtcggggtgaaggttcggcttatcaatattttacttaatattgataagctcttaatttatcagccgaacggatttccgccgctctcatcaagaccacttgtaacaacaacatcgttagtttcaagctttactacttcaagctcgggcttttgaaataaatttttcattttcttccctccttaattatcctttcggatttactaagctgtctgaacagctgtgtaaatcgttactaccttgccgtccttaataaaggtaaagtaagcaacagcataaacatttttaagctttgcagtagtgccaagtgttaaagtatatgcatatgtgccctcgttactggtaagacgtgtatcagttttaacaacatttcttccatcaacattttcaagcgtaagtgctgtatcggcgttctgtgaaaggattatacctgcgccaacaaatgtataactgctatccgcagaccatgaagccgtaagaataacactttgtttaccgtcagccatatcctttctttcgcttacgagcaaggtgataaccggttccttaaccacaacagtatcggaataacgggcttcaagcgcaacattacctgtaacatagaaagaatatgccttatcatagcttacaagagttccgttgatataccagccggcaaactctttgccttctatatcctcagccgttacggttacatatgatccgtatgtatatttgcctttttctataccatctactgtaacagtataaactgtttcggtatcagctttatactttgcataaatagtaattgcagcatttccgcttacctgaattttgccgtccgtaacaatatattctttgccgtcagcatcataccaaccgataaacgtatagcctgcatagtcaataagatttgtaggaacatctatatagccttcgctatcagcagaggttgctttaagaattgtattgcccctatccctgaatataacatatgcattactattttctgttttgcaaaatacagcctttatagtaaggttatcacccaaatagaagttgtaggtcaggttatcggtaagcacacgtccctcactgtttacccaataaaggaatgtaaaaccgtctcccgggattgctttcaatgtgaactgagttccgatttcataggggacatttgtaatagagttatcccaagtaccggaaacaccgccgattattgaataatctaccgttccgtaaccgtttatttcaacagaaagatttcttttttcggtagttaccttaggctcaacaccgtatgtaccgtcagtgttagccttgggcgcatagccggctgcacagtagtcggcaggaacagcgcttgagaatgtaccgccagaaattgaaaccgttgataccgatgtttcacgaacaagtacggcttattttccgtcggcaccgagtatctgaccgccggatatggcaatggcaactacgtttgtttggctggcgtcgttaccgatttcacgaatggcagttgaatacagactcttaataacggcgtcacctgaaatgttaatcttcacctgtccggcataaccgacgtaggaatcaatcaaaatagcagagccgtcatagcttatgccattagtttgagaatattcatcaccgataacatcatcgttggcaatgcctcttacttcaccgccgcttatatttaaggtgcctgacttaattccgattccgcaatagccttcaactaatccgcccgtaatattaacattgcaaagttgcggcaaatacattgcgagtttattcgataaaactttggctccgtcataaatataaatgtcggtagtgcccttatcagcgccgttgccctgaatagccggcatcattattgccttgatagtaccgtaaactttcagtatcgggttatgatactcttcagaatcctcaaagagtatagccgggtagcaatttttaacattcgcattggcatataccgtggtatccttatcaacggtcacatttgcgtttccgttaataagtaataacggtctttcaatagctgcgccttctatatttacattctgcaatgaaagctgaccgtaaacattcatagcgccgtagttatcggcaacattaatagtaccgttttcaaatgtaacgcttgcagtatcagctatattgaacatataactgccggttttgcctgtcaaggtttttccgtttaaatctattataagatttttcgcaatagaaagtgtactgttaacctctatatcttcaagcagtttaacagtttttccctttgcggctaaccttatagcgtctgcaagagtttcataatttttactgccgaccgcagcaacgtacttgcctttctttacgccgtatgtgccgtcggcatttttcgtcgggatatagccgtctgcacagaacccggctgaaatgctcttattgaaggtaccaccggaaacctcaaaattatcccaagtagcttttccgagaccatggaatatggctccgcttgatctatttgtaaagttaccgccggttattactgtttttgcagtgtacccttctacaataccggtaacgacaacccttgcagcggtgctggtgctgttctgaataaattcaccgccggtaataatagtgtcaccgtaaaccaatatagtacctgtaatattgtatttaggagcataatcagatacaaacttaccgcctgtgatagtaagcttagagccttcttcactcttaacggtatttaaaccgccggtgtatgaaccgctcttgattgtaagcgtgccccagttatcaaccatagaagaaccggtgttgcctgccgttgcggttacatcctcaagtgtggcagaagcgcccttctgaacctcgatgttataatagcttgcgccgcctataacattaccgtttttaacagttacgttatttactgtaattgaaatcgttgctttgccgacgcctgtatttgtgagcgtcttaccgccgaggtcaagcgtaatgctcttgttaattaaaacatcctcggttgtgtcggaaagcagtgttactgtatcgccattacttgccgccgcaacagcctctgccaggctttcatagcctacattgcctactttagcaacatatttgccggatttcacgccgtaagtaccgtcttcattcgttgtcggaataaagccgtcagcgcagtaatctggatttatttcataagcaaatttaccgcctgaaatagcaatatttgcaggcacattgctctcaacactaaacttcccgttgaatgtaccgtttttaatattaagctgacggctctgacccttgcctattccgccgctgatctcaatgttaccgttaattacgctattaccttcaacagtaacagataccgaaggatagctactataacggcaaacatcaaacgcaaagggatacctgcttattccatctgcgttgcctgcttttattattgaatccttaataacagtattaccgttattgtttgaaatggtgtatacagtctgttttccgcctgatacagtcatattatccaatgtaaggttgctgtaattctgaatcataatagccggagcgcccgaccatttggttatatcatcacccgcaacagacgcatcgccgtaaataaaaccgtttttcatggttattgtattgcccgcaagtagttggaaaccgttgcttgccgtgcctgtgctgccaacaagctttccgcctactgtatatgaataaccggcaaaatcaatagtaattccggttggatatttatttgtggctaccctaatgccgtcaccgctgcaatttgcaagcagagttacggtatcaccatcttttgctgctgcaatagcttctgcaagagttttgtactctgcctcgccgattttagcaacaaagttatctgtgggagttttaattgttatagtattggttgttttccactcaaccgcatcggtaataactacatcattaccgttcaaatccttaacggtagaaccgtcgggaagagcagaacctttgttatatacaaccgtataaagagcagcggtattttcgctctttcggttattgcccataacaagatttgccgcagcgttgaagcctaaatacataccgacattcttgtaactgttatcagtgtttgtgatatcaaaattgttaccgtctacggttatgtttgaggttatatcccactgcgaaattctttcaaacttgaccggacgggtgcttttaacagtattgtttgtaaaggttattttggtcagtgatttaaaatcttctccctgaccctcgttatcgccttttgtccagttgccgtaagccggtcttatccatgtggggttggaattgttggcgtcaacggtatttgtgaactctttaaatgtacagccgacaaacgcaagttctgttgcagcaattccgccgacaattaaaccgttgaattcgcagttgttgaattcaatcctttgcagctggctccaaggtgaagtgtaaagctgataatcaaagctgaacacgccgttaaatttaattttctcaaattttacggtagtgtaagccggaacagcaagtaaaagcgatgttcctatattatctatatctttataaccggttacattattagaaattgatgttccggtgaaaacaacggttttgccgttcgcaccgtcgttttcgtcgcccttgtatccgttagcagcgtaacaattaaggtcggttttatccgcgcctgcagcgctgtcaacacgaactccgttaccgagaacgccgtttgtgtcataagaatattcgccgacattaacatacatagtgccgccaagagattcttgaactgcaatgtagttttctctcgtcattgctccgaattcttctagtgtgtacggattagaagatgaacccttggttgcttcggaacctgtctcaccctctgcggttgtagcaagtgctacggtcgggataagacttaagcacattaggacagacaacagcaaacttaacagctttttgcctataaatgacttattcattatttgtatcatcctttcataatgcttttggggcttttgccccgaaaaagctttgtttttaggcttttccctccctttcaggttccgtgggatatgcgtgatttgaggaacccagctgatatccctcagaccgcattgtaaaaccccggtaaacggttgtaatttcggttattgcaagggctttgcaatgccgtttcgaccgaaacggtgcataatccccaataatcaccgatattatagcactcgtttgccgtattttcaacatacaagtgtaacttttagctgtaaaaaaatcgggcatttttttgcaaatttttgttatttttgatatgcgtatcacttactttggaatatatagttaattcctaccccgatatactatataatggggtaaattgccgccgctgccacccacctttgcagggaaaacgggcgggttttaatgtgaaatgctgcacctgaaaaactttttgaatttcttgtgtattttattattgactttttgaatttgttttgatataataataaggctgtaaaggcaatatccgggtgtggcgcagctggtagcgcgcttgactgggggtcaagaggccgcaagttcaagtcttgtcactcggaccaaaaatcccgttcgcttttgtgaacggggtttttactttttacatcttacctcttcactcttaccttaaaataaaatcgtcaggtatcgaaagatacctgacgattcagtctgtagataaacctaaatttctatttttgcggcgtaaacgccgcatttacgtttttccgctgacaggtgcggcggaaaaacaccttgtaagcgaaaaaccgcctattcagcggtttttcaagggcactggggtggtattggcggagcataacaaccgactgccgcctgtggcggattaaaggagggcgttatggcgccgcggtcaaagaaaactcgcgctccaagcgattattttctttgggcaccgcaagagtagggagtgcagtccgaaaatctttgattttcgagcgagcggcattcccgtccaagagtgtgtcgactttttcgacacactcaatcgtcaggtatcgaaagatacctgacgatttttactttgtgctgttttacctcagtatattatcccacagcattattggagcccactgtaacggtggttgtgtaatatctgccgttgcggtaaatcttaatgttcaccttgtcgtccggcttgcatttctgcaaaagcgagtcaaacatactgtattcggtaatttcggtaccgtcaaactctgttataatatcgcccttggcaagtcctgcactgtctgccgggctgccgtcagccacgcttgaaattaccgcgcccgaggggtaaccgtaatatttcagaacacttgcggtatatttttcacttattgtaacgcctatatacggctcggggtcgttctgcttttcaattatgctcttgcaaatttcggcaacggtgtttgagggaattgcaaagcccataccctcaaattcctcggaaactatttttgagctgtttattcccacaagctgccccttcgtgtttacaagcgcgccgcctgagttgccggggttaatggcggcgtcggtctggataagcttaacgccggaatcggaggaaaccacgcggttaagcccgcttataacgccgtaggttacgctgtccataaattcaagaccgcccgggttgccacggttataacatactgacccaccttcagctttgaggaatcggaaaattctacgggggtcaagccctttgcgtcaatctttataaccgctaagtcggtggaaatattatagcccactacggtagcctcgtaggattttgaatcaagcgtatcggtaaatacttcaacctttgagccgctcttgtttgttaccgcgccggaaataacgtgatagtttgtaataatatatccgtccgccgagtaaacaacgccgctgccctcgcccgttgattcattactgccgccgaaaaagctgcgcaccgaggtggtagttcttattcccacaacgctgggcgtcaccttttcggcaaccgcctcaacgaccgattccgccgtttcatcaatatttatgtttacattgctgcccgaaacatttgaggttatgggggtagaggtattattgccgcgagacgttagcgttaccgccgcaatgccgctgcccgcgcctataaccgctgcaagaagcgacgccgcaactaccacgcccgcaccgtatttgcccttctttttagcctttttctgctttggcggctttacagagaaggtagtgccgccgtagttataaccgccgtaattataattagtgctgttatttgcgtagtaaccgccggcatttgcactttcctgttgattgctgttctccgtttctgccgtattcggctccggtgcatggtaagcctcatcctgaataatgtcgtcgcggctctttgtgtaaaagccgccgtccggcgttacggtgtagccgttttcgtttgtcactttgtcaaagccgttaagctcgccgttttgtttgttattataatcgtccataaaacgttcctcctttggtttggttatattttaaaacggcattattacattcgttattcaaatatatgaatttatcgttaataattgtaacgaattattttctgtctgttccaaaaaatacagcggctttggtgggttataccccgccaaagccgccgtacgctgtgcccctaaacgataattttcgggggcaggctttcttattttatttaagtcccaacgctttaagaggctctgtcacgtgaccgtccttatacacttcaaggtgcaaatggctttggtcggcacattcgcccggcaccgacgtaaccgcacctattatatcccccgcggtgacctttgcacccgcctttacctttatatccttcaaggcagcgtatttggttgtaatgccgtcgccgtggtctattgttaccacattacctaaaaatgcggtttcctctacagataaaaccttgccgtcgccgcaggcgctcaccgaggtgccgtctgcgcaggcaatatcaagccctgtgtgaatacgcatatcgccgtaggttgcggagaattgtagctccttatcgctgtatttctttataatatcgccctgcaccggcattgtgaaaacctttttttgcggcttgctttcggtttttgaggcggtgatttcggccgaggaatacggctcatcggatacatttttgcccacattctcagaaacagtgcttgatggctcaggctgactgtcgggaatacttgactgcggcggctcggaaatttgcgagggcgcgctgctgctgtcgttatttctgcggcttatgctggaagcggcaaaccacgaagcaccgccgagcgctaaaaggcagcaggcgataattatataaaatgcagcgctgcctttaaatttcggttttgaggtatattcagaatatttcatattttcattttcctttcagacgggcgttttatgaatttattattgactaaaatacatattatattccttaaaaatttaaaaacagttcacagaaatgaaaaaattatagtttattatatgcttgtaccgaaaagggagccgcacccgttttggtataatttctcttgattaaagagaagttctctcctcaaaccccttaaaagtgaaaaagagccgtgaaaacggctctttttcacttttaagggcatttttcaccggtatttaaactgttgacaagtctttttattatggtataatatactaaataaaaattacaggaggaagcagtaatatggcttattattttaacgaggtttcacacacttttaacgagtatcttttggttccggggtattcgtctgccgagtgtattccggcaaacgtcagccttaaaacaccgcttgtaaaattcaaaaaaggtgaagaacccgcaatttcaatgaatattccgcttacctccgctataatgcagtcggtctcggacgacaggctcgccgtggcgcttgcgcgtgagggcggcgtttcgtttatttacggctcgcagtccattgaggacgaggcggctatggtagagcgcgcaaagtcctataaagcgggctttgttgtaagcgaatccaacgtaacacccgacagcaccttaaaggatattttagagcttaaagccaaaaacggacattcaacagtagccgtaacgtctgacggtttgccgaacggcaagctgctcggcatagttacaagccgcgattacagagtgagccgtatggcagaggataccttcgttaaggactttatgaccccgctttcctcccttatagtgggcgcggaggatacaacgcttaaaaaggcaaatgatattatatgggaccacaagcttaattccctgccgatagttgataaaaacggtaaccttaaatattttgttttccgtaaggactacgacgcgcacaaggaaaaccccaacgagctgcttgacagccacaagcgctatgttgtaggcgcgggaataaatactcgcgactacgaggaaagagtgcccgcgcttataaacgccggggcggacgtgctttgcatagattcatcagagggcttcagcgagtggcaggcgcgcacgcttaaatttatacgcgaaaaatacggtgataccgttaaggtaggcgccggaaacgttgttgaccgcgaaggctttttattcttagccgaggcgggagctgactttataaaggtaggcataggcggcggctctatatgcattacacgagaaacaaagggcataggcaggggtcaggcgaccgcacttattgacgtttgcaaggcaagagacgaatattttgaaaaaacgggagtttatgttcccgtctgctctgacggcggcattgtgcacgaccaccatatgaccctggcgcttgctatgggtgcggactttatgatgcttggcagatattttgcccgctttgacgaaagcccgacaaaccgcgttaccataaacggtaattattataaggaatactggggcgagggctcaaaccgcgcgagaaactggcagcgctatgacatgggcggcgataaaaagctatcgtttgaggagggcgttgactcctatgtgccttatgcgggcagccttaaagataatgtaagcctttcgctttcaaaggtacgctctaccatgtgcaactgcggcgcgcttactataccagagctgcaaaagaaagcaaagctcacccttgtttcggctaccagcattgttgagggcggcgcgcacgacgttattcagaaggacacctcatcgggtcttgtaaaataataaacggagagtaaaaatgaagcctgtattatatattgtaattccctgctataatgaagaaaaggtactgcctataacaagcggaatgtttttggaaaagcttaaaagccttatttcggcggatattatatcggacgacagccgcattatgtttgtaaacgacggcagccgcgacagcacatgggatataataacgaaattatcaggtgagcaaaaatactttaccgggctgtcattaagccgcaaccgcgggcaccagaacgcactgcttgcgggtcttacagaggcaggcaagctttgcgatattactataagcattgactgcgacgggcaggacgatataaacgctatggacagtatggtgcgcgaatatcttgacggcgccgaaatagtgtacggtgtgcgctcaagccgcgagaccgacacatttttcaaacgcacaacggcgcagggcttttataagcttatgaaccgtatgggcgcaaacgtagtttacaatcacgccgattacaggcttttatccgccaaggtcataaaggagctcgctaattttaaggaagtaaatattttcctgcgcggaatgattccgcttgtaggctttaaaagcacctgcgtttattacgaacgccacgagcgcttagcgggagaaagccactatccgcttaaaaaaatgcttgctcttgcaattgacggcattaccagcctttccaccaagcctataagaattataacatccttcgggtttgttactgcaattttaagtcttataggcataatatggtcggtaatagcctttgcgctcggcaaaaccgtggcgggttgggcttcgcttgtaaccattattttctttttcagcggaatacagcttttaagtctcggcgtaataggcgaatatataggtaaaatatatcttgaaacaaaagcaagaccgcgctttataatagaaaagcgcgccggcgactttggcaggacggaaaataatgattgatattaaaaacacaaatacaagcgagcttttaagccaggcaaacgaaattttcgaccagacaagaccctttgccgagcttatgatgcgctacaaatgcgctatgcttgaagtaaaaaccaaacttgacgtgctcaacacgcagctttcccttgaaaatgaccgcaacccctttgaatcaatagcgtgtcggcttaaaagcgtacccagtataattgaaaagctgaaccgcaaggggctggagctttcagctgaaagcattgaaaaaaatcttaacgacgttgcaggtatacgcgttatatgctctttccccgaggatatttatattttatccaaggagctttgcacacaggatgatattcgcctaatcgcctgcaaggactacataaaaaatcccaagccgaacggctaccgcagcctgcaccttatagtggaaattccgattttccttatgcccgaaaagaaatttatgcgggttgaggtgcagttcagaaccattgcaatggacttttgggcaagccttgagcacaagcttaaatataaaaaggatataaagcacgatgttgagcagatttcagaggaattgcgcgaatgtgccgaagaaataagccgacttgatatgaaaatgcagagtattcaccgaaaaatatacggaacagacggcaaaactgaaaataaataaaaaaatattacaaaaagggttgcaattttgtaacccttttgttataataaggtttatagaaattacaaattgtaacttttgaaagaagtgaccgttatttttaaggatattcttaataaagaaaccttacttgaaatattatcgcagaataagcttttgagcaaaactatatccgttttaagcggtaaaaagctgcttatgcgcatatgctccctttgcattataggtatgctggcggtaggcgtaagtatagtatctgtcggtataacgctcgggttcaaggtaaactatgcgggcagtattattgccacaattaaaaacgcagccgtttttgacgacgctaaaagcatagctgttaaaagcattgaaagcagcaatgccgccggggcgataaagcagcccaattttaaaatgaccctcaccgtttcaaacaggctttgcagcgctttaaagcttgccgacgctattattgaaaacacaaatgatattgttgaggcttccgcccttgtggtaaacggcgaaaccctgctttgcggcgaaaccgaggaattggctgagtgccttgaaaaaagccgcacccgctttgaaacaaaaggtgctgagaacacatcggaatttacagacgaggttaaaaccgaaaagggctattaccttaaaagcgaaatagcgtctgcggacgagcttacagccgccgctgaaaagcttaacgttaaaaccgtattggtaattacaaccgacaccgaaataccctttaccaccaaaacggttaaaacaagcaatgagcttataggctattcatcggttaaaactgccggtcagaacggcataaaccgcaaaaccgaaaatgttgaaaagctgaacggtgaagaagtagcccgtgaggagcttaaaaccgaagttgttaaggagccggtagagcaggtaacgcttgtgggcacggctaaaagcaccgccacagccgcgcagcgcattgccgcccgcagcgaggggcttatctgcccgctaagcaaaggctcgtttgttgtttcctcttattacggtgacggcagaggtcataagggaatggaccttgcggcagaccgcggcacgggaatatacgcctcagccgcgggaacggttgtttccgccgggtttgacggtgcctacggctacagcgtggttgtagatcacggtaacgggcttaaaacaagatacgcgcacgcaagcgcgttaaaggttgcaaagggcgcaagggttgagcagggcgatttactggcgctggttggcaataccggcaattcaaccggcaaccatttgcactacgaggtgcttgtgaacgatacccgcgtaaaccccgcaccttatatcgggcttgactgagaataataattaacaaaaaatcccttctcttcatattctgtgaagagaagggatttttttattttcggggaggataaatatgcctataatatatttaagcccgtctacgcaggaatttaacccctactacggcggaggaaacgaagaatactatatgaaccttatagccgacgcaatggagccgtacctttcggcaagcggaatacagtttacacgcaacacaccggatatgaccgctgcttcctccatagccgcgtcaaacgccggtaattatgatttacacttagccctacattcaaacgccgtaggcagcagccagcagcccactgtgcgcggaatagacgtatactattaccccaccagcgtaaacggcaagcgctttgccgatattgcagcgaataatttacagcttatctacccgctgccgggaatggtgaaaaccgttcccaccacaaggctcggtgaggttgcgagagtgcgtgcgcccggcgtgcttatagagctgggttaccacgataacccgcttgacgccgactggatacggaacaatataaacaatattgctgaaaatcttgttttgtcgcttacggaatatttcggaataccctttaatatgccgcagcccatacaggtaggctatgtttccaccgaggggtctaatctgaatatacgctcccgcccggatatcagcgcaccgataatcggcaaaataccgaacggctcggaaattgtaatttacaaccgcctgcccgaatgggacttagtgggctacagcggagttataggctattcaagcaaccgttatatttctgcctgaataaaagcgtagcggctcccttcttttcggcaaagccgaaagaggggagcctttttttagcttaaaactattttacaaacctgcttacgcgcggtttctttttggcaaatgggttgcttgtggggttgatttcagccgaataagcggcgccgcagctttggcagacgtctgttcccgccttgtttaccgtgccgcattttacacattcccaagtgccgcgggcggcttcgccatggtatgccgccggtacggcagactccggcgaattatagggatttactatattctcaagccctttgagcttttgcctgagccaagcggtttcctcgtttaactgctctatatcctcggtattgcgtattaccgaaatggtaagggctatttgaagaatacagataaacccagcaagaacagccgcaaaggcatcgctgccgataagcataaaaaagatgaatacaccgctgatgatttgcagaaaaaggagaatgtaaagcagctttttcatacaaatatccccctacgcgctcaaataatattttacaagcgactgcaaaagcgtatcgcggtcgatttttcttataagattgcgcgcattgttgtgggttgtaatataagtggggtcctcggacaaaatatatccgactatctgatttatcgggttatagcccttttccttcagcgcgtcgtaaaccagggtcaaaatatttcttatttcctgctctgtttggtcgcctattgaaaaggtcattgttctgtcattcataaattacacctctcacaactgtttataattattttataccttttttcaaaaaagttcaagcactattttctgagctctgcgcccgcgttttcaagatttttaattattgcggcgtttaccgtatcaatatctttatcggaaagcgttgcgtcggcagacctcagccacacgctgtaagccacgctctttttgccctcgggtatttgcgagcctgagtatacatcgaaaagctccagcctttcaagcaatctgcccgcgcccttggtaatcgccttttcaagcgctgccacgggtaagtccttatcgcagagcattgcaaaatcgcgctcaaccgcagggaatttcggcagcggcttgtaaacagtcttgcgcttgtttatattaagcaatacatcaagcttgatttccgcaacgtatacgcggcagtcaataccgtactcggcggcaactgtcgggtgtatctcgccgaaaacggctgcaacagtgttgttcgcctttacaagcgcctgtctgcccgggtggagatacggttcatggctcacctcatactgcgtatgagcgccgcaaagccgcattacaccctctattatgccctttaaggtgaagaaatcctcatctttgccgtaaattcccaccgacattgtgggtatctcgtcgggctgctcggttatgggcaactgctttgcaataaaacgctttgaaatttcgtaaaatctgccgtctgttatcttgcggttgatattggttgccagaaccgacagcatacttgttgtaagctgggtgcgcattgtagagtattcatcgccgagcgggtttataatcttgatttgtttgcggcgctcgtcgttttcatccaaaagcagggtatcaatagcggcggagcttataaatgaataggttgcaatttcacgggcgcccgcggcggtcataaagtcctttattttatcgcactttatacgctcgggcagctttttgccgcgcaccacgtcgccgcgcatcggcttgcctataatgtggtcgtagccgtaaattcgcataacctcctcggctaaatcggctctgccctcaatgtcgtcgcgtatagagggcacgcgcacggtaagctccttgccgtttgcggtggtgggcaaatgcagactgtttaaaatggaaactattttttcatcgggcacgtctacgccgataagctccataattttatcggttgtaacatttataattctttcctcgggcagaccgttgttaaggtcaatttcgccgtctataatatcgcccgcgtcaagctctgaaataagctgcaaggcgcgctccatagcgtaggaaacgttcataatatcaacgccgcgctcgtatctgccgctggcttcggtgcgaataccgagcgctctgcccgtgtggcgaatgttatcgcggcggaactttgccgactctaagaacaggtcggtggtatcgttttcaatctcgctttccttaccgcccattatacccgcaaggcatgagggcttttcgccgtccgcaataacaagcatatcgggggtcaaattgtggtcggtgccgtcaagcgtggttatagtctcgccctcttcggcgttgcgaacgattattttatgcccgcctatatcgttatagttaaaggcgtgcatgggctgacccgtttcaagcattacaaagtttgtaatatcaacaatattgttaatggggcgcatacccgaggcggttatggcttttttcatccactcgggcgactcttttatgcgcaggtttttaaccaccctgcctatatagcggggacacaggtcaaaattgcgcacctcgatgtctatataatcagatatattctgccccaccgttttatattccggcttgggcgctttaaattcggtgcccagcactaccgaaatttcctttgcaacgcccaaaaagcagttgcaatcggggcggttggctgtaattttaaagtctattatataatcgttaagccccaaaacctcgcgcatatcggtgcccggcttcggctcgccctttaaaataagtataccgtttaccgcggcgccctcgtaatccgcctcggtaaggcacagctcgccgcctgagcagagcataccgtttgactcaacgccgcgcagcttgcccgccacaatatgtgcgccgttcggcaggtagctgtcgtcaagcgctgcgggaacgtaatcgccctcgtgtatattctgtgcgcccgtaacaatttgaacaggttcatccttacccacgtccatttggcatatctgtaaatggtcgctgttttcgtgcggagttatttttaaaatttttgcggctacaacatttttaatgttttcgccctgcttctccatttcctcaatttcaaagcccgccattaccatacggtcgcaaagctcctcaacgggaacgtttatatcaacatatctttttaaagcttcaagtgaaattttcattttgtgcttccccctttaaaactgctctaagaaacgcttgtcgttctcgaaaagcaggcggatatcgcttattttatagcgtgttgtggtaattcggtcaatacctatgccgaacgcaaagccggtgtaaacgtcggggtcaattccgcaggagcgcagcacgttcgggtgcaccatacccgcgcccaaaatttctatccagcccgcgcccttgcaaacgcggcagcccttgcccccgcactcgctgcacgaaacgtccacttcaacactcggctctgtaaacgggaagaacgaggggcggaaacgcacctttgtatccttgccgtaaatttcccttgcaaactgctcaagcacgcccttaaggtcgcacattgtaatgcccttatcaaccacaagaccctcaagctggtggaaaacgggggaatgggtagcgtctacctcatcggcgcggtacactctgccggggcatataacgcgtatcggcggcttgcgggtttccattgttcttatctgcgcagcggaggtctgtgtgcgcaaaagcaggttttcacctaaatagaaggtgtcctgcatatcgcgcgcggggtgatccgcaggaacattcaggcattcgaaattatagtgatcggtttcaacctcgggaccgtccaccacatcaaagcccatagactggaaaatgtcaatcatatcgtttacaacgtgattaagcgggtgtatgccgcccgttttaacctcttttgcgggcatggtaatatcaatcgtttcggctttaagctttgcctcggtggccttttgcttcatttccgcctttttctcggctataagcgtttcaagcctttgctttgcctcgtttacaagctgacccatagcggggcgctcctcgggggaaagcgagcccatttgtttgagcattgccgtaagctcgccctttttacctaagtattttacccttaattcttcaatttcgttttcgcttgccgttttttcaatggcagcctttgccgccgctcttatggcgtcaattttctctttcattgcttttcctccacacaaaaaaataaactccgccctgtaataacaggacgaagtacaaaaagtctccgcggtaccacccgtaattttcgctccgagagcaaacactctttagaacctgtaacggtgttcatccgtcgctgcctactgcgcttttcagccgcgctgctcaaaagggaacttcaaaaaattcatacctgccccgctcacagccgcggcaagggctctcttaaaggcggaaatcttcctactttcctttatcatagcatttgtattgtctatatcttatcactcaaatttaaaaaagtcaagtctttttagtatcaaacgtgcgtttttaaggaaaatattttataataaattgacgtaaattacaaccttagacaatataaccataatcccctcgccacgcatacgcgcggccccctcccctaaagccttggggcgcatattccggttcacaatgcgcctacctaataaaaaagagaaacacagctgagatataaactgtgttcctctttttttggctctataataaatgttggggtaagcaagtagagcctacgaagaaaaaataagataaaataaaaaagtagagcatatttggaaagaaaccgttaaaatggaaatgagtagatacc

SEQ ID NO: 909 - DNA, 20137 bp, Unknown
  16S sequences of unknown bacteria
gcccgctgcatctgcggacgacgaggagcccgtggcccagccgcagcccgaagcgcccgatgagcccgaggcgcccgcgcagccgggcgacgaggggccagcggccgcaccggagcagcccgaggcaccgagcgatgaggcgtccgggcaggagggtaccgccggggcagctccgcaagagggcgaggaccccaagccccagcagtaggggcgcagcacgcgctctatcggcgaattcatcgcaaaacgaccatatttgcatattgcttttgactcgcctcgcgggtatccttaacgggttcgctttctgagccccgtgaaactcagtgaatgaacagtttttgtcttatttggaggaagtaaacgtgaagacgtattacgcgaagccaggcgaagtccagcgcgaatggcttctggtcgatgcgaccgatatgactcttggccgtcttgcctctgccgttgcacagattctgcgcggcaagaacaagccgacctacaccccgcatgtcgatacgggcgatttcgtcgtcgtcatcaactgcgacaagatcaaggtgacgggcgccaaggtcaccgacaaggtgtactatcgctacaccaaccaccctggtggactccgtcaggagacgttccaggaggccatggccaagcaccccgagcgcgtcattcagcacgcggtcaagggcatgctccccaagggtactttgggccgtcagatgctcaagaagctcaaggtctacacgggctcggagcatccgcatcaggcacagaaccctcgcaagattgacctggaggcgtaaagactatggcacagaacaacgaagctgtttacatcggcaccggtcgtcgtaagaacgctgtagctcgcgttcgcctcgtcccgggcactggcaaggtcaccatcaacaagcgcgacggcaaggattactttggccgccaggctctggttgacatggctctcgcacccttcagggtcaccgacacggtcgaccacttcgacgtcattgccacctgcaacggcggcggcgtttccggtcaggctggcgcccttcgccatggtatcgcccgtgcactgctgagcgctggcgattaccgctccgacctcaagaaggctggcttcctcacccgcgacgcccgcgtcgtcgagcgcaagaagtacggtctgcgcaaggcccgcaagaagccgcagttctccaagcgctaggcttcacgttacatcttctttgcactacagcaggctcccgcatcaagcgggggcctgctttgtttgcgggtggaaaatcgagcacgagcgcagcatgccgtgctgcaatcggacggcgcttgtccgtcacacgatgcaccccgtatcgcggcaaagcggcagtggcagatagcgtagaatggagcgcatgaacacagaaactctggcggtgacgcccgcgggcagcaaacccgcctccgacaacatcacactcatcggcatgccgggtgcgggcaagtccacgctcggcgtcgcgctggcaaagcggcttgggtaccgcttcgtagacaccgacctgctcttgcaggagggcacgggcatgctgctctccgacctgatcgaacggcggggtatcgaaggcttcatcgaggaagagaacaagctcctcgcgggtctgcgctgctcgcatcacgtaattgccacaggcgggtctgccgtgtacagcgagcaggggatggaaaacctcaagaagctggggcgtgtcgtcttcatcgacatcgacatgaccgagctccccaagcgcctgcacaccgacctgctcacgcgcggcgtggtgattcgctcgggctcgacgctgcaggacctgtatgacgagcggcgcccgctgtaccagaaatacgcggacatcaccgtcaatacggtgggcttgagcacgctcgaggcggtcgagctgctctctgacgccatcgccgcagacgaggaggagaagtgactatggcgcaagacgctgccaagcagaagaaactcgttgcctgcgtgggcaacatgctcatgctcgacgagggctttgggccgtacatggccaaggtgctgaccgagcgcgatgcggctctcgagcattttgacgaggagcacgccgacctgctcatgaagacgttccggccggcagagacggaagagcccgaagacgatgaccgtatccccgtgctggatgcgggcacgatgggcttgagcctgctgccgttcatccgcgattacgacctgatcgtggtggtcgacatcgtcaactgcggtcctgacgcggtgccgggtacttgctataccttcacgcccgaggagatggcggccaactgcgtcatgcactcgttgcacgacatgcgcatacccgatgtgctcaccaacgcgcgtctggctggctacgatgccgatatccgctgcgtgggcgtccagaagaaggactgcttcccgaaggacctcacgatcgacctcaccgacgaggtcaaggcgtcggttcccatggcgacgggcgccatcctcgagctgctcgagctcgacatctagtacgcttctccaaggcgtgcgcctcccgctcggcctcttctgcaccacggtcgctttcagacgtttctggccaaaacaaaaaccccgccgatttctcggcggggtttcttgttgctcaagtgaaagcgagtggcttatgcggtggcagcagcctgctcgtcttccttgttgacgatctcgatcttctcagcagcaccgaggtcgtcgtagccatcgatgttccaggtctcgaggctgtaggtgaggccaccggtctccttgccgaagaacatgaggcgggggagagccatgccgtcgatgagtgccaggtaaccgtgaatcatcgtgaaccagatgaagatgtacatcatgaagtagtggatgatgcggagcttcatcaggccgccgactgcaaaggtgaagccggcgaagaacggaacgttcatggtgacgtcccacaggcagaagcccgtgtagcccatgaacaggatcagaacgccgatcagcaggtaggacagcttctgaggaacaccaagctttgcggaaagcgggtggtccttcttgatgaacaggtagtacttgatccacgcgccgagctgatggcggttgtacttctgcgggagccagttccagaagtcggtaacggtctcgcgggtgccgcccatgggggacgacttgatgacgaacgccagaacgatacgggcgatgcagttaaccacgagcacgatgccgcagaagatgtgcaggccgcgtgccaggcccatcacgccacccagtaccgggtagtgaatctcgataccggacaggatcaggagaatcatcgcaacgagattgacccagtgcgtaatgcggaacgcgagcgggtgcatctctttgtagtgtgcgatctctgccatgactatcgacctccccaaggactcatatgcgtcttgaactcgtgaccggtcttgggctcgacgatgtgaattgcgcaggcaacgcacgggtcgtaaccatggacgacgcgcagggcgttgataggcgcctcgatgttgtcgatcggcacgccgatgaggccctgctcgatggtgccgggcacgtcgtcgacgtcacgcggcgagatgttccacgtggtgggaacgatcgcctggtagtgcgtgattttgttgcccttgatggtctcgcagtggtacagggcaccacgcggggcctcccagaagccttcgcccgaaccgtcgtcgcggacgcgcttcgcaaaccaggggttggcgtcgcccgggttcttgaggacctcgaccagctcgtggcaccagtcctgcatgtagccggacacggcgtacgcctcgatggggcgtgcagccaggcggccaagcgcgctgttgagcgcggagatggaggcggcgttgatgggaaggccgacgcccttgaggacggtgttgacgccgtcgatgatctcggggttgccggacatgtaggagacgagcacgcgggcgagcggtccgacttccatcggctcgcgcttgccggtcgcgtcgttgaggtaacgcggcgccttggaccaggtgtacttgtcgttgacgacctcgttggcctcgtccttgtagtagccggggaacttctcgggcggaaccgtgacgccgtccatcgggtgcagcggcttgccgtcgtctgcgtagtaggcgtgcgtggtttcctcggtcatcttggagccgtcgtacttctcgagcaccggagcgcccgtgccgcctgccatgcggacgatgcccgcggggaagtagcggtcggtcagctcgcgagactcgcggtcgaagacgccgaatgccatgaagttgccgtgcttgttgttgccgatgcccgcaacgtccttgaggtagaccttcgcgatagcgatcgcgtcggggatcatgacctcgccgacccactcgtgcagctgacgagcgcggtcaaggatgtcgtccagcttctcgacggagggcacgaacgaggtgccgccggggatggaggtctggatgtgcggcatcttgccgccgatgagggctgcgatctcgtctgcggtggcctgcatgtcgagcgcctcgatgtagtgggcggtcgcgatgaggtcgacctcagccgggagcttgtatgcctcgggggcctggccctcgaggaaccagccgccggacagccaagagtactggccgttctctgcgaacttctgcagacgcttctggacggcaccgaagtcgcgaacgcccaggccgttggccagtgcgaactcggtcgcggccttcgggtcggcctcgagcgcgtgcagcgggttgacgtagtcaagcgcgctcagctggtagaaccacaggatgtggctgtgcatgaactgcgcgccttctgccaggttgcggacgatgcgggcgccattggggtgcttgatgccgtaggcttcctcggctgcgtacacggaggtgtggcagtgggaaatcgggcagacgccgcagatgcgctcggcgatgagggctgcgtccgttggctcacggccctcgaggatcagctcgaggccgcggaacaggccgcccgagacccatgcctcggaaacgacgccatccttgacctccatctcgatgcggagatggccctcgatacggtcgacgggatcgatgatggaatgctttgccatttactgctcgcctccttcggaaacctcggcagccgccttctcggcaggctcggaggtagcggcagcagcagagccgtgcgtgatgccgtgcttcttgtcgtattcgcgtacgggctcccaatcgggtccgccagcaccctcggtgcggccggcggccttcatgccgatgccgtggacgatgagcgctgcggcgaggacgccggtgatggtgagcgcaacaggcgtcggctggacgcgcaggctgccgatgtggatgtccttcatgcggttcaggaacggagcgttgaagtcgatccagttgcgctgggtgacgcgcggatcgccggatgcgcagccgatgcagggagcgcctgcgtcgacgcaccagctcacgcggcggttccagcgaatggtgccgcagtttgccttggtctgcgggcccttgcagcccatggcgtacaggcaatagcccttggcctcttcttcgctgccgaactcgtagacgaactcgccgttctcgaagtggccacggcgctggcagttgtcgtgaatcgtctcgccgtagtagacctcgggcatgttgtactcgttgagctggggaagcgtgccgagcagcaggtactgcacgatgaccgcgaccagggtggccgggttgcacgggcaggtgggcaggttgacgaccggggtgttgacgccgttgtctgccatgtacttctggatgccgcatgctccgccggggttgggctcggcagcgcagaagccgccgtcgacggcgcaggaaccggcggcgatgacagccgcagcgttcttgcagacatcgagaagcgggctttcgccaggagcgcaggtggcttcgccggcgatgcgcagggcgtcaccgttccacctggtcatgacagcgccttcgacaaccaggacgtacttgccggggaacgctttgatggtctgctcgcgggattcctcgagggaatagccagcagccgcggaaagcgtctcggagtagttgagcgcgatgtactcgagaatgagcgtcgcaggatcgggatcgtcggcctgggcaaacgactcggtgcagccggtgcagcttccaagctccatccagaccaccggtgcgagcttgccctcgccacgaccgccgttcgtgccgatgagcgcattctcttcgatagcctcggcgacgtcgatgcccgtcacgccttcgatgccgattgcagcggcaatcgaaccacagaacgcgaggaaggcacgacgcgtaagaccacgcgactcaagcgactcgataaacgaatctttcatagatacctccatctttcggtcaaacccgccgtctgcattcccccaacgcagataacagcagggtaacgacaacagacccatcataattaatgggctgtttgttccctccacaaaacggttgggaaacaatcgtcgggcggaattttaccgtcaacggaagctcttctacaataacgaacacgtgcgagttcagtgtgaaaaacagcaggtaaataacactctatgaagaccgaaaagacctacatagccaagaaccgaaaggcgtttcacgactacttcgtggaagaccgcatcgaggcgggcatcgagctgaccgggaccgaggtctgctcgttgcgcgagaactcggcgcagctgcgcgactgcttcatcgtgatccgtaggggcgaggcatggctcaacggcgtgcacatttcgccgtacagtcatggcagcatcttcaatgtggatccggagcgccgccgccgtctgctgctgcacaaaaaggagattctcaagctccagcagcaggcggaccgcaagggctactcgctcatccccctgtcgatgtacttcaaccccaaagggcgcgtgaaggtcgaggtcggggtgtgccgcggcaagaagacctacgacaagcgcgcttccatcaaggaacgcgataccaagcgcgagatagaccgcgcgctcaaatcgcgtaatcgctaacggttgcgtgacgggtgcttgcatgtggggaacacgcacctatacttaaataacttggcggcgtgccgccggagcagttcattgacaacgcttgaagccgggggtgactggtttcgacatgatagttctgacaggggcagcaggtcgtggtctcctcgccacgttaaacaggggtacagccaattaactggcaaagttgtttctttcaagggtgcacagcgcaacgctgtcgccctggctgcctaatttaggttcagccctcccaaccgcatgttcgatccccggcatgcgcacgggatcattatcaggggattgcactcgtggacgtagtcggtatgccgcgagccaagcttgaaccggcggaaggtcgccacgcttgtcggtgtgccgcgtggccttcctactcgaacagcgactaagcctgtagacacctctcgattttctaccgtggaccggagttcgattctccgcacctccaccagcacatgtcatgcccctgacctgcataaccgcaggtcaggggttatttttatgccttcggtcagattgcggggaaatgcagtcgttcacgagaattcacgtaatttcacacgttttggcgctggacggcgagcgggggtcgcaagtcctaatcgcacgtcagaggggcatactggatagtcggcgagggcggacttaagtacagggcattgtgggccaattctcacgtttgccttgtaatctgcgatagcatccccatcgttcggccgcgtgcgagttttgcaggtcacgggttacgctagaatggcaaatcttttcgggctcgctttcgaacatatttgcgaactgcaaaatctttctttggagcagttacgcgagccttccatcgccatgaacgtcatcgtgatgaccacacggtgccacgattacctcgacagcgtgctcaaagggtaaggcttcttcccacgccagcgcctttgcttgagaacccttcgcgttaagccgcctgtatccggcgatctgccacggcgcctataacgaccgatgccagcccgcagccgattccgccaatgggccagaacacccagaagaactcccagcccgtgatccacagagacgctaaggccaccatggtggcgacaatcatcaacgcaccgcagacggtgcctgtagcatggctggcccagcgctttgtttcggcgcggcagcgttcgctcggttcgagttcctgcgcggcagactcaaagtccttgtcacccagcgagcagagcgcctccatattgtaggcgtcaatgtcggtcatgccccacaggcttgccgcgcgcacgacaagccccacgcccgttcccagcaggagcatcgtgacggccatgcccccctccgaagctgcggagtcgtcgacgaagcagccggcggcaatggcgctgatgacgcccaggaagatgacggcgatgcctatggccaagttacgagcgcgggttttctcgttcgcagcgcggtctttggcactgtaaaagtcgatgaggtagggatgctcgcgcatgaacgagttgtgctcggtggtggtcggaatgaggatgatcagcccgatagccacgcagacgagcgtcaccgccgcgatgccgatgccgttgtagacaatagaggggttgcccagcaccaggccggcgattgcttcggcggcgaagcccagaccgcagccggcaacgaacagcccgatgctcacgcccatgcgtcgcgcgcgggagcgcatgtggtcttcgtagccgatggtatcctgcgcggctgcgttggacacggactgcgcggggtcgttggggcgcgcggtcaggtcgccttccaccagttcgtcgatgctgcagtcgaaaatctggcaaattttcaccagcttgtccatctcgggataggcgcgctctgcctcccatttggtgacggcctgacggctaacgccgaccatcatggcaagttgttcctgcgtcatgtgacgcgtggcccgtaagtgctggaggttgtccctgaagctcatggcatccgctttctcgtggttgggatgattatgacaaaccccagattggggtagcaaggcggttgccacaagaaactggcggttgcatttcggttgcctcccttcgttgcggcacgagggggcgtgagcatcgccccgcgtctgatgcgcctagaactggtcgagcaggtggtcgaacagttctagggcgtcgtcgatgggctgcgcgctcgccatgtctacgcctgcgccgcgcaaaagttcgatggggggcttgctcgagccgcccttcagaaatcccaggtagtcttcgacggcggaagcgccttcgtcgaggatgcggtttgacagcgcgattgccgcggcaaagccggtcgcgtactggtacacatagtattggtagtagaagtgcgggatgcgcgcccactcgagcgcgatctcgtcgtcgacgacgatgtcgggaccaaagtacagctcgttgagctgcctgtacttctcgcacagcgcgtccgccgtgatgccctcgccacgggcggccatctcgtttacctcgagctcgaactccgcgaacatcgtctgccggtacatcgtgccgcggaactgctcgaggaagtggttgaggatgtacgcgcggcgcttgggatcggtctcggtcttgagcaggtagcgcgtgagcagcgcctcgttgcaggtcgaggcgacctcggcgacaaagatgacgtagtcggagtacacgggcggctggttgtgcgacgacaggtaggtgtggatggagtgccccatctcgtggatgagggtgtacacgtcgtcgagcttgccctggaagttgagcaggatgaccgggtgcatgccgtagccgccggcagagtagccgccgctgcgcttgcccggtgtctcgtacacgtcgatccagcgctcggtgagccccttgcgcacgagtgcgagataatcctctcccatgggctcgagcgccttcaagatgagctcgcaggcctgctcgtaggtgaagtccatctcgacgtcttccacgaggggcacgtacaggtcgtagaagtgcagctcgtcgacgccgagcgcctctttgcgcatcttcacgtagcggtgcatggcgggcaggttcttgtgcacggtggagatgaggttggtgtagacctcggtcggcacctcggtgtggtcgaggcagtactcgagggcgctgccgtatttgcgcacgtcggtgtagaacttgagctgctttgcctgcgcggcgagcgtcgcggcaaaggtgttgcggaactgcccgtaggtgccatagacgctcttgaaggcggacatgcgcagcgcgcggtcggaagacatcatgagcgggatgtagctgccgtgcgtgaccgggtgggcgttgccctgcgcgtcgtgcgcatcagggaagctgaggtcggcgtcgttgagcagcgagaagatttcttccggggcagatgccatctcgccggcgcgcgcgaggatggcttcctcggcatgggacaagacgtgctccctcatgcggaacagctggtcgagcgagcggcggtagagctcgaggcccggctcgtcggcgtagaactgctccatctgcgcgtcgctcagctccaagatctcggacgagaaccatgccccggcactcgcgagctgagtgtagagtgtcatgacctgcgaggaatatgcctggtacttggagtcgcgcgtgtcctcgtcgctcttgcgctgcgaccagttgacgagcttgctcatctcgaggtcgatctgcgtgtcgagccgcagaaacgcgagcaggtttgcggcggattccgagacgctgccctggtaggcggcgatttgctcgggatatgcctgcgcgtgctcgagcgccgcctcgaacgcggcgtcgtctgcaaacatgtcggtgaggtcccagaggtacttttcatcgatttctgtgcgagagttgtaggccatgtcaacgctcctcatgtcttttcgcagcgcgcgtatgcgcgcgttatcttgtgtctgcacgggattatagaatgtccccgagacgcgctttttcaggaaacgggagcgttgcttgttagttgctgtaagatggggcaattatgaataacaaacctattggcatcttcgattctggctttggcgggctcacggtggcacgtgcgatccacgagcgcctgccccaggagtccctcatcttcttcggcgacaccgagcgctgcccctatggcacgcgcgatttgcgcgaggtccgcggcttcgtccggcagatctgcacgtggctttccaagagagacgtcaagatgatcgtcatcgcctgcaacaccgccacggcggcgggcctggcgcttgcccagatggagttcgacgtgcccgtggtgggcgtcgtcgagcccggcgcgcgcggggcggtccgcatgacgcgcaaccgcaaggtcggcgtcatcgccacccaggcgacggtcgactcggccatctacgccgacaccatccgcacgctcgatgcaggcgtgaccgtgtactcgtcggcggctccgcgcttcgtcgagatcgtggaagacggcctgcgcaagtccaacagccccatcgagcgcctcaccgccgaggcaagcgacgtctacctgcgtccggcgttccaggagatcgcgcgtgactacctcgacccgatcaagaaggcgggcgtcgacacgctcgtgctgggatgcacgcactacccggtgctcgagccgctcatccagcaggcggtgggcgagaacgtatcgatcatctcgtcgtcggacgagaccgccaaagaggtcgtggagacgctcacctaccgcgggcacctgtgcgacggcagcatcccgccgcacaacagcttcaacacgacggggcgcgacctcgacgagttccgccagattggcgggcacatcttcggcgagcccatcgaagatctcagctacgtcgatatcgacacgctgtaacgccgcacgatgccgggcgcgccccggcgtgcgagaataggaaggtatcccatgactgtaaacatcggactcggtcgctcctacgggcgcacgcccgaccagaagcgtccgaccaagatcacgcgaaactacatcgagaacgccgccggctcatgtctcatcgagaccgggcgcaccaaggtgatctgcgccgtcactatcgaggagcgcgtgcagagctggcgcaagggcagcaacctggggtgggtcaccgccgagtacgcgatgctgcccgcttcgaccgccaagcgctcggcgcgcgagtacaagggccgcaagggccgcagcatggaaatcgaacgcctcatcggccgcagcctgcgcacggtcgtcgacatgtccgggctgggcggcgaggtcacgttccatgtggactgcgacgtcctgcaggcagacggcggcacgcgcacggcgtcgatcacgggcgcgtgggtggcgctgcacgacgccatcgagatgtggaagggcgccggcaagatccagggcaacccgcttttggaccaggtcgcggccatcagcgtcggcatggtagacggcaggctgctgctcgacctcgactatcaggaagactcgcacgccgaggtagacctcaacctcgtcatgaacgggcgcggcgagatcatcgagatccagggcacgggcgagcagacgccgttctcgcgcgagaagctcaacaggatgctcgacatggcagaaggcggaatcaaggagctgctcgaggagcagcgcaaggccatcgaggagtaggcatggctgcaaagaaggtcgtcatcgcaaccaacaacgcccacaagctcgaggagatttcccgcatccttgccccgctgagctgggagttcgtgagcctcggctcgtgcgggcagttcccggagccggtggaggacgccgacacgttcgagggcaacgcgcgcatcaaggcgcttgccgcgctcgagaacacggggctgccggcgctcgccgacgacagcgggctcgaggtggacgcgctcggccggcggcccggggtgtactcgagccgctacgcgggcgaggatgcgaccgacgaggagaacaacgacaagctgctcggcgagctcgcggacgtgccggatgacaagcgcacggcgcgcttcgtgtccacaatcgtgttcgtggacaccgatggcacggaggtcgtcgcgcgtggcacctgcgaaggcgtcatcggccacgagcgtcgcggcgagaacggcttcgggtacgacccgctgttcatcagcgacgacttgggcggcctgacgaccgccgaggcggcgcccgagcaaaaggacgcgatcagccatcgcggcaatgccctgcgcgcgttcgtcgagaaggcccgcgccatctacgcgtagggtttgcggcgggtgcgccgattcacgaaagtcgcaaaacttttcttgtgacgtgcgggtgatatccgctatactacgttctcgcgcgtagcgtctgcgttccggtagaggatgacgcgcggctgccgatgtagctcagttggtagagcaccgctctcgtaaagcgggggtccagagttcgagtctctgcgtcggcaccattcacaagtcgaggccaggttccttcgggttcctggcctttttgtttgcacgcgtgtgtggcggcgggttcggtgacaccgcgggacgcgtatggctgttttcgcgccatggcggatggccattggcgggatggcatgccaagcggccattggcggttcgtcgtggtacccttgtcgaaatttgacacgcaggaaggacgaaccccatgcattacacgggacccacgtaccgcccgccttatgaggcaagctcgcttttgctgcaggtcacgaccggttgcagccacaacgcctgcacgttttgcagcatgtacctcgacacgccgtttgccgtctcgccgcgcgaggagatcgaggcggacctgcaggaagtgcgggcaagcggctgggagccgacgcgcgtcttcctcgtcaacggcgacgccttcgcgcttgatgccgacaagctcgtttgggtggcagacgccatccaccgccatctcccttcggtgcaatctatcggcgcctacgcttcggtcatgaacgtccgatcaaaaaccgatgccgaccttgcgtgtctggcagcttgcgggtattccgagctcaatatcgggctcgagtcggggctcgacgacgtgctcgcgtacatgaacaagggctacacggtcgccgaggccctcgaggcgatggcgcgcctgcatgctgccggcatcgccttcaacgtcaacatcatcaatgcggccgccggtcccgagcgtatcgcggagcacgccgccgccaacgctgcgctcgtcaacgcgggccgcccgacgctcatcttcgtttctccgctgcacgtcgatgccggaagccgcctcgaaggacttgtggcgacgggagattttgccgagtgcacgctgggggagtatctcgacgaggaaatcgcgtttctcaaaggactcgagctcgaaaactgcaccttctttgggctgcacgtgagcaaccccgtgcccgtattgggggagttacccgaggacaaggaacgcctcgtcgcagaactcgaacggggcaaagcgcagattcccgcgtatgagctcgattcacatccgtacaagggtgccgagggccgtatttaccggtaatacggggatgcacggcgtcgtcaccggtggtaccgcgggacgcgtatggtcgattccgcgccgtggcgggtggccatcagcgggtcggcgtgccaaacacccattggcggcacgccgtggcgtgatttcagccatcagcgggatggcgtgccaatcaaccaccggcggcacgcggcggcgcgaaaccgaccatggggcgcccgccgtgccatcccgcgtctcgccccgcaccaaacccgcactccgtgggtaacaaaatccagcaattgtaaccccgcacgcgacagcatcggcaaaccgagcggtgcatggacgggtttattcccgatacagttaatgcagggtgacgctagacggggaggattcgcatgcttcaatttggacagaaggtcgagattaactacgccgggtttcttgaggacgggacggagttcgtgaacacgtggctctcctcggattccgtttccgtcacaatcgggcaaagcggtttgttgccggcgttcgagcaggcgctcgtcgacatgcaccgcggtcagcgcaagacgattgatatcccttgcgagcaggcatacggatccttcgacgaatcagcggtcatcaccgtcgccaaggcgggctttccccatgctgacgagctgcccgtgggcgagtacatcgagttcgatatggcgggcggcacgggcagggcacgcgttgtggcggtggacgacgagacgatcgtgttcgactgcaacccggagctcgcgggtcatgacctgcgcttcgagatagagctcgtcgacgtcgaaggaagcacggcgctcgaccaggaatccgaggcgaccggatgcgggtgcgaccgcttgcgagaatcgcttggcgctcatcatcacgatcatgcgcatggaaacgtctgcacgagctgctagtctgtaccaaagtcaacaatccatccgatgcggcagacatggccgcatgcgcgccgttgattgggggagtcatgggtgcgaaagaggcgtttgaccgtacgttccggcagctgatcatgactatgccgtattcgaagatcacggtgaccgagctgtgccgcaaggcgcatctgtccaggaagacgttctacagcacgttccaggacaaggaggcggtcctcgagtcgatcttcgtcgaagatgtcgtcgtgccgatacaggagatgaacaggctgttgtcggtcgagcagagacgccagctcacgaacgtgctgatggagaacatctatacccgtatctgggacgacaaggagttctaccaggcgctcgtccgcccgatgaaaggggtcgacgacacgttcatccgcgtcgtcacgcactcgctcgaggcgctcaacagcgaaatcatcgcagagttttcctcgacgaaaggctacgaggcggagtacgtgtcgtacttcttcgcggcgtctcaggccatgctcgtccagaagtggatcttcgacgggtttcccctcgaacccaaagagctcgccgcgctctacaagaagatgctgaacgagtactggctcaatcagttctgaggatgggtgacacagcgcccattctgtgtcctgtccatactcacaagcgcactatcggtccaaacagggtcatagcttgcccgactcgggaattggccccggatcggccgctcggtacctttgaaccacaagcaggagacgatggggagcaccggctctcctgcaatgtctcggagcctgtttttccaagatggttcgaggaaaggagcgggagcatgagtgagagggatggctacaccacgacggtgcagagcatcgcaagcggcggtacgggcggtgagccaacggcagtcgacaccaaggacggaaagatcgtgcgcattcgtcctttgcacatcgacgagaaatacacacccgaggaactggccgattccatgtgggagctcgacgtcgacggcaagaagctgcgtccggagatgaaggcggcgcccaactacatggcacttgcgtacaaggagcgcgtgtactccaaaaatcgtgtgcgcaagccgctgaagcgcatcgactgggaacccggtggcgacccggagaagatccacgcggaaaaccgcggcaagtccaagttcgttgagatcagctgggatgaggcgctcgacatcatggagtccgagctcaagcgcctgatcgacaagtacggcccctacaccgtgctgtgcgtgggcgaagacgggcaccgcgaatccaaggacctgcacgcgggcggcggcatgcacgcgaccgtgatgaacttcctgggcggctacacgcgcgagacccgcactcccgattcggtcgagggctggtattggggcgcgaagcacttctggggctcgggcttcaaccatggcggcggcttgattgccccgccgcagaacaactacagcaactacaacgtcatgaaggacgtctcagagaactccgacctgctggtgttcgacgccggcgactgggagctgacgcagaactacgcgtccatgttcttctccagggtgctcaagtactgggaggacctgggcaaggagttcgtgtcggtcgacccgttctgcaactacaccacggtctgccacaagaccttcaagtggatcccgattctgcccaacaccgacacagcgctcgactttggcgccatgtacgtgatgatcaccgagggcatctacgataaggagtacatcgacacccattccatcgggttcgacaagctcgtcgactacgtcttgggcaaggaagacggcgttcccaagaccccaaagtgggcgtccgaacgctgcggcgtccccgagcacaccatcaaggcctacgcgcgcaacctgtgcaagaagcgcgcctcgcacgtgcactacagctcgggatccatcaagacgccgtactcgcatgagccgggccgcacccaggcgtacctgcttgccatgcagggccttggcaagccgggcgttcagcagctgcaccttgaggcgaccaatatggcgaaggagaaactcgcgcagtcttcgacccgcccgttctcgatgctcaaccactgccgcatgttctatccgtccgggcagtcgctgccccgcaccgccatcgccgaggcgatccgcaacggccatgtcgaatggtacggcagcccctgcatcgtctacgtcgacaccgaagagcagttcaagaagttcacgtacccgggcaacccgcaggtcgcgctcatgatggcgcaggccatggcgaagcgcgcgggtacagaggttcccaccgaggagccgaaaatctctccgatccacatgctgtggtccgagaagccctgcaacatgaactgctggaacggcggcttcgagttccaggacgccatccgcagcccccaggtcgagttcttcgtcaccaaccaccagtggctcgagaacgattcgctgttctgcgacctggtcctgcccgtcaccacgtgcctcgaagacgacgacaccatgggcgcgagcatgaccgtcggcatgcgctatgcgggctacacgccgcatgcgtgcgatcgcgtgggcgagtccaagtccgattgggagattgccctcgaggtgctcgaccgctttggcatgcgcgagaagctcgactacggcatgtccacccagcaatggctcgaatacggcttcaatacctcgcagctgccgaccgaggtcgactgggacacgctggtcgagaaggggctctactatcccaagctggaggagaactggcgcgacgagctgcccggcatgcgcggcttctacgaagatcccgagaagtacccgctcgacacgccgtctggcaagctggagttctactcccaggcacttgcggagcacttccccgacgacaaggagcgccagccgatggccaagtggatcgttggcggccccgctgaggaaggctggacgcacgacgagagcctgtggggcgagcgctgcaagaagtacccgctgctcgtcacggcaaatccggcacgcttccgcgtgcacgtgcagggcgatgacatcgcctggtaccgcgagatcgagaccaccaaggtgaagggccccgacggctatctgtacgagccgctgtggatcagccccgaagacgccgatgcgcgtgagatcgaggacggggacatcgtcaagctcttcaacgaccgcggcatcgtcctcaccggcgctcgcatctcggagcgcgtcatgcccggttcggtcgttgttgcgaagggctcgcgcgtcgacccgattgcgccgcacatcgaccgcggcggtgccatcaacctgatcagccccgaagagaccgtttccaagaactgcaaggggttcgtggtcaccgggtacctggtcgaggcggaaaagctcagccaagaggaatacgacggctggaagagcgaataccccgaagcattcgaacgcgcttacgatccgggcgagggcattacgcgcgacgcctgggttgtcgaggcataagagaaaggctgagataccatgaaaggctttctgattcatgcagataaatgcgtaggctgccacgcctgccagatcggctgcaaggacgagcactgcggtaactgctggatgccctacgcccaggagcagcccgaatcgggacagttctggatgaaggtcgaccagaaggagcgcggacagcgcccgcaggtcaaggtgagctacatccccacaccctgccagcactgcgagaacgcgccgtgtatcgccgcggcaaaggacgctgcggtgtatcgccgcgacgacggcctggtcatcatcgaccccgagaaggcgaaaggccagcgtcagctcgtcgacgcatgcccctacggcaagatcttctggaacgaggagctcgagctgccgcagaagtgcacgggctgcgcgcacctgctggacgacgagggctcgccgattcgcgtgccgcgctgcgtcgacaactgccccgtccacgtcatcgagttcggcgagctcgacgagctcgacctcgagggcgccgaggtcctgcaccccgagtatggcaccaagccgcacgtctactacaaggggcttcccaagaagttcatcgccggcacggtgttcacgcccgccgacgaagagatcgtcgagggcgcgcaggtcgtcgtcacgaacggcgagcagacctacaccgacaccacgaacagttggggcgatttctggatcgacggcctgcccgatgacgactggacggtcaccatcaccggcgcgggcaaggagaaggtcctcaacgtgagcacggtcgacgaagacaggggactcggcgacatccccctggcataggggcatggggcatgtgcccatctagcgagtcccacgcgggagagacgagtcggggagggggcaacccccggctcgccccggtgtggatcgtgcgcgtcgactacggggcgaacgagctcttcgatgccgacgggaacggctaccacgagcttccc

SEQ ID NO: 910 - DNA, 16893 bp, Unknown
  16S sequences of unknown bacteria
ccgggaacctttctctcgcgggctgtatactgataattctgctcgcggcggatttcttcattccgatgcgccagctcggctcgttcttccatgtcgcgatgaacggcatggcggcgagcgacaagatattcgcgctgcttgacctttcggagtcagacgagaagacggcggattttccgaaggattcggatatcgtctgccgggatgtccgcttctcctacgagccggagcgcgagatacttcacggtgtcagccttgaactgaaaaacggcgctttcaccgcgatcgtcggtgagagcgggtgcggaaagtcaacgatttcgtcgatactcaccgggaagaacaaaggctataccggtacgattagcgtcggagggaccgagctctcggatatttccgaaaagagcctgcttgaaaacgtgacatacataagccaccacagctatctcttcaagggcactgtgcgcgacaacctgctgatgggcagaccggacgccgacgacaaggcgctctgggaggtgctcgagcgggtcaatctcgccgacttcctgcgctcggaggacgggctcgacacgaagctatcggaaaaggcggcgaacctttccggcggacagtgtcagcgtctagcgctcgcgcgtgcgcttcttcatgacagcccggtgtacattttcgacgaggcaacctcgaatatcgacgttgagagcgagaatgatatactcgccgagattcaccgtctcgcgaagagcagaactgttcttatgatatctcatcgcctcgcgaacatcaacggcgcggacgaaatatatgtcatggacaaaggaaatatcgtcggtcacggaacgcacgaaaaactgcttgaaacctgcccggcatattcggagctctggaacgcgcagcaggcgctcgaaaactatcatggaaaggagagcatgtgatgaacactgaaaaacagacaaaaagacgcggcggattcaccgttatggcacggctgatcgggcttgtgaagccgctttcgggattcatgatcctcgcgatcctgatggggctttcgggaaatctctgcgcgtcattcattacgatactcggcgggtacgcgatacttgaagtgctcgggatcggcgcggggatatcgctcggggtgattttcactctcgcggttctcttcgcgcttgtgcgcgcggggctccggtacgctgagcagtcctgcaaccatttcatcgcgttcaagctgctcgcgcttatccgcgacaaggtgttcagggcgcttcgaaagctctgcccggcgaagctcgaggggcgagacaagggtgacctcatatcggtcataacgtcggacatcgagctgctcgaggttttctacgcgcacacgatttccccggcggcgatagcgctgctgttcacggtgatcatgtgcctgttcatcggcagcttcaacgctctgctcggacttctggcgctcgcggcttatctgatagtcgggcttctgataccgctcgtcgtctcggggctcagcggggacaacggattaaaataccgcgccggcgcgggtgagctctcggcgttcgtgcttgacagtctgcgcggattgtccgaaactctccagtataatcagggcgcgaaacggctcggagagatgaacgcgcgctctgacgccctcagctcagacgaggagaagatgaagcgtatcgccggaagaaattccgccgttacgaatgttgtcattcttgttttcgatctcctgatgcttttcgcgtccgtgtcgctctaccgcgcgggtgaggttggttttgccggtgtcctcataccgacgatggcgatgatgagctcgttcggaccgtgtgtcgcgctcgcggcgctcggaagcacgcttcagaacacgttcgccgccggaaaccgtgtgctcgatattctcgatgagaccccggtcacggcggatataacggacaagccggagacgacgtttgacggcgccgcggcgaagaatctctcattctcgtacgcttcaaccggagagcggatactttccgacctgtcgctcgacataccgaaaggaagcgtcgtcggcataaccggaaggagcggcagcggaaaatccacgcttctgaagctcttcatgcgcttctggcgggcgacctccggagaggcggacatatccggaaggtcggttgacgagataaacaccgccgatcttcgcgggatggagagctttgtcacgcaggagacgcatcttttccacgacagcatcagaaacaacctgaagatagcgaagctcgacgcgacagacgaggagatcgagaacgcctgcaaaaaggcgtctgtccacgatttcatcatgacgctgccgcagggctacgacacgcctgtcggagagctcggcgatacgctttcgggcggcgagagacagcggataggtctcgcgcgggcgtttctgcatgacgcgccgctcatgcttctcgacgagccgacgagcaatcttgacagtctcaacgaggcggtaatactgaggtcgctccgcgaggagaagagcggaagaacgatcatgcttgtatcgcacagaaagtcgacgatgaggatatgtgacaaggtctgctcggtcgagcacggaagactcagctgaataatgttcgggagacctcctatggggtctccttgtcacatttgccgaaacgcggtacgtctttcagggcgccgggcggtaatgtgaaaaaaaatcacaaatgctctgaaaccccttgcaaatccgggctttttgtggtacaatatgaatgcaaagttttctctggatgaacaggctgctgacggcggcttttaatgtaaaaatgcagttagcgtacactaactgcattgtaaacggaggcagatcatatggaatacttttcaaagaaataccgccgcgactgtctgctcggggcggtcccttctacgtgggacttcatcctgagtcagggttccgcaaacgcggcgctgttcatctggcttgcggcgagcgccgtctgcgcgggcagactgaaaacagaagagtaaatgtgatgttcggagttctcggcgtgccgctgttcagggagcacacctgcgccgtggacggttactgcgacttcaggctgaagcttgtcgcggagccgatgccgtatgatccgcctgtgttctcgcgggggaaggggttcaggtgatactatgataatcagaaaatattgatgagaatataatacatgatataggaaacgcgttcgcgtactatgattacggggacgaaaagggaattgccaccgcgtttcctgacaaggacgccgtcgcgctgtatatatgcggttacgtcaggggaatgctgaacggcggcttcatgcggacgacgagcgggcgcggagatggcttcattgagaccgacgcgatggcgaaggttgacaggtatgtccgtcttggaatggaactcgacgggacatggaacttcggggagtatgggaagctctacgatatgataagatatccggtctgaaccggggaataatttcaggagacgagaaaatgaaatatattggaatgcccaccggaatgtgggtgttgttcgcgggctcattccgtgaacagctgacgaatgtgtttggctatgacaaagaaacagcggcgcggataacgaaggaagcgaagccgagatacaaggagataatttacggtctgccggaatttgagaagaaagaccggttcagaatgaatattgtcaactgcgcgatgctatgcgcttttatcctgtcgatgccgcgccgccccgatgtcggaccgctgaccgattactacgcgaagtcgatgatgaccggaccgatgcgctggttctgccggaagagcgccgcgaaaaaatacaccgcgaaggacatcgcgggcatgaaagcgacagcggagctgagagcagccgaccgcaacccgtactcgtggaacatggacttatatgaatatccggacggcagcggctatgaggcaagattttcaaagtgcgggatctgtgttcttatgaagaagctcgggctttatgacctgacgccggcgctgtgccatctcgactacacgatgagcgaggcgggcggaggatgcgactttgtgcgggaatacacgcttgcctccggtggaccgtactgcgactgcggatataaaaagaaaagaggttaacggagtataaaagcccggtgcccgagaattataaaaatttgaaacttatctgacgtgaaaggatcaatcgcaaaatgaaatacaacggtttttatttcggtattttccaaagcccgatgaaaaaggtcatagaggaaaaatactgtcgtgaatacgcggacgagataatgaaaaagagcagaatggtctatcgtgaccttgtcggtggcgcggacgacatcggtgacgacaatcctatggcgtataacgagctcttcgcgctggcgtttgtcgcgccgtacatcgcgagcgataagaagattccgccggagacggtgcaggagatgatgcgccgctcgctttacaagatcaagtggtatttcagcatgacaaacctcaacaccgtgcgcggaaaggcggcgaacaagaaggtcataatgaaatacgtaaagtggtacactccggaaaaggagaagctctatccgacgtcgtagctgtttttgtttatctgtctggtgattcctgcgtttccattattttttgtttcgtggagtacatcccatacatgaaataaatcgtgagaatccccgcactgagccgtttttcattactcctgccgtgaactgtacacagttttctgactgcgcagcctcacattccgatctctgacagctttctcatattttcacgcttgagttcgagagaggagtgcacataacgatcaagcgttatcgtcgtcgttgagtgcccgagtatctctgagagtgactttatctcaaagcccgcctctaccgcgcgggtcgcgaacgtgtgcctcagcgtatggaaatgcactccatcaagcccgcagtcgcgcgcgtatttcttcatcctgtattgcagagtccgcggctccatgcacctctcggaactggtcagaatgtatgccgcgccgttctcgtgccgcattctgtcgcagagctcctcgcgtgtcagaacacgcatctctttgcgttcccttgcgggataccgtattcttggcaccgcggacccgttcccagcgatcgccgctgcatagacaagcactccgcgcagcacgacaagtatgtcatgcaccgttttcgctgatagcccgctcttcagaagcccacgggagaactcgtcaattcttcccgcggtcagtcggtccggcgcgcagtcaccaagcgcggggttgatgtgcctggttactatgcactcgtatttgattattgtagattccttgacttccgagcgctttttatcaagccatccggcgcttaacacggagatcatgggttgttccgtgaccgtctgcgcggcgggtttctccgacgcgcggagctttgtcaccttttcctttgcctcgcggtaggtttttccgtagcagaagccatatattatctttccggacggcgcgcggtctcttatgtaccgcgcctcccaacatccgtcttttcttttgaagatgttttcaccttttgacattattttgaccattcttttcgtattatcttgcggttttgaggcattttgaaagatgtcttgtccagagcgcagtgactgcttgcctgactgcgcttcctgcgcaagaccaacagtttgttgtgaatatgctctgctgattacagctcatttaacgcaaatcaagcgaaattttcagcaagaaaattcaggaaatgtattgacatgacgtttgatgtgtgatataatattaacgagaaagagatttccgggactactgccattttatcgctttcatgtatgggatgtactccacgaatatcgaataaacagaatcctcccgtgtgtcgaacagggagggttttctgctttacaaaaatgtaaattttcaaaaacctattgacaattgcaacattttgtggtagaatttttctgcggaaatcagaagcgtattctgataattttattgaaacggagttagcgtgtgctaactgcacgcggatttctgcgaaaaattcaaggttattgcctatacaggttagcaaatgctaactttcgtgcagaaaggaattaaaatgaagagaaagaaaagggactcgtggaagtcggccatggcaggcgcgctcgccctcctcatgataagcggaaaccttccgcttcgggtatacgcttcggatacggttgaaaaagctgacacaggttcagctgacgcctctgtgagtgatttcacaatcgaaaacggcgtgctgacagcctacaagggcgagtcgaagaatgtcgtcatcccagacggcgtgaaggtcattggcgacgggtcgccggtcttcggaaacacggttgaatcggtgacgataccgacgtcggcgactgagatcgcggagatggctttctacggctgttccgcgctcaaatcggtgacattcgccgaggaaagccagcttaaaaagatcggtgaatccgctttctacacagcgacctcgcttgagacgctgacaattcccgagggcgtcaccgagatcggaacaaatgccttctacgcgacacacgcgctccgcgagataaatctccccgcgagcctcacgaccgtctgcggcggcgactggttcggaaaactcttcacgttcgggactactgctggcgctccgcagagcttaagcgcggtcaatttcgccgacggaaactctgtctacagctctcacgacggagttgtatattcggctgacggaaagacgctcatctactgcccggcgaaaaagacttccattgactggctcgcgggggtcgaaacaatcaagaccgactcgttcttcagatcgactatcgccgatcttcagatccccgaaggcgtcacgacaatagaggaaaacgcgttcaagttttgcgcagccacgtcggcgatcttcccgtcgacactgaaaagcatcggaaggatggcgttctattcgtcaaagctcaattcaatcatcttctccgagggacttgaaactatagccgcttcggcgttcgacgaggtttatttttcaaaagacggctcaattactcttccagcgtcgctcatttcggtcggatcgtcggcgttcggctgcgttacagacagcgtcaaaaaagtcaccgtaacggttctcggaagcggcactgagcttggctcatacttcattccgaacagcggtaatatcacgcttgtcggctatcccggctcgaccgccgaagcatacgcgaacgcgcttggcgacaataaaaacctcacatttaagctcattggcggctcagaggaaaaggaaatcgagagcgtcactctccccacgactcttgaactcagggtcggggagacctcgactctcaccgcgtcggttctccccaaggacgcgtcagacaagacgctgacatggtcgtcgtcggatgaaaacgtcgcgacggtcgatgagaacggcaaagtcaccgccgtcaaagccggaaacgcggtcatcaccgccaccgcttcgaataatgtctcggcttcatgcgagctcacggtcgccgagatcagcgatttcaccatcacggacggcgtactcaccggatacactggggcggcgaagaatgtcatcattcccgacggtgtgaaggtcatcggcgaaggctcgtcggtcttcggaagtgaaatcgaatcggtcacaatccccacgtcggtcactgagatcgccgaatacgccttctacggctgctccgggctcaagtcggtgaccttcgcagaggggagcgagctcaaaaagatcggcggatctgccttctacgccgcgaactcacttgagtcgctgacaatccccgagagcgtgacagaaatcggaatctatgccttctgcgcgatgagcagactccgcacgataagtctccccgcgagcctgaaaaatgtctgcggcggagagtggttcggaaacctcttcgcgcgcggtacgtcaaacaacgcgccggaaaatctgatgaacatcaattttgccgacggcggcgataccttctcctcatatgacggcgcggtttattcggcggacgggaagacgctgatctacagccccgctgcgaagaaatcgcttgaattcgcgaaaggcgtcgaaacgatcggtcagtacgcgctctggagagcaaatctcacgtcgatgacgctcccggataccgtgaagacgatcgagtcaggcgcgttcaaccgctcgcagatgacgaaagtcgagatccccggaagtgtcgaaacgatcggaagctccgcgttctttttcgcgaatgtctcaaatctggttctgaacgagggactcctcagaatcgaggacgccgctttctcgcagagccatgtcgcgcaggtgacgatccccgcgagcgtcacttatataggtgaaaccgcgtttgatttcgagtacggaagcgactatttcatccgtttcctcggaaaggatactgtgcttgccgatgagttcatcccgtattattacgcgatcaaggtctacgcgccgtcgggctcgaccgccgaaaaatatgttgcggacaaaaagactgcgaagggcgacagctgcaagcttagcttccatgctgaagggttcgttgaggcgaccgctgtaaagctcgacaaaacgaccgcagagcttcgccgcagacagaccttacagctcaccgcgtcgcttgagcccgaaaacgctcaggaaacgataagctggtcgtcgagcgatacctcggtcgcgacggtcgacaagaatggtctcgtcaccgcggttcagtccggaagggcgacgatcaccgcgtcggtcggaacgctcaccgcgacctgtgagatcgacgtcgtgatcgccgagggcgagagcgattttctcgtcgacgaatctggtgttgtcaccggattcatcggcgtcgacgcgtccgagcttgtgattccgtccgaaattgacggaaagacagtaaccggaatcgccgcgtccgccttcaaggataatcgcgatataaccaaagtcacgcttcccgaaagcgtgaaggcgatcggcgaggacgcgtttgctggctgctcgtcgctcactgagataaatcttgaaaatgtcacctcgatcggaaagaacgcgttcggtcagtgccgcgcgcttacgtcggtgaggctaggagagggactgacggttattccggagtcggcgttcacctcctgcgccacgctctcgtcggtaacacttccgtcgacgatcaaggaaatcggaaagaacgcattcacactctgcgccttcacgtcgattgagcttcccgatggactcacgacaatccgttacggagcgttcagaggaactccgctcgcatcgcttcatctccccgcgtcgctcgaaaagctcggcgacagctacataggcgatgtcttcgagattccgggttcgcaggcggctgacaagtcgctcgaaaacatcacgatcgacgaaaagaacccatgctggacgtcggtcgatggaatgctctactcaaaggatctttccgagatcgtattctgcccgcgcggaagaaagaccgcgaaggtgcttgacagcgtgaccacaatcggacgttacgccttcttcatgtgctttgacctgacaaaagtcgagcttcctgccggactcaagaccgtctccgagcaggcgttccactactgcgaggctcttgtcgactgtgttctccccgccggactcgagcgcgtcgagaattctggcttcttcgggtgcgaggagtggaccggagtcgacaacatcccgtcgagcgtgacattcataggcgactacgcgttcgccgagtgcaagggaacgaagctcgtcattccagagggcaacacctcggtcggaaagttcgcgttctacggctatgaggagacgctgagagagatagttctcccgtctactctccgcacgcttggggattccgcattctcgtacgcgaagaatgtaaaggagatcgtcatccccgagggagtgacctcgatcggagatcagtgcttcggaatctcgaacagccttgaaagcctgatcctcccgtcgacgctgaaatccatcggcgaagaggccttcaagctcggtcagggcaccgaaaacaaactttccgaggtctacatcccggcgtcggtgaccagcatcgcgtcgaacgctttctcgggacgcgacggaataaagatcattgccgacaacgctttcacagccgccgcgaagttcgcgagtgacaacggctacaagctcgaactgcgcgattccgacgccgattttgagattgtcgacggcgttctcaaaggctatcacggaaccagtaccgatatcgttatcccgtcgaccgtaactgagatcggtgagggcgttttcgtcacagaagagggcgaggaaggcgtcgagatcaccaaggtcacaattccgtcgtcggttgtgaggatcggaaaggacgcgttcaatggctgcgaactcacgtcggttgtattcgagggtgaaaatctcgccgaaatcggtgaatcggcgttcgcttactgcacgaagcttcctgaaatcacgcttccggagggacttaaagtcatcggaaaagcggcgttccagggcacgagcgcgataaagtcgataaacatccccgcgtcggtcgagtcgatcggcgagagcgcgtttaacacctgctcagagctcaccgaggtgaacttcgctgacgacaacaagagtaaacttaaaacgatcggaaagaaagccttctatcagtgcgtgcgtctcggaacgctcgacattcccgagggagtgacgacgataggcgatcaggcgttccgcacgagcgcggggctgaagcacgtctacctcccgtcgacgctgacgaatttcggaacttccgctcccgcggtcttctcagacgtgaataacgccaacttgtccgggaccgatgaacttctctcgatcactgtcgaagacggcaacccggtctactcatcgaaggacggactgctctacaccgccgacggcgaaacgctcctcttttgcccgtccggaattaccggaacggtaactgtcgctgacggaacgaagacgatcggtagctcggctttccagcggagcaaggccgaccatgtcgtcctccccgaaacgcttcagacgatcgggtcgagcgcgttcaaatcgagcggattcgcgagcgttgagattcccgactcggtgacgtcgatcggctattacgctttcttcaactgcaataagctgaaatctgtcgggttcggacagaatctcagaacgattgaggatggagcgttctcgctgactccgcttgaaaacgcctcgctcccggcgtcgcttgaaagtatcggagacgacgcgttcgacagccttaagaattacgtccggattgaaaatccaggaacggttctcggctccggcttcatctcgtcccactcgaagatcacggtctatggtcactcaggctcgaccgctgagaagtatgtgaacgacgcgaaaacccggcttggcgacagctgcggacttgcgttcaagagtatcgacgcgtttgtaaaggttacgaagatcacgctcgataagactgagctggctcttaagcagcgcgagatctacaatctcaacgtcacaatcgagcctgacaacgctacgcacaaggacctcgtctacaagtcgctcgacacgaagctcgcgacggttgacgaaaacggaaagatcaccgcgcttcgtcccggaacggtgacgatcagggtactttcgaccgacggagtctacgctgactgcgttctcaccgtcgaagccgacgaatcgctcagcgatttcctgatcgacgagcgcggatacataaccggatatgtcggcgagcttactgacctcgttatccccgcgtctgttgaaaaccgcaccgtcgtcggaatcgccgcgggtgctttcgctgataaccggaacattacatcgcttgtccttcccgacacgctgaaggagatcgaaagcctctccttctcgcactgcgtcaacctcggttcggtcacgttcggctccggacttgaagtgatcggcgagcgcgcgtttgagtactgcacgcatcttccggaggtcaatctccccgagggacttgtcacaatgggtgactacgcgttcgattcctgcgagagacttgaaagaatcacgattccgtcgactctcactgaaatcccggacggagctttccacctctgctggagactaattgatgtcgtcatcccggagggcgtcgaaaccgtaggcagtgaagccttctatgagtgcgagggcatgagatcgctcactctcccgaactcgctgcggacgataaagagcgaagccttcgcggcttgcgtgagactcacgagcgttgttgttccggagggcgtcagggtcattgagaatcaggcgttcatgagctgcaccggacttacaagtatccatctccccgcgacgctcgaaaagctcggaggcgagtatcccggcgacgcgtttgagcgttcagatgtcctcggctgcaaccacctgacgtcggtaaacgtcacggcgggcggaaagtacttctcatcgaaggacggacttctctataacgctgacggaagcgagctcatcttctgccctagaggactcactgacgtgacaatccccgagggtgtcgagagaattggcgattacgcgttcttctactgccgtattctcgaaagggtaaacctcccgtcgtcgctgaccgaaatcggcgcgaatggtttcggaatctgcgaaaagctcacttcgatcgtgattccggatggcgtgacctcgatcggcgactcggcgttcgcaagctccgcgtcgcttaacgaggtgactctcccgtcgagccttgtgacaattggcgacaccgctttcctcggaacggcgttaaggtcggtcgttatccccggaaaggttgagacgatcggaaaagaggctttcgcttacaacgatcatctgaccgaggcgacgatccttaagaacgtgaagaatctcggcgagggaatcttcagaaattctccgaacgttacggtcttcaccgactcaaaggacgcgccggtttaccaatacgcgacctcgcgcgatattccggtgagacttatcgaaagcgacaagccggatgaacccggaattattctcccggttctcgacgcgtttgatgtcgaaactgtcgtttccgacggcggaaaggttgtcagcagccgcgagagagcatacagcggaaccagaatcactctcacagtgacccctgacgatggctatacgcttgtgaaactcaccgtgaccggagattacggcgagatcgcggtcatatccgacggcgataactggtatttcacgatgccggcgtcggatgtgaaagtcagtgctgagttcgccgcgccccatcaggcgttcgtcgacgttccggaagacgcctactacgcggatgccgtcgactgggcggtcagaaacggcatcacgaacggtgtcgcggacggtatcttcgcgccggatgcgtcctgcacgagagcgcaggcggtgaccttcctctggagagcggcgggagcgcctgtggctgacgctgattgcggcttcgccgatgttgactcttccgattactactatgacgcggtcgtctgggcggtcacgaacggtattacgaacggagtcggagatggtctgttcgcgcccgacgaggtctgcacaagggcgcagattgtgaccttcctctatcgcatggcaggttcacctaagactgacggaacagtattcggagatgtcgcggcggattcgtactacgcgtccgcggtcagctgggcagtatcaggcggagtcacgaacggcgtcggaaatgattccttcgcgccggacaatatttgcacgagagcacagattgtgacgttactctacagatacgccggtatctgatgctataactcgaaaaaatgagcccgacagccggtcgggctcatttggctgtttttttcgtcttcctgttgcaaaccggaagtctttgtgctataatataatcagaagagtacaggaacggctgccgcgcggcggcttttcaaaaacgcacgggttagcatactctaacctgtgccggagttatatttgagaaaacactggtttaaggttaattttgcagaaaaacaaaaatacaaatatttttctgcgaaaacccgatctattcagcgtttctttgagaaggtgtgatttggaagtttttttcggaatacttattccatttatcggaacgacgctcggctcggcgtgcgtgttctttatgaagaagtcgctcggcgtgacggttcggcgcgcgctttccgggtttgccgccggtgtcatggtcgcggcgtctgtatggagcctgctgatacctgcgatcgggcagtccgaggggatgggcaggctgtcgttcattccggctcttgtcggtttctggattggcgtgctgtttctgctcgcgctcgaccatctcattccgcatctgcacatgggcagcgaacaggctgagggaccgaagagccgactcagccgcgccacaatgatggttctcgccgtgactcttcacaatatcccggagggaatggctgttggcgtgatgtacgccggatttctctccggcggcgcgaagatcacggcggcgggcgcattggcgctgtcgctcggaatcgcgatacagaatttcccggagggcgcgataatctcgatgccgctcagagccgagggagaagggaagagacgggcgttcatcggcggagttctctcgggtattgttgagccgattggcgctgtactgacgcttatcgcggcgcagcttgtgataccggctctgccgtatcttctgagctttgccgccggggctatgctgtatgttgtcgtcgaggagcttataccggagatgtctcagggggagcactcgaatgtcggaacagttttcttcgcggtcgggttcagcgtgatgatggcacttgatgtcgcgctcgggtgacaaaaaacaaaaaatgaaaacaggagaaattgaagttaaaatactgatatacggcgcgggagtactcggctgtaacctcgcgcggaattttttccgtgccggaaaggacgtgacgctgctcgcgcgcggaagctgggtggaggagataaagaagaacggactgcggataaatgacaaattctcaccgtttgtctcggtcacaaaagttccggtagtgacggagctgaaacctgaggacgactatgacgtgatattcgtcgtgatgcgctgctctcaggtctgggcagtgacagaaactctgcgggcaagcagagtgaagaacatcgtttttgttggaaacaacgttcgcgccacggagattgcctcgttcctgccggagaagaacgtcatgttcgcgttttcgctctccgccgggcaccgcgagcgcgaccgggtggtgtcgatcgatctgaagaagatcaccatcggtcagctttccggctcgccgtcgaacgagcggcttatcggcgaaatattcgccggtatgaaatacaaggtggtctatcagcccacgatggaggattatctcctctgccacgccgcgttcgtgcttccggcggcatttgcctgctacaagaccgacggcgaccttaagaaattaaagggaaacaccgcgtacctgaaccgtatgatcgacgccaatatcgagggctaccgcgcgataaagaacgccggacatgagatacttcctgagggcgacaaggacttcgagagtgagaagtatcgtaagacctgcctgaatttttttaggttgatgtgcgcgacgagcctcggaaagatctgcgcgtccgaccacgcgatgaacgccgtcgacgagatgagcgcgctgaaccgggatatgaagtccttcttcgacgcgaacggcgcggattatcccgtgtggaaagagcttgagagcgagtgcgggaagtatctgaagcagagctgagcgatataccatacccccggaggcagtccgcttccgggggatttcgtcgacaatctgaatttgcagatggtagaaaagtttacaactgtgtgctataaataaaaaccccgacaaaaatcgcttccgtatcgttatataattcagaagaagtcatcatgccagagatcacggtcgaaaacggctttgaagaattctacgagcggaattacaggatggtataccgcgtctgttttacatatatgaaagaaaagcccgaagccgaggactgcgccaaggacgttttcgtcaaggttctgaccggaaagttcgaattcaacgatgacacacgaaaagaagtggctgacgatcaccgctgtaaatctctgcaaggacaggctgaaacactggttccggcgaaaagtcagctcgatagatggcgatttcaacgagccggaggggtgaatcaatcccggaacctgacgagacgttcgacgccgtgatgcggctcccgacgaagtacaaggacgttatctatcttcactattatatggattacaagacagactagaccgtggagatgctgtgcaagccgccgttgactgtgttgagccatcttcccgaggttcgcgcgcttcttaaaaagcagatcggaggaacactacactctccgcgcgtcgaaaagcgatggtatatcagatatgaacggtgagatcatatcgcgtgagtcgatagagaacggaggtgacgcggaaatcataacgctgaatatcctcggcgagtgccggcttatcgggaggacatctgacggcgtgcatatttttgagtcgtcgccgctcttggcaataattattatagcatttttttgccgttctgctaaggatggcggcagcctgtccccgtacatcacagaaagctca

SEQ ID NO: 911 - DNA, 14420 bp, Unknown
  16S sequences of unknown bacteria
ggggggaacctttttcggagaaaaaggttcccccgcgcccccttcctaaaagctttatacatacagagtatattgctccggatgaaacttcatgaaagtcaggacaactttaccgccacagcgtccatcatatcccgcacagaaatatgctgcgggcacgcgctctcgcacctgccgcacttcagacactcatccgccttcaccgcgaaaccgcggtactcctccttcagcgcgtccatcttcgactcatcgtcgccgacaagccccggcgccgtcttattgtacagccggaacacaaccggtatctcaatccccgcgggacacggcaggcaatactcacagcccgtgcacggaaccagcagattcccgtcccgtatcttcttagcgcgggcaagcgccgctatctcatcctcagtcagcttgccgatccgggaatcatccgcgtgtctcaggttatcgtccagctgcgcacggttcgacatacccgacagaaccaccccgacctccggacggctccacagataatcgagcgatatcccgaccggatccgctccctcaggcagcgccgcgcggacattatccggcagattgacaagaccgccgccgagcagcggctccatgattatcacaccgagccccttcttatgcgcgtactcaagcccctcagtccccgcctgatagtcagtgttcgcccagttatactgtatctggcagaaatccgcgccctcaaagctgtcgacaatctcgtggaacacatcgttcgagtcatggaacgagaaccctatgtagctgacctttccagctctcttcagcgcgcgcatcttctcaaacaggtcgaatttcagcaccgtatcccggaacgacccggcgttcagagaatgcagcagatagaagtcgatatgatcggtcccgagacgctcgagctggatattgaagagcttttcgaagtccgcctcctccttgacgagccagaccggcatcttatcggcgaggaagaccttttccctgtagccgtccgcgagagccatcttcagcagtccctcgctctttccgtggtggtagccgaacgccgtgtcgatatagttgacgccggaatcgatcgcgtgacggatgaggcttatcgcctccggctcgtttatcgtctcgtcgggattcgtcgggaatcgcatacatccgtagccgagggcggagactttgacgccggggaatatttcgcggtatttcatggttttctgtttcctttcgttatttggttaaaactattttaacatataacgtcggaaatgtcaagtctcaaaccaaaatttccgttcatttcgccgtgagcgcgagcgtcccggagacaaagagcaggacgccgaaggtctttcggaggatcgtaggatcgacgctccgggcaagcaggcttccgcaaaccgcgccgacaacgccggagagcgcgaggacgacaatcagcggcagattcagcttccgtctcgtcatatgaacgagcatcgccgcgccggacgagaagagaaaatacacgagattcatcccctgcgcctcaagctgaccgaccccggaaagcgtcagataaataacgagcagtccgcccccgccgatgccgagcccgctgagtatcgcgacgagaaatcccgcgagtatgtcatacatagaaaaacctcatttcatgaagcatatccccgcccagatgaccatcagggcgaatatttttttgagccactttacgtttatccggtcgagcaggaacccgcccgcggcgccgccgagcatacccggcaggatgaacggcgcggagagcgtcgtcggcacactgtcagagtagatcatcgccgacacgagcgagagcgggattatcacggcaatcacggtcgcgaacctgtcgcgcgcggcattgtccttatcctccccgtccggcaggacaagaccgagcaggaaaacgagaagtatcccgccgcctgttccgagaaacccgtttatgaaccccgcgagcatcccgccggggatgagaatcgcgagccgaaggggatatgagcgtatttttttcaagtttttttctccgccgccgtttttcggcttgtattttccgcggaaatgtggtataatataatgtatagaaattttctcgatgaattccgtccgcggcatctgttattttctccgcgcgggcgcacaaatatacttcccagaaaggaatcgaaatggcaggaacttcaaaagacagaaaaccaacaacaaaaagctccggggcaggcaaaggacgttccgcgccgaaaaacacgaagacgaagtcccagtccgcgaaaaaatcgaccggaaacaattcgcgcacgggcgcgaagagctcttccgcgaagaccggaacgatcgaccgcgtcagaaaggaccgcggcggcgacccgacgctcatgcgccatcagctcgcgccgtacatacttgcccttgtcgcgctgtttcttgtgatatgctatattgtgtcggattcgaccggatttatcggcggattcctgaaaaaggcgctgttcgggctgttttccggcgcggcctgggctgtgccgctgctgcttgtaaatctcgcggtgttctggaagcgggacatcgcttcgggagcgatacgctataagtgcgtattctcgttcctgtgtcttgatttcatctcggtgctcgtatgcgtgttcacgagacgcgaggagacgttcaatatcgggaagctcttcaccgacggaaccgaggggatcggcggcggcgtcatcggcggcctgctcggaaacgcgcttctgaggggcttcggcaaggcggggacgctcattctcatcatcgctcttatacttctcttcggcatattcctgttcggtatgacgccgcagatgttcgtcatgtacattatgcagggcgtgagacagtggaagaacggcatgaacgatcagctcgaggcgagccgcattgagcgcgaagccataaggctcgagtacgacaagcgccgcatcgccgaacgccagcaggcgctccacgaacgtcaggagcaactgcgaagccgcacgccgaacgtcaatcccgacccgtccgggcgtcgcttcaccgacccgctcgcaggaagcgatctcgtgctcgacatggacgaggttccgcgccggaaaaagaacgccggacaagctgtggctgagcaggttcagccaaatcagcctgttgagcctgtcgcggctcagcctgttcagaatcagccggatgtgccggttgaaacggcggatacggcgaaggctgaggttgaccccgattcctacgtcgacgaggccgtctttgacgagataaagcgccgcgaggaggaaaagcgcgggagaatgtcaaagcccgctccggaagagaacccggaactgccgcagacgtccgacgacgagatagaatccgacgcgccgcctttcgcgaaagaaaacgaaaacaaaacggaagagaccgaagagcctgtgaagctgagcttcttccgccgcgagaagataaagccgctcccgaagaccgaggggcagaagctgaaggaactcgagcgggagtcggacgaaatagacctgaagaagatcttcgccgagccgacaggtgaacaggacgccgtcgacacgaacattccggattccgctcccgaggtcgtcgacccggaaaacggaaacgatttcgcgacgagcgcgactctcgatcttgtcgtcgagaagtcgcaggtcggaagctccggaacggctgacagccacattgatctgccgatgtcgaaagaacccgcgcccgagccgatacttcccgacgacgatgaggacgaggacgacgagccgccgtttgagacggacaataaatcaccggcgaacttttccgccgcttcaacgtctaaagcgtcagagaccgtacacatcgcgccggagaagccggtcgagtacatgttcccgccgatacctctgctgaactacgaccccgcgccgccgagcgcggatatgtccggggaaatacagcagacggcggtcaagctcgtcgagaccctgcgctccttcaacgtcaagacaaagataatcaacgtctcgcgcggaccgacagtcacgagatacgagctccagccggaggtcggcacgaaggtccgctccatcctcaacctcgtcgacgacatagccctccacctcgcgacaagcggcgtcagaatagaagcgccgataccgggcaaggaagcggtcggaatagaagtaccgaacaaaaacgcgtcgaccgtctacatccgcgaactcattgaggacccggcgttcaagaacgctccgtcgaaggtcacgacctgcctcggagaggacgtcggcggcaacccggtcttcctcgacgtcgcgaaaatgccgcacctgctcatcgccggtacaaccggttccggtaagtcagtctgcatcaactcgctcatcatctcgatactctacaaggcgagacccgacgaagtcaaattcatcctcatcgacccgaagaaagtcgagctcaacccctacaacggcatcccgcaccttctcgtcccggtcgtctcagacccgaagaaggcagccggttcgctccactgggcagtcaccgaaatggaacgccgctacgaacttatagaaggcgcaggcgtgcgcaacctcaaaggctacaacaaatcaatagaaaacgaccccgacgccgaacgcctgccgctcatagtaatagtcatagacgagctcgccgacctcatgatgatggcaaaggacgacgtagaagactcaatcatccgcatagcccagaaggcgagagccgccggaatccacctgataatcggcacacagcgcccgtcagtcgacgtcatcaccggcctcatcaaagccaacgtcccgtcaagaatcgccttcacgacaatgtcgcaggtcgactcaagaaccatcatcgacaccgcgggagccgaaaaactgataggtagaggagatatgctgtacgccccgatcggttcgatgaagcccacacgagtacagggcgccttcgtctcagacgacgaagttgaagccgtcaccgaattcatcaaaaacaacaccgaaaaacaggactacgaccaatcagtgatggacacaatagagcgcgaagccgaactctgcggcaacaaaaaagccaccaccctcggcgacggcgacgaagaagccaacgacggcgaccccatgctcaaacccgcaatccaactcgccgtagaatccggcaaaatctcaacgtccctcatccaacgccgcctccaactcggctacggcagagccgccaaactcatcgacacaatggaagacatgggaatagtaggccccccgcaaggtcaaaaaccccgcgaagtcctcatctcaaagcaggaatacatggaaatggaactgcgaagagaataggagaacggtgggggaggtcttttgaaaaagacctcccccacaccccctcttaaaacttcaaacaataaggagatataaatgggaacactaatagcacttgacgggcttgacggatctggcaagagcacacagaccaacctgcttgttgaccgcctgaaaatagacggatacgcggtcaggacgatcagctttccgatgtacgacagcgaatcgtcaggtccggtcagaatgtacctcgacggcaagctcggctcgagaccgtccgacacaaacgcctacgccgcgtccgcgttcttcgccgtcgacagatacgcgtccttcaaggcggactggaaaaaggactacgacaagctcggaaaagtcgtcatcgccaaccgctactcgtccgcgaacgccgtacatcagctctcgaagctcccgagggatcagtgggacgcgttcatcgactggctgtgggacttcgagttcatgaagctcggtatacccgcgccggatctggtgctgtatctcgagctgccgccggagatgtcgctggagcttgtgcgccgccgctcggaggagaccgggcaggcgcgggatatacatgagaaggacgcggagtatatgcgcaggtgttatgacgcggcgctttacgcgtcggataagctcggctgggagcggatacggtgctatgacgagaacggcatacgttcgcgcgaggcgatattccacgatatagctgaggtagtatcgtcgcgcactgagctggtattgtaaattttacttgaatttttgctattttccgtccgttgccgcttggtttctgctataatataggaaaagcgtagtgactatccccacccttttttagagctttgggagagaagggggtgcgggggaggaggggtctttcgcgaaggaaacactgagctaaggttgtttttgcaataaaaagtccataaatccaagactttttattgccaaaacccgaattattcagtgtatcctaagcgacccctcctcccccgcgaaacaaacacataaggagagttatcatgatatatatgtttcttgcggaaggttttgaagagattgaggcgctttgcccgcttgatttgcttcgtcgtgctgggcttgaggcgcggactgtgggcgttggcgggaaggttgtccgcggggctcatggaattgaggttatcgcggatatgacgacatctgaggctgcaaagtttgttaaaggtgcgccgtgtgagatggtggtgcttccgggcgggatgccggggacgctgaatctcaaggctgacagggtcgtgaatgagttcatcgacagggcttatgatgacgggaagtatctggcggctatctgtgcggcgccgtcgatactcggggagaagaggatactgaacgggtgtgaggcgatatgtttccccggctttgaggattcgctttccggcgcgaagatatccggtaagtctgtcgtccgcgacggcaatatcattacggctaagggaatgggagtggcgctcgagttcgggcttgagctcgtctctgttttctgcggggacgagaaggcgatggaactccgcgcgtcggttcaggcaccgatgtgactttatccggagccgctcgtgagcgattattaaaatgtagttataaagctttgagataggaggggggtgcggggggaggaaaggtctttctcgaaagacctttcctccccccgcgtagtgaatgtacgaaataagacgaagaaagaatgagatacgggagaagtataaggctttgcggcgggcgattgagcctgagcggaaggctttgatggatgagaagatatgtgcgggattcatggggagtgttacgttcaggtatgcttcggtgttgttgttttacgcgccgaagggggatgaggtggacgtgatgccggcggtgagacgggcgctttctgatggtaagagggtggcgtttccgcggtgcattcctgggacgcatgatatggagtatcattttgttgaggatttgtcgcagcttgagaagggggcttatgggataatggagccttcggcggagctgccggtttatgacagggcttcgactgagagtgcggcttgtgtggttccggctttggtttatgaccgtgaggggtacaggctggggtacggtaaggggtattatgacaggtacctcgggagctttaccggggctaaggtcgggctgatttattcggattttgtggtggataagttgcctcgcggaaggtttgatcttgcggttgattttattgtgtctgagcgggggatacaggtcatatgaggttcagggggacgttcacggcgccgcttgttgtgattgtcgtgatgtttcttgtgggtgcgtcgaggtttcttgaccttgctgcgctttcgtttcatgagaatatatgcctcgcggtgattgtcattgagtttgtgactattgtggtgccgacggtgttttacgcgaggctgcggggggacaggtttgtttcccggatgcggctgagggctttcggaccggataagttgtttgttatcattctggcggcggtgacgctgtttttcgcggatgtgctgttgaagctcgggctgcacgcggtcggggcggtcagcgaggattattcgatatatacttattatttccgcgggaccggggagacggtggattttgtttattcgttgataacgtttgtcgttataccgtcggtttcggaggagctgctgttccgcggggtgctgatacctgagtatgaggataacggggcggtgacggcggttgtcgcgacgtctctgctttacgggatgttcgggatgagcttcgggtattttccggtttattttttgcaggggctgttcttcgggacggtgacttatctcgcgcggagcgtgttcgcttcgatgctgtgtcattttgtgttcagctcggtctggctggtgttcggcgagactgtgtggaggatcattgagaagccgcagagtacggcgtttctcgtggtcgcgctcggcgggatattccttgtggcgatgtcgagcctgctttccgagtgtgagaggatatattataattattcaacggcgggcagggagtcggattacgcgaaggagtgcccgaggttttcaccggcgaagtttgccgaggcgctgttcgctccgccttttccggcggcggcgctggtgttcgcggcggcggctgtgcacttcggctaattgggtttattcagtcttttgtaaaggcatggttattatagatggaagaaaataaagatacgaaaaagaaggacgcgatcaccgacgaggagctcgacgagattttcgaggacacgatcgtgttccaccgcgagtcggatactatcgtcggcagcgataagtcccgccgaccgggcgaggcgccgggtaataccggtaattccggaagccccggaaataccggcggcaggagtaccccgagaattccggtgagctccccgagacagaacagtatcccgccggagatgcaggatacggcgaagcttcagggcggggcggtgatacgaccgctcagacccggacaaaacggcgcgaacaggaatcagggaacgtccgcacagcgtccgcagcagcgcccggcacaggggaactataacggtcagaaccgtgttcagggacaggcaggcggtcagccgagaccggcgtataatcagcagtccggtcagcagcttgtacatccgcagagccagaatccggcacagcagaacggagctgtcagacgcccggcgcagaataatgttcagggtcccgcgcagaacagaaccggagcggcgggacagaacccgcagccgcgccagattccacagaattcacagagccatcaggttcagcagaatccgcaggctgggcagaactcacaggtttcgcgtaatcagctcgttccgcgctctcagagtcagaaccggcaggacgagccgaaatatgagccgagaagagctccgatgagtcagagcgcgcctcagacgactccgcgcagatctccggacccggatttcgatttcggtggatatgacactgaaacatcttcccgcgggcggcgggagagagagtacagcccggtgcgcgattcggcgtcgagcgccatcatgagcgcggtcaaggctgtcgtctatatcgtctgcgtcatcgcggtggcgataccgctcgctattttcataatcaatacggcgaacgacgctttcgcgttcgtcaaggaggagaaggtcgtcaccgtcacaatcgacgagtacgcgactatcgattctatcgccgacacgctgtatgacgccggggtcatcaagtataagtgggcgttcaggctctggtgcggcatgaaggagaacaagcggataaaggcggggaatccgtccgagttcgtcgcggggacatatgaggtgtcgacgacgatgaactatgattaccttatcggtactttccgcaagaaggtgacctatgagacggtgcgtatcactatcccggagggctacacggtcgatcagataatcgatttgttcgtgtctcaggggatatcctcgaaggaggagttcacaaaggctataaacgagacgagctatgactataagttcctcgaggggctgactacttctccgaaccggatatggaggctcgaggggtatctgttcccggatacctatgatttctataagagctcgagcgcggagatggtcgttaagaagctgcttgataacttcgaccggaagttcgagagcgagtattacgacaggtgccagtcgctcggcatgacggtggatcagctgattacgctggcgtcgatgctcgagaaggaggtcaagtattcggatgagctcgctgacgtttcgtcggtgttccataacaggcttaaccattcggatactttcccgctgctccagagtgacgcgacggtcaagtacgctatcgaccacgctacggggactattctggacgacgtgacgagcgacgacctgaagtatgattcgccgtacaatacgtatctgtaccgcggactgcctccgggaccgatttcgaacccgtcgctgaactcgatatcggcggcgctttatccgaacgagacgcagtattactatttcgtctcgaacagatcgggtcatatcctgttcgcgaagacgcttgatgagcagacgcagaatatcaatatagcacgcggaaacgcgcagtaaagtataaagtttcaaaagagaaggggtgcaggagactgaaagccatccggctttcagtctccccacgtgaaaggctatgaattacggatttataaaggtagcggcggcgtcgccgaaggtgattgtcgcggacactaaacataacgcgcgggagataatcggcgcggctgaggcggcggcgtcccgcggggtgaagctgcttgttactccggagcttggggttacggcgtatacatgcggggatttgtttttgcagagaaggcttataacggcggcggacgcggcggtcggggagatcgcggcggcgaccgcggggcttgatatgctgcttgtgatcggcgctccggtgagacgcggggcgagccttttcaactgtgcgctggtgctgtatcacggcgatgtgctgggtgctgtgccgaagactaatatcccgaattacggggagttttatgagctcaggcatttcactccggcgccggagtgcggcggtgctatagctgtcgcggggagagaggtgccgttcgggactgatctggtgttttcctgccgggagatgccggagttttcgttcgggtgcgagatatgcgaggatctctgggttcccgcgccgccgtcggtgagacttgccgaggcgggggcgatgattatctgtaatttgtcggcgagcgacgagacggtcgggaaggcggcttacagacggtctcttgtggctgaccagtcggcgagactgctcgcggggtatatttacgcggacgccgggtgcggggagtcgacgcaggatatggtgttcgccgggcatgatatcatcggcgagaacggcgcgctgctttccgagtcgaagcctttttcggacgcggacggacttccgatggcggtgaccgagatcgacgtgcagaagctgtcggcggagagacagaggatgaataccttccgcgcgagagacgaggtgtcgtcgagaaatatcgttttcgatatgcctttgacccagaccgcgctcacgaggacgtttgagcggcatccgttcgttccggactcgaagaccgagagggaggagcgctgtgaggcgatactcgcgatgcagtcgttcgggctgagaaagcggattgagcacgctcacgctaagtgcgccgtcatcgggatttccggcgggcttgattcctgcctcgcgctgctcgtttcggttcgcgcgatggatcttcttaagagaccgagaactgacgtcatcgcggtgacgatgccttgcttcggcacgacgaagcggacgaggtcgaacgcggaggtgctgtgcgagcggctcggcgtcactttcaggtgcgtcgacataaaggcggcggtgaatcagcatttcgcggacatcgggcacgacccggagaaattcgacgtcgtctacgagaactcgcaggcgcgcgagcgcacgcagataatcatggacatcgcgaacgcggagaacgggcttgtcatcggaaccggagacctctcggagctcgcgctcggatgggcgacatataacggcgaccatatgtcgatgtacggcgtgaatgcttcgatacctaagacgcttgtgagacatatcgtgcgctatttcgcggacactgcggaggacggcgagctgtcaagggtgctttacgatatcctcgacacgccggtcagcccggagctgcttccggcggacaagaacggcgagatcgcgcagaagacggaggatcttgtcggcccgtatgacctgcacgacttcttcctgtattatttcctgcgcttcgggttcacgccggagaagcttgagtatctggcgaattacacgttcgccggggtgttcgattccgagactatccataagtggctgacgacgtttatcaggcggttcttcatccagcagttcaagcgctcctgcctgccggacggtccgaaggtcggctcggtcacgctgtcgccgagaggggattggcggatgccgtccgacgcttcgagcgagatatggaagatgtgagataactgaaaacagaaggctgtcgggattccgacagccttttttgttgatcttttacaaaatcctacagatgaatttgtagagctctacaaggtttgattttcttcagaaaaggggttgacagacgagaaaatgtatgatataatgtagacagttaagagatatcacccatacatgagcgagatgtatatctgctgatcacagagttacatatttttaccgtacttcatcattattttcgtggatgagtactgttcacggttctgatgagatcgcgaggtcgccgtgcctgcaaatcggcggaagtaaaaaacgcagagcaaaattgaaaggtggtaacttcatgaaaaaattgatcgcttcgcttatagcgataacactcacggttcttctggtgctggcggtgtccgcaaacgaggaatctatcgacgcgatgatccgaaggatgttcgagcagtcggtgaaggttaccgacagagcggatgtcgcggctccggattcgacttcggcttcgaagtgcacgattacggtggaggttccatgcacgtacactgtatcaattgatggaacccatgagtttgcgcactcggcgatagggacgttttcgcgtactggagggacttatgacaatccgactgcaaacgggcatggtcataaaggatcattggctttccagtacaatgactatgattcatcttctggcacatgggcttgcaaagcatcgggttgccaaggcaactccggaatgcactaccgtgtttacgatgcgtctgctgtatatagcggtaccgtaacttgcgataagtaaattaaacaaggcaagccaaaaagcttgccttgttccatcaagattgattttgggttatgtttatgaagaagattaaacttaacaacccgttggtagtttactttattgcactcgcttcgttgattcttacaattgggatcatttacgtcattgttgacgtgaattcaaagcttgcgccgtataatcagatattgttttctccaaatgaagataaggagaacgaagataggcatttcctcaaagtaagcgtttgggaacattttggagaaaaggtaatatcgttttctgttgaatcacatatgaagcagccaaattgggtcgcgatggaacagaaggagcgctacaaggagacttttctgaaaaaaggtgagattgtcagaatcgctggggctgaaaggttcaaacaattggatgatgaatatattgacaagtattgggatggcttcagcgaaaacactagaggaatattcttagcttatgccgacgcggaactgacagttaaaagctgtttcccgacaccgtattggggcgaaccgtgcgggcttgatgagtttatgtcagacaaattgtattaccatggagaccgggcggaaaaaatgcgccgggattcgctaatggtcaaagcatacatacaagattccggcgatgactacattgtcggacaaaccgacgagcgcgggcagcagcttgattattcgcggtcaaccgagcggttgtgcgacgtgaatccgaaggtcggcgggcaggatgcttatgtcactcgtgatgtgttcgtggcgacgcttgagtttttagcgtattcgcggacggatccggagaaggtgatcgcgttcgcgaagattcggataacgaattattcgaactggaacttcaaggatatcaaccttgatgaatatgacattgacaatgacgggatcggcgattattgcgagaggctcgcgagcgtcgggttcgggttggaggatgaccttgagaattatacttatacaaccgccgagctgatagactattgggagagcgacgatttgcgttaaatcccaatgtataaagctttttggaaggggg

SEQ ID NO: 912 - DNA, 32759 bp, Unknown
  16S sequences of unknown bacteria
cagaaacacctattaattcagcaaaatcttttggtttataattcgtgatatttgatgtgttcataataatacccccatagatacatttaaacacatttaaccatattaagcaatatgtttagttacttataagtttctcctatcgtgccgcttataaacaaacttttacagatgcagtgccattttccaggcgtttcatttctgtctctttattattcctcaaaatcgtggttctgtcaatcaccctgtctcttctcaaagatcaaaggatgccttcttcttccaatcttttcaggacactttctcactcctgctcctgtttttttctttgtcgtattcgctgatcgcttcctttatcatctgtgcatccgtctcacaggcgagtgattttccgccaatctgctgaaatttttcactgcctcttcccaaaaggagcaccagtgtcctctgcctgctgtttgctgccatggaaattgctttgcgcactgcttcattccgatcctcgatgcaggtgcagctacatcctgtcatctccacatagccgcggatctgatctgcgatcgcagcctggctctccatccccggatcatccgtcgtgacaatcacctgatcggaaaacataccggcgatcacaccaagctcccgcctgcggttgaacgccttacctcccggacagccaaacacggaaataatcctgcgatatgaagcatactcctgaaatgcagcgtcgaacagcttttcaaaacttaagcggttgtgcgcaaaatcaacaattccgcagatttttccgtcttcgctgacaaaattctccatccgccctggcacctttgtctgacgcaatgcccgtttcatgcactccaccggaatcccgtacacgtatcctgccgtgatcgccgccaccgcattttcgatattgaagctccccttcatcccaagcgtaaaatattccgaaaaacggtcacaggtgacccggaacgaaatctcaccaaagttcgccctgatctcgctgcagcgcacatccgctgtcttcttttttccaaacgtcacgatatgatctgccttatgtgccgctttcagaatccggtccgcatggtcgcagtcgagattgacgcaggccgtttccgtctggcggaaaatggaaagcttggcgctgaaataatcttcaaaatccacatgctccttcgggctgatatgatcctcagaaatattcaggaaaatccccacctggaagcgcagctcccgcacgcgcttgtatttcagcgcctggctggaaacctccatcgtcatgtaacgcacaccggaatgctctgcatttgcaagcagctcatgaagcctcggtgcttccggcgtcgtcatcaccgcatcgcatcgcgccattccgtcataattttccaccgtcgagatcagtccggtctccggtcctttccttatcttctcccattcatccagcatggcctttaaataccatgcggttgtcgtcttcccttttgtgccggtaattccggtcagagtcggatgacccactttataatcccagaaccacgccgatgccgccgccatcgcctttcggatatcctttacgatcagccccggcaccggtacttccatctttgtctcgctgatataggccacagcgcctttttttaccgcatccagcaaatactgcggcctgaacgccgctcccttgcagatgaacagcgtcttttctgtcacttccctggaatcgcaggtcagccgcatcagcaaaagcctgttctccgcttctccgctcacttccttcagcaggtctctctgcagaagcaccctttttatatcccccagtgttttcatctgtttttctccttctcttcttccctgtcactccaaagcggatatccgctgctccccgcaacttcggccgggagtgcctgacccggttaaacattagatgttccaaatgacgttttcgtccctttttgccgcaattattcttattataccgtgcattctccgcttattctttaagctgaagtgaaacacttcttaaaaaagacttaaggccgtaaatgcaaagagcgataaatctgttcgacgcgctccctcagaagctctttttttctggctgcttcctccgaattttcttctgcatctgcctgatgacggtttgttcctgctgattttatcttctgtacccctttttgctccatgctgttttcctctgtctctctttcacaaaacgttttctcttctcctgatctcttcatggcaactcccgactcacactccccttaagaccacaaaaatcctctctgcctgatccgcagaactgctctgcgtctcttacagaaaggattttagcctgtgtttgtatcagaatacgctcatttttgtatcaaaattgtatcacaatgaaaaaactctgattgtattatactatcttcttctcttttacgatttctcctcatccgcatccgtcgcctgccccactccgtacggatcgtcaaaccagccttcaaatgcagctgccgtaaaattcagcccgaagcagtctgaaacaaactgcctccaggcattggtcccaagtgaaacatccatgccataaccgctccagtcactggcaaccattgcgatttcggcgtagccgtcaaaggtgtcgtaattcaggacaaattcccggtgacttctcggatccttgtatgtttcctccacttctccgttttcctcctgcttttccccgcaggaaacagcgcttgcagctctggccagattctgccattgattcgccggaaaataggaattcatatcgaaatttccggcataataagcgtccatcagatcattataggaatcatatgatttgggaccgatacgctgcgccatctcatcccagtaaggccgtccgaacaccgccacataatacagcagatcccggtctgcatccatgagcagaaacagcatgtcgcttccatcctcgccacctaccccaatgcagcagacgcgcagcacggactgaccaacgataatccggatcatcgctccctccaccgtgagcgcttcttccggacttatttccacgtcctgcgtaccagaagaagcataggctttcgtttccgccgactcctgaatctgtttgatcattgtctccgtctcacccggcaggatgccataatccacccattcacccaacagccgctccgctttcttcaggagcgtctcctcgcttccgtccataaaaagagtatcactgtaattccagtcctgtaaaacggtctcatccttcaaaagcttcattctcccggcaatatcgagcgaattcacatccagaaactgaatcgcctcacgcgtggacagaatcggatggttaaactgttccgaatcatgcagctgtgtataaagatccggcaaaaaccaggccgcaagcaccgccgcaaccagcaaaagcacaccgatctcatattccaggatcgttttccaccgtttctgccttctcatccgttttctcctttatctgccacttttccggccgagcctggtttgcggcgcatccgtctcgccggcatctccggctgccagaaccgcaccgtcaccgcaaagccctctcccgggcttccgtaaaaccgccaggcggcctggtgcagctccacgatttttttgcacagcgcaagtccgagtccggctccgccctcttttctggaacgtgatttatccaccatataaaaagcttccgtaatccgtgacagctcctccggctcaattcctcttccctcgtcctgcacggtgatctggtagccatcctgcaggcggtcgccaagcagccagatcctgccgcccggctccgatgccttgcgtgcattgtcgatcaggtttaaaaacagggaaagcagcagatcccggtctccaaaaatgcttccgctctgtgcatccacaataagagtcatctgtttttcggtcagggagactgccgaaacgcgtttcagttcttcgacaagctccggtatcggaatctcctttcgctccagcttctgcgcctctgccatcgtcatctccagcagcttgtaggagagcgtctgcagccgttttccctgccgaaatatgtaatccgcacacatgtcagtttcttctttgctcagatccatctgccggatcgtgtctgcatagccgatgatcgaggtcagcggcgtcttcagttcgtgtgcaaacgcagccgtaaattcctcctggcgttgtacctcctgctccagttttttcatctgaagactcatttcacccgccatccagttgaaatcctccgccaggcgtcccacctcatcattgcttcgaatatgaaggcgcacgtcgtattttccgcctgcgaactggcgcgccgcctttgaaagcttctgcatgccacgcatcacaaaaaacaggacaaccaggataatcccgccgaccagtactgtcagggcaagcatccccatctgatacctggaatacatactgtcccggttctcatatatttttgtaatatttcgcacggtttcaatatagtcgtcgaatccgctgcggcagaccaccaccatgtacacatttccctgctgcggaacgatttcatagccgacgttgttcgtctgatccagcttctctctcaccgaggaactgatctccagcgcattgtcctggtacagcactgtcccggtcgcatcgtaaatccgtacatttccatttttttcctcgcgtcttttatgaaagctctctacggcttttttcagtgtcatctgctcccactgctcatttgaaagggaattgcgcgtcagctcataggaattctggaaggtctggttttccgccatgcaccgctcgatttcctgattcagcccgctctgaaaattgtcctggataatccaggtgccaaaaacagtcagaaacagtacaaagatcggtgtcgtaataaaaaacagtttccacgaaaggttcatcgcatcctcccgtcagcattccagccggtagccgaccttgtaaattgctacaatgtgttcctccaggccgagcttctttttcaagcgctgcacgtgcagatccaccgtccggcctgtgccgctgtactcgccgccccacacgttttcgtagatcgtctcacggtaaagcgcccggtttttattgcgcagaaaaaagaggagcagttcgtactcttttgtggtcagatccacttcctctccctcctgcatgacggtatgcgaatccgtatcgatatcaatgttcagaagatgcagcttccgctgcgtcttgtggcagcggcgcagcaccgtctccacacgcgcaagcagctctgcgatctcaaatggtttggcgatgtaatcctccgcgccgagacgcaacccttttaccttctgctgcgtctcacccatcgcggtcagaaaaataaccggaatgtccacggattttgcatactccagtacctcgtagccattcagcttcggaagcatgatatccaaaaggatcagatcaaacgtccgctcgctgatggcatccgccgctgcttccccgtcaaatgcagtttcacactgatatcctgctttcaccagattcattcggatcagattcgcgatcggctcctcatcctccacgatcagtatctttatcatctcttttcatctcccgtttttttctcgtcatcagccctccgatccgcccggtctcctttgcagaaagggatttccagccttctcttttcaccttttccagcaggccaagttcctctgcaatttcatatttcatccggtcatccgggctgagctcttcccagcgaaaatttttttctttccgtcccaaaacaggccacgctcctttcaccagtacatcactttcaaatacgatgtactggaagtatggcctgtttttgttcatttatacaaatcaaacaaatttatacagcaaagagggcagagtcaaactttttctctgccctcctaccatatcatactgccgggaaatatgccagcaatttgttattgctcaaagccattctccaaatgctgcgcatttcacctgtgtggcgtatccgccatttactccgtcggcatcagaatcgctgccgcgatgtaaagaatgattccgacgtgcaaaagtccaagtacgacaaacacaagccgtaccactgtcgggtccacccccagatattctccgattcctccgcatacgccgcagattttgcggtcatgataagatctgcataattttttcatattgattacttcctttctctgtctacactatcttttacactttttttcttctatagcaattcaataaaataatgcaggcaagacgatctggcagagtgcgaaagacaaggatgaaatctgcaggcgtgctgacgcacggcaaagatttctgacgcagtatttcacgctctgacagatcggatgggatgcattattttgcagaattgctatagaactccgctttaatcgtcaaagcggatattccaggtccgcttcgctacttgctcataacccactgcttattgcttcacgcaattgaagcaggggacttgcctgattcggttaaaaccagaaatatttctattcctgcccacgcgtcacttaccctcaaagtcaatcgaaatgcttccgatcccgcactgcgcaccgatctttttctttgacttattcgagatctttttgtctgttccaagaccggaatattccgtatcgccgatctgtaccgatccgataccgcactcgactgcatagtcaaaatcactctctattccctgcagattcagtacgatctcaccgaccccgcattccacatccgcatcttttgaaagatccagattcagtgtacagcttcctgcgccgacgtcaagtgccagtttttcgcagctgatcagacttccattctccatcactacctccccggcgccaatgtcaagatccatattcttcaatttggcgttcttcggaacataaatctcaatcccggctccgctgtttccgccaaagccaaagccccagaaacggtgcgtatttccgctgatctttaatgtaccaccgcctgctttcgtttcaaaatcagacggaacctcttcaccggctaccttccacgttccatcgtccgaagaaagaatccggcagctcaccgccccgatctcaagcttcagtgcatcaatatccgtgtacgtttccgaaattttttttgttttcccggaaaggaaagtgtttccgccccgcacttttccaagtgcctctgacagctgattccgctcaaatcccaggcaaaatccggcaataccaaaggctgcaccgaccaccgcaaaaagcagtgtaatttttaaaagaatcctcgttgaccgcttcattcttctgcgcctccttttccaaatatctgccggactttatcacagatccattccgctgcacggcaaaccgctgaccatgccgtgccaaacgcccacggaagcaccgtgccaaatccccatttcatcaaaaggaaacagagcatgccgactgccagcagcaaaaatccgccgccaatcatcacaaacgccgttggcagggatgccaggttagcgatgcctgccccgatcatggccgctcccgatgctaccgcgccgattgctactgcaaatgctgctacagccaggccgaacagtccgccgaagattccaagcaatgcggcaaagatcgctgcaacaaatgaaaaaccggttccgaggatcacgcccgccgccggaattccgaacagcatcagcagaatcacaaataaaatgccatggctgctctttttgcggacggccgtcgtctgcgccgttttttcgttgtcttttccgcttcgtgcggcacggcctttgacctcttcccaggcattttctgcctgcgcaccccactcacccgtcttcgcatcgttccaggcctgctttgcccgttttccaaagccatcctgttttgcctcttcccaggtctggcgtgcctgccgaccgaaagattcaaatcgttcgcggctccaggaattgccgtttcctttttctgtctcctcttctgcaccgtgatcttttgaacttttttccgagccctgtgcagattcttttttcatcagcaccgtatagcggtccggtgtcttcgccgcctcctccagccgcccgtcacggtagccggactcggtaaactccccggcatccacatcctgttcaagacccatccggatgccatccgctacctgttgcggcgtgccgagacgccccaacacatccggttcatcccccgcctcttccagataatcctgataatacgcaagagcctcttcctgctcctccttcgacagatccgaaagacacgcttccagctccgccaaaaattcctctttactcataacatgcgctccatcctgcccggctgcttcgcccattcttctctccacctccggacgcttccttcctttcttttctgtctctttcctgtctctttcctatttctctccatcatcttcgctgtccattccgcctgctgtccttccgtaaagcagaatgcccgaaatcttttctgaatatcggctccactcctcccggtacatgccaagctgtgcccagccctgctcggtaatcttataatatctgcggttccgccctccgtattcccggtcgtaaacgctcaggcagtcatccttctgcagcctgcgcagcaccggatacagtgtggactctgacacgttcagcacactgcgcacctcctgtgtgatacggtagccgtacgtaccctccggttccatcgataccacagacagaacgatcgcatcgagaagcgccgcccctgtgttaaataccatggtttcgtctccttataatattgttttgttttctatattatatgtcgtataatattatagtattttatatttgtcaagaaaaaaataccgcggactgccttgtcgggtaatccacggtaaccttccacaatcacattctgattcctgtttcattcagaggtatacattatttttcctagtgtatacaacgatattctgacggcgttagctgataacgttttttaaacaatctgcaaaaataatcgacattatggaatccactttcataggcgattgtttttattcatatttttcaataatctggaagctgcctgcagtcgatataacttcatgacctgcccgattgaacatctgattgacaatggtaccggaatgggatgcggacttatttttcccgtaattctattgtttatgttattccttatgtatcgaaaaaataacaatgcagacatcaaacctgaaactccccaataaaattaatatttacggacaattttgttgggtagttcgctcatttcattgtaactgtgcagaatacacaattttttttaagttcttttcacatagaatatatggaacgctttatgtcctgcattcagatcttaattttcgtccattttccgctgacaaaccgcagggaactgaacaccagccggaagaactggtcggcgatgatgcccatccagattccgtaaatgccaaggtccagcacgtaacagcagacgtaggatacgatcgtacggatgaaggtgacgcagatgcaggagctgaccatcgtgtaaaccacgtcgcctgcgccgcgcaggcagccagtgaaaatgacctggcagatctggaacaggacgatgaccgtgatcgtgcgggcgatgccgacaccgattgtgatgatctcctcttcccggaagaacagaccgtagagcgtccggccaaataagagataaaatgcggacattgcgatcgccatgacaattccgatcttttcacacagcatgccgcagtgcttcgcctcctgcggctttctctcgccaagcttctgtccgatcagggacacggccgccgcctgcataccgtctccaagggaaaaggaaaggcttaaggcattcatgccgacctgatgtgcggcaagcgctgcggtacccatatcagctgccatgatcgaggtcgacatgaaaccgatccgcatcagtacctgctccacgaacgtactgaccgcaaggcggcagatcacgccgactgaatccagccgtttccacagtttttcttttaaaatcaacggcaggctcaggaaggaatccttccggaacagggaaagaatactgatcgcacacgcgatcacagtgccaaataccgtcgcgatcgcggctccgcggatgccgagtgccggaaagccgcaatgaccgccgatcagaagatagttgccgacgatgttgacgagatttgagattgtgttcgtgtacatcgcgatcttcgtatttccggcgccgcgctgcgctgcattgattaccatggatatgatgttgaacatcatgcagcccatgataatccggaaatattcgactgccatgtcgtgtgtttcgtctgccgagccacacagcctcatgattgtatccgccagccctgcaaaaacgatgctgagcacaattccggcgatgacggtcagaaacagcgcattcatcaacgtctcgttcgcctttttctgattccgctcaccctttcttctcgccacaatcgcagcgaccgccacattcatcgcgatgaatacagcaaggccgagaaatttcggctgcgtcgtaagaccgaccgccgcaactgcctccgaaccgatgccactcaccatcagcgtgtcgatcatgcctgccagtgagatgaaaaaagattcaaagacggccggccaggcaattttcaggacgccgccaaggccgatggctgcgtccggtatattttcctttttttctttcgttccttccatacactttccccctaatactaagagcacctcttttctatgtatgattatcataccacagaaaaagaggcgctttccatatccattttccacccaaaggtgtacaatttactcctgttcagggagcagatataaaagttgaagactggctctgaacgtgaaacagctttaccaccagatcagataatacagcgtcagcataaatccgatgcacagaagcaaaagtgcaaacgaaaggcttcggccgatgaccacattgttttcttttaattcctcgcgctttaccgcgaaataatgaacgtaatcgcgctgcaccggctgttttctgtgtactgtgtggttcagcagattccggaagaaatttccgatggttccgatcacttcggtcagtatattgccctccgggcgctcatgcggcagcgggctgtcgcggtagatggtcttgcgaagcgcgaccaccgtcagatccactgcgctgtccaggatgcggcagagtacgccgaagcacagagacaaaaggcggatcagcggccggtagatgagttcttccagatcaagccacgaaggccagagattcacgtagcgcttcgtaccggagctctgcatggaagctgattttttctgcgcctttccacgcttcgctgtttttgcagagtagttcgctttttccgccgcgctctcctcctgcatcaggaatccccggatcagcagaatatacaccatcgctccgatcaggatcgaaattccgccgccggatagatttttcaggctgaagtacgaaacgcgctcccctgcctcctccagacggaagaagctctgcccaagcgcagccgtccggtccataatctgatgcgggaacagtccccagagcaacagcaccagtgcgcttccgccaagtgcaaacgtactctccgcattcatgtaatgtttctgcgcatcaaatttcttctgcttttcccggtcttcattctgctccacaaagatcgcaaggaaaagctttgtcatgtaagcgaccgtcatgccaccggagatcaggaagatccactcgatcgcggtaaaaccgatccctcctgcgtactccacaatactctcatgcagcagtgtcttgctgatgtagccgccgaaaaacggaatgccgccgatcgccagcgcacccaccgcaaaaattccggcaagcagcggctttttccggccatagccgcggatctcatttaagtcaagtgcatgtgtattcatgaagatcacgccggccgccatgaagagcaccagtttgatcattgaatggttgaccatgtgaagcattgtgccgtgcaccgcaagcgctgattcctctcccaaaagtcccatcatgccgattccgaccagaataaatccgatctgcgacatcgaagagcatgccagtgtccgcttcagatcgattgagaataccgccagaagcgcaccgccgaacatagtcagcacgccgagcagcaagatgagcaggccccattttccatctccaaagaagaggtttgcactcagaatgatgattccatagacaccggtcttcgtcagcacaccggagagcagcgccgatgcaggcgccggtgccaccggatgcgctttcggcagccagatatgaagcggaaatgcgcccgccttggctccaaaaccgaagagcatacagccgcccgccgcgtaaagtaccgtcttttctttgcaggctgctgccgcagcggcaagctcactgatttttcccgtgccaagcacgtgataggtcaggaacactcccatcagaagcaccatgccgccggtcaccgctacagccagatacgtctgtgccgcccgaagcgcctgctctgtctcctcctgcgccacccagacgtaggaggtaaacgacatgatctcaaaaaagacaaatgtcgtaaacagatctgcagagaggaagactcccatcgtcgcgccaagcgtcagaagcaggaacaggtaatagcggttcgtattgctatgccctctgctgtactcgcctgagagaatcgtcgtcatcatccacataaaggaggtcacaggcgcatagatcagccggaagccgtccgcctcaaaagaaagccccatcccgcacacctgcggaaccgcaagcgaggccgcaacctctcctgaggatgctttctttgcaagaaatacaaagaggagcaatgcagtcaggaattcaaatacgactaaaatatctgataaataatcacggtacagcgcgttcttccgtccggccacgaagcacagaagtgctccggcaaacggaaagaacacgagcattccaaggaaaattccgggattcatgccatctcctcctttctactttacaaatgatgcaagctgcgtgaacgcccggattaatggcgcgctgtgcaggccaaacacaaacattgcgattacaaagagtaccagcggcaggagcatcatccagttcgggtcttcgattccgtcaaggctgctgtaatcaaagtctcttcccgggaaaaatgcccggacaacgatcgtcagcatatagattgcagtcagaagtgccgaaatcaggagcgccgccacgccggcaacagcaagcggatgcgtgctcgaaagcgccgcctttgccagattccatttgctcacaaaaccgcaaagtcccggcacacccatcagcgcaaagccggaaatcgtaaaaatcacaaataccttcggcattttccggccaaggccgttcagctcatggatgtaattccgcccagtcttatagatcactgcacccgcacagaagaacgagcatatcttcattaccgcatgaaataccatatggcttaacgcccccaccagtccgagcggcgacatcagtacgacaccgaacagaatgtacgagaggttgctcatcgtggaatacgccagcctgcgcttgaaatgtgtctccttgagcgcccggctgcagccgtagacgatcgtgataatgacaaatatcaggagcaccgtctgcgcccaggtaccgcgcagaaactccgtaccgaaactataatatgtgatccgcatcagcgtgaatgcgcccgccttgacgacggccaccgcatggagcagcgccgtaaccggtgtcggagccacacctgccttcggaagccaggctccaaacggccacatcgcggtcttgaccgaaaatccaagaaagcacaggacgtagatgagcagaagaagattttcactgcccgccgtcttcgagggatccagtacaccgcccggcacaaaattcgaggtcacgccgtaattcaggataaagatcatcccgataaacgcaaatgccgctccgccgagcgagtaatacagatacgtccggctcgccaggatcgcctctcgcgacagcgtatgcaggatcagcggaagtgtcaccagcgtcagcatctcgtaaaagcagtacatcgttacgatatcttctgaaagcgcaatgccgagcgtgatgccataggtgatcgtatagaacatgaaaaagtatttttcatgaccctcatgcttcatatactcaaatgcatataacgtcgcaagcggccacagtgccgatacaattcccgcaaacactgtaccaaggccatccagcttaaagctgatgctcaggtttccgtttaagcggaacaatacaaatgcatccgccggccggttcaaaagcagggtgagcacgagcagggaatctgccagcaccactgtctcgatgtaaatcatcatctgtgttctgtttttaaatggaagcagcgggatcagtgctccaaaaagaatcgggagcaaaatcacagctgccatcagaaatggtttcattttttctccctcctcacagtaaagtgaccgccagatcgcggatatacgatgccagcggatttggaaacaggccaagcaggatcgtaagcactgcaaggagcgcaagcggaaacagcatgccaagcggcgcttccagtttttctgattcctttttccagttctttccaggcagaaatccgtcgatcgtcaccggcagcagataaccggcggtcagcagtgcgctgacaagcagtacggcaggtcccagatagcggaacacaccggcctgcgccgaaagtgcaccctgcgccagataccacttgctcacaaatccgctcatcggaggaataccgatcaggccaagtgctgcaaacgtatagcaccacaaggtacgcggcatttcttttccaattccctgcagttcacatacgcgcgtcttcccggtctgataaatcacgataccggcggtcaggaacagtgcacatttgataaatgcatgaaagaccgtgtgcagcagtgctccggtaaatgcttctggctgaagcagtgccaggccaaacagcacgtacgacacttggcttacggtcgaataagccaggcgctttttaaacaccggttcccgaaatgcaagcagggatcccatgaaaactgtgatcagcgtcagagaaagccacgcccactgcacccaggtgccgcgcagaaaatccgctccgatcatgtaataaacaacacggaggactgcgagcacacccgattttacgatgacggccgagagcgccgcagacgccggggacggagccaccggatgcgccgccggaagccaggcgtgaagcggaaacataccagccttcgcaccaaaaccgatcagcattgccatgactgcgatcaggagaatcccctcatgcccggatacaagcgataaattcagcgcccctccggccgtaaaggtaagtgtatcgcagtagtgatataaaaagaagattccaaacagaccaagataagcgccgcacatcgaataaaacagatatttgagcgccgccatgatcgcctcgcgcgagccgttgtgcatgacaagcggcatcgagcacagggtcatcagctcataaaacaggtacatcgtcacgatatttcctgcgaaatccagcgcaactaacacaccgtagaccagcagaaaaaatccgaaaaaccgccgctcttcgccctcgtgcttcatatacacaaaagaataaaagccgaccgatacccagacgatcgtgacaaacgtcacaaacagccttccgactgcatcgatccgaaaatagaccggaatcccttccatcagttcgaacagccgcacctcatgctcaccgctccacgctgcaagcagtgcaagcaccgctgtgagcatcagaactgctccgacaaagcagtgcagttttctccgctcctgctcatccagatcatgccatatgtcttttccgctgctgcgcaggtggcttttgaaggaactgcacagcaggcagattccggaaagcgccggcagcagcaccggcagcaaaatccaagcattcatttttttatcctcctatgcaaacatcgaaagtccgcgctctaacagcatcagaatcggctgtgagaacaggccgagcaccagattcagggcaacaaagcagataagggccgccgctttcaccggctgctccttcatcgccgccgttttgcagcctctctctttcttttcttccggacgcatcggcgtgtaaatacggatcaccgtcttcagaaagtagacggtatttaagattgtactgatggccagtgcgatcagcgtcggcagcattttgtaggcgtgaccgaccgccgcctgtgcaaataaaatcttggaaataaagccgccgagcatcggaaaaccgaccatggaaagggatccggcggtaaacgcaacccccgccaccttatcccggtatccggctcccgtcaggtcaaagaaattcgtgctgtccccggatacctccgtcagagaggaagccgagagaaacagaagcgctttcgtcgccgcatggcagataatatgaaagacgctcgccagcacgccaagttctgtgccaagaccgaagcccatataaatgtatccgatctgtgcgaccgaggaatacgcaatcattctgcggatgctgttttcccggatcgcatcgatcgatccgatgatcatgcctgcaattccgaacacgaacagcacatgaatcactttactgtcccttatcacctcaaatccgattacacggtaaaagatcttgagcagcaggaaaatgtatccctttgagacaagggaagacaaaatcgccgctgaggacactgtcgaatatccgtacgcatccggcagccagccgtgaaacggaaaaagtgcgctcttgactgcaagtccgacgcacatcaggcctaccgccacaagaagcggcacctgatactcgccagtctcatgcaggttccagactgcctgctgaatgttgctcatcagcagatgccccgtgatgctgtacagaaaacagataccgagcagcagcataccggagcctaaaagactcataatcatgtagcgcgtcgcagcaacaatcgtccttccgttctggcggatcatgatcaggccgcaggcagaaatcgtgttgatctccacgaacacgtatgccgtaaacaagtcattcgtataaatcagtgcgagcagtgaggaaagcagcagattgaccatgatatagtagagattctgcttcgactcctcaatctcctcctcccgttcctttatgccgccgagcatgcacagcagcatcgtcgcgcagaaaaagaccgccatcacagcttccaggattccgacgcggatctcatttccccacggagccgaaaaatgtcccatccgatagacgtacggctctccggtgcgcaccacaaatgcgagcacacagacattcatcactccgatcaccgtgatcacaaacgtgttccaccactttgcttttttcccatttaatatggaagaaagaggtccggaaaacaaagaaaggatgatgcagataaatggaaaattctgaacaaattccatcacagcccctccttttccagcctggtggtgatctcatccagattcagggtgtgatatctgcggtacagacggatcgtcagggagagcatcagggccgtgaccgatacggagacaacaatccccgtcagcacaagacctgccgggatcgggttgatgtacgcctccacgctctgtacaccatccaccacgatcggtgccttccggccggcgatataccccttcaaggccagaaacagatacattgccgtgtccatgatattcaatccgataatctttttgatcagatttttctgcagcagcagattggaaaaaccgattccgaacaggatcatcgccactgcctcttcataattattgatcagattcgtaaagttcatatcagtagcctcctttccggaacatcacataaaaagtatacatcgtcccggctacgacaatgccgacgcagatgttcaaaatcaaaatcagtccgcttgagagaatcgcccccggcgtaccaagcgggatcacactgtgaatttcatttgctcccgtatagaatgagtagctcttcgccaaagcataacaggcaagtgcgccaaaactcatccacttatacgttttcgcagtaaagaagcgctccgtctttgcaaagccaaacgcgttcagatacagaatcagcccggctccgatgaccgcaccgccggaaaagccgccgcccggtcccagatgaccgcagagaatcacgtagataccgaagataataatcggcggtacgagaatccgcgccacagtctggagaatcacgtcatttttcggctcgtagatccggtcatttgcctcgcgctccgcaatgctgtcctttccttttttcttatcaatgcgcagcagaatgagtaccgtgcaggtcgcgataaacaacacatgagactcacccagcgtatcaaatgcacggtaatccaggatcatgccagtcacgatgttgaccgcccccgtctcctgcaggccgttctcaatgtaacgctgcggcacctcattgttcaccggattttccgcatgaccaaatgtcggcagataagagactccggtgagcagaacgagcaccagactgatacagaacaatacgctgaacaatcggtaaatcttctgaaacagccgcatttccgcattgtgctccacatcaaagacacgctcatagattttctttttttcttcgctccgctgtctggtcacagtggtgtcctctttaaattcctgctgcggcttcatctctaccgtatcaaggaacggatccttcgtgccgtccagccactgtcgcagatggtatgagcgtgtttttttatactgttcctccggaacttttcggctcatcgctttcctctcctttccctgattccattctcagcacttcctgttcttcctgctttttcagctcttcgtccgcttctcccatcattgcgtgaatcttctttaaggtaacgaaaaagagcacactcgtgataccggctccgaccgcagcctccgtgatcgccaggtccggcgattccagcaggatccagatcactgaagcgaccagactgtaggacatatagatcaaaatggaattgagcagatttttggaaagactcactgaaatggcgcaggccacaagaaatccaagcaaaataaaaagaaacacgctcatgccttctccccctcttcgccgttttctttattttcttccgccagcgctttttccagttcccgcagcgtcattttcctgtaatgtttctccttatcctcgtttgtcgtcacctccagacgcgcaatcagatgcgaagaaaccggtgatgcaaaccagagaaatacgatgaccagcagaaacttggcagaagtaaaattccagccattcatcaggatcagtcccagcagggcaaagccaatgccaagcgtatctcccattgcagccgcatgcatccggttcagaacatatttaaatcgaaagacgccgatcatctcaatcagaaagattccaagtccgcacagcagaaaaacagcgcctgcaaagaagcgtacccattcaaataccgccatcctctttttcctccttctgctttttctcctgataaacacccatgtacaccttggtcagcacgatcactgcaagaaaactgatcatcgcatagataatacagatatccgccagatacccttcctgcagcatcacggtcaggattgctatgatgaccatgaccattgtccccatcatgttgactgaaacgatgcgatccgcgatccgcggtccgatgattgcacggaccaggcagaggatcagcatcactgcaagaaaaataagtgccgcaacaaacaccgcctgatacgcctgatccagtccgacgattccctttcccataggtttatgccccctcttcctgcttttccatatcttttaataaatctgcaagtactgacgaatccatgcccgctgcaagactttcgtcgagacagtgcaccaggtattcctggtcttcgagcgtcactgtgatcgtccccggcgtaagcgtgatcgcattggccaggaacgcttttccggcctgtgttttcatatcggtgtgaaagcttacaagcgccggttcaacttcctctttttccgagaggatcatatgaatgactgcaaaattcgccttgatgatttcccggaccagaacgaaaatgtaccgcagcattttgaaaatgcgccggtacagctgcttctcttttttcacactgtaatccatgaaccggcaggtaaacgcaaagatcacgcccgcgatcaccagtccgaaaatacagatttctgtcgtcaccgccccgttaaatatgatccacagaacaaaatacagcaaatacatgtcttttcctccgtcttattttaatctgtcttattttaacgcaatttgccagtttcgtccatatgagaaaaaatgtttttctgcatattttctgtttcaggaagcgtcttaacttgtttttagcgacattttgcatgatttttattttctttgacgcaagtttttttacgatatgcttacgagatttcgcaagcggatccttcctatgatattccaaacacactcttatatattcgggcacaaaaaaagaagccggagacgctctccatcgtcttcagcttccattctttttctaccatctgcgttttctcacgccccaacaaggtagctgccgccctgcatcagcatgacaaaaaagtctactccacaatacaggtgccacaaaaacaatgtactgcaaaccaaaagatacagcagccttccccgctcccgtgcagtggcccggcaaaactgttgatacgccgatccgccgcaaacgcggcactttgtccaccaggtaagcagttcttttacaagaagcccggcacacacagaaaaaatcaggaactgacagaaactatatccccatgacagatttccatgcatcttccgcacgccgtcctcagaaaggcagagatattccagcaggcctgtaagccatatcagccaggcgaaacggtaactgcgatcttttttcagccttggcagatttcccaaaaatatggcaagcggaaaaacagccgactgaagaagtgccgccaccggatgtctgttccacgcaagtaacccgggcgcaatcgcaaacacgatcgatgaaccgcttcgttcgcctgtaaacagtaccattgtctcataaatcactacaccaagtgagatcagcaccggtatgccaaaaagcacctgttttccaaatgtgcggccgcggtctgcaatgcagtctgaaagcagcgtcagtgccatcgcaggtgcaaagcacaggataaaattcggcttcatcatgtttacaaagatcagcgcaagcgtaaagagaagccattgtctttttgaaagcccgctccggtaaatttccagataccggaaataaagaagcaatacaatcgttccggcaaatttcatgccaatataagtagaattgtgccagatcgtccccgtctgcatgccaagatacggacacggattcacagccggaagatacagcggcatcacaaacatacagcaaaaagccagcaggtgcagcgccgtctttcctcttccagaatacagacggcagagcagacgccacattaaaaatacggtaccggtcgtgatcagcgccagaaaaagagcgactgatttctcattcagtctcagagtcccggtcagaaacccaagtgtcatctccatgagactgtaggccgtatgtgcttttccctccgcgatatgtgccggaagatctgacatataatcgccaagcggtcccgggtactgaatggcctgccgcagatacaggcggtaagaatacgctcccaaaaggccgtataaaacggcaaacaatccatattttatatacacacggcttttctctctcatctgcttcctcattttctttcgtgctcgatcatcatttttcggtctgttatgctcagcactctgtttttcatactcattcatcattttcagatctgtcatgctcacttccgccactttgtgctcaggcccgctccggctccacgagcgcgtagtacaatgcccggattgccttctcgaaatcttcatttttcacgccgatcgtacagttaacctcgtttgatcccatatcgatcatcttaatgttgacatccgccgctccaaggctggaaaagaacgtcgccgcgattccgctgacagaacgcatgccttttccgactactgtgactaatgccatatcgcggtctacctcgatcttgtccggctcgagcagccgttttaaggattccatgatcgcttcttctttctgctcatactcctcctttggaaggatcacgctgaccgtatcgatcccggagggcatatgctcaaaggaaatatcattctcctcgaatgcttccagcagctttttgcaaaatcccggctcagaattcatgcagtttttcgcgatgctgactgctgcaaaattccgccgtcctgcaattccggtgatcggcacttcctgctccgggcgaagttcctgacagatgaccgtgccgttttcctccggcgcgttcgtattgcggatatgaatcgaaatgccctctcttctcgccggataaaccgcctcctcatgaagcaccgtcgcaccgcggtacgccagctcgcgcagctcaccgaatgtcatactatcaatttttttcggatgatcaatgatcgtcggatctgcgagcaggaatccggaaacgtccgtccagttttcgtacagctgtgcccctgcaccgcgcgcgacgactgcccccgtcacatcggaaccacctctggaaaatgtgtggatatttcccgcatcatctgcaccgtaaaagcccggaatcacggcacgcggcactttcttcagtttttccttcaggaaaaagttggtacgctcatcctgaaattttccatcccggtcaaaacggatcacttccgcagcatcaataaattcatagccgagaaaatcagccagcaggattgcatttaagtactcgcctcttgatgccgcatactcttcgcctgcccctgcaagaaatgcctcctcgatcaccgcaaactgacggtcaagggtaacaccaagatgcagttcccgaatgatctcctcataacgcgcacggatccgttccagcacttccttataattttccccgtttacggctcttccgtagcagcaatagagaagatccgtcaccttctcatccccgctgctgcgtcttcccggtgctgacggaaccacataccgcctggccggatcactctctacgatctcttttacttttcgaaactgcgcggcatcagccagtgaacttccgccgaattttgccactttgatttttgtatttcccatgtcttctcctatgtctgtatgctcacaggcagttttttcgcctgcgttatataatccctgttattttactacaccattcctgcagttctgccagccttcttccgtcatgcttttggaatactgtgaccgccctcttctgctttgcgtctggaatcctctcttaccacttcacgcaatccgctgatatacgggtcaaagctgcattccttcgtaccgtacgtcatctgcaggtcatattcaagcggcagccacgtcgccagatccgcctcgttatgctggatcagtgcctccagcttatcgagactcttgtaaagctttgcctctcttgtctccagcgcatccatctccgcaaacagttcggtcatttcttttttctgtgtctccggcagtgtatcaaataatccggaaactgccttgctctccactgtctcatccttttccgtctttacaaaggccgggatatcacctgtgaccgcctctccaagatcatggatcagacacattttgatcaccttattcctgtccagatctgaaaactgttcaccaagcagcattgccatcagtgccagacgccagctgtgctctgccacgctctcatgccgcccggacgacgtccatgaatggcgcgtattgcacttcagcttttccgccttatctaaaaaatcaaggaaacttctatattccatgtatttgtcctctctcctttttctgcgcagttttcttttgtcatttctctcctgtgtgccgcttcctgtaagtcaggcaaaacatccattttcgctccttaccggttcatagggaaaccctgcaaaacctgcttctgaaaactgcagacgcgaaaaaagcctccgatctatccccatcggaggccttccccatagatgtcctagacatcataccatctatttcgctttgagccaagtaaaatttcgaaaacagccataaaatgcctgcatttttaaggctgtttacaaaattttattcggcggatacgccagagcgacgaaatgcgtagcattttggagcttggctctgaacgaatctccataaagccaagtaaaatttcgaaaacagccgtaaaatgcctgcattttctattactgcaaaaacagctccagcagcgcccgcttccacgccgtatacggctgataccggatcggcagatcgatccagttgtatttcttcacgatgctgcggcggtggctgaacagttcaaagctctcttttccgtgatagcttcccattccgctcgcaccgacacctccaaatcccatattgctggtcgcaaggtggatgatcgtgtcgttgatacagcctccgccgaaactgcagtatttcaggatctgcttttcgtggctgcggcttcttgtaaacagataaagcgccagcggtctgtcatgacgcgtcacgtaagaaatcacttcggaaagatcatgaaacgtcatcaccggcagaatcggcccgaaaatctcttcctgcatcagcggatcagccggggaaacgtgatccacaacggtcggctcaatctgaagcgcatgcgcatcacaccctccgccgatcttgacatcggcgccgtccagcagcctgccaagccgcataaaatgcttttcattgacaatccgcccatagtccgcattctcaagcggatgcgtgccaaactgcttccagatacatttctgaatctcctccagcagccggtcttttacagaggcatgcacaaacagataatccggcgctacacacgtctgtccaagatttaaaaattttccaaacacgatccggcgcgccgcaagcttcaggtttgccgtctcatcgacgatacacggactctttccaccgagctccaggcagacgggcgtgagatgttccgacgcctttttcatcacaagcttaccgactgccacgctgccggtaaaaaagatgaaatcaaatttctgttccagaagctgcgtattttctgtccggccaccctctaccaccgctacaaaatgcggcgcaaaacagcccctgatcagctccgcgatcacagctgaggtgtgcggtgcataggcactcggcttgatgacaacgcagtttccggctgcgatcgcaccgatcgccggctccagtgcaagcataaacggataattccacggcgacataacgagtgtcacaccgtacggctgcgcactcgtaaaactctttgcatgaaactgcgcaagcggcgtggcgactgttttatcttttgcataaccacgcaaatgacggatcatatgggaaagttctgaaagcaccaggccagtctcgctcatatacgtctcaaatcctgattttttcaaatctgcctgcagcgcttcccggatctcgttttctctgcttcgaatctcccgtttcagcgtctggagcgcaccgatccgccaggaaatcgattttgtttttcccgtttcaaaataaacacgctgtctgcgaaccagcatttcaatgtctgccatggtcatccccccgttcctcataacagtactccagaattcggatcaccgcttcgtacgtcacctgccgcggattgacgatcaccgctccgtcattgagcgccgctgctgccacttccgggaattttgccggatctgcaccggtttcttttaaggtcagcggcaatccggtcagacggttcagttttttccgcagatgtacaacctccgcgatcgcacgatccgccctgcgctgctccggcgtcttaagatatacttctggccccgccagatacaaaagcagctgagcgtattctgctttacagacctttcggttaaaacgcattcccgccggaagcaaaatgttcatcgcatcgccgtgtgcaatgtggcacacgccgccaagcgcatgtccaatcgcatgtacaacacccaccatactgtttgaaaaggccgccccggctaaaaagcttgcgttcgccattgcaaggcgagcttctttccaatggccaaaccgcgtggcatgaagcaggttttcgcgcaccagttccaccgcctttgccgcatacgcatcgctgagcggatttttctgcagacagctgtatgcctcgattgcatggcacaacgtatccataccggtcgacgccgtcacacgcggcggaagtgtcatcgtcatacgtgcatccaatactgccacatccggcatcagctgctgggaaatgtactccatcttgatatttttttctgtatttcggatcacggccacggcggttgcttcgcttccggtaccggcagtcgtcgggatcgcaacaaatggaacgcgttttcctgccggaagacactcgcagcccatcagttccagcaaatcctcacacgtctgagaaatcaggagccgcacaccttttgccgtatcaagcacgctgcccccgccgactgcaacgatcccgtcacagccatacgcgcggtactgcgcggccgcctcattgaccgtctctacgctgctgtcccgcggaacatctgtaaaaatcctgccgatttttctcccctgcagtgcttttatcacaagagacagtgtaccaattttctccagcactgcatcacttaagagtaacggattgtgcacaccgagaatctccagctcatagccaagattatcgactgctcccgctccggagcacagttttgtcggatttgcaaattcaaaatatggcgtcatctttttcctcctctaaacgtgctcaaccacacttaaggcatagacctgcagtgtgctgagtctcttttccggaatctcacgcagaatacgtcttgtcataatccgtgggaacagatatgcttccgcatactccacacaccgcacaaagctcatcgtctggtaaatatctccctccagggaaaatagatgtctggcatacgcctctgaaatccctacctgtccgctgagcacccgaaatgcgccctgtaccgatttaaaattcatcgtaatgtcggtgtgctgcgccgcgcgaagccgtctgatcccgtacgtcccgcttttctgcagcgccaggacagcaccgcccggtccgcatttcagctttaatgtcagcccttccggccagctgtcgatctccgttcgaatccggctgtcctcgcggtacagcacgcgcaatgcgcgaagcagcactgccagaacggtgcggttgatctgtgttaaaatttctttttccatattattgctcctcttttcttcttacaatgatcaaaacggatatgcgctgtcacttcgcgatctgcgctcaaaatgatattatcttttgcgaatcttctttttcctgctctgtttgatttctctctgtcagcatttcctgaaaattctccgccacagtgtgcatcaaatcggcaaacatactcatcttttccgcgcccagccggtcaatcagtccctgcggcagtgcaagcagtccctgatgcgcagccgcatatacccgttcgccttcccgggtcagcaaaatatgtacctgcctgtgatcctcacttgaacgctcccgccggatcagcccgcgcttttccaggccatttaaaatgacattcatctgaggtttcaggatctgaagacgcctgcaaagctgtgtagccgtaagcgaaagtgcgcctctgtttttcatctgatacaatgcaccgcagaccattgactcattgtacgtcattacagaaacgagccgctcgttgctgatcgctgtcgacattttcagccagccgtcaaggatgcgctcacacaggacctgattgccgcacaatttctgccctgtcctgcttttttctgatgcctttttctccagtactattgtttccttttcttctcccatgatcgcctctccattttattttcaggattatttttctccatctgcctgtcctgaatgcaggattctttccgtcaatatcgttcatcttattaactatttatttttttaactatcttactcgccgcgctctgctttgtcaaggtaattcagcaggatccttttccctgtaaatggctgaaaaaaaacggcactgcaggctgtaagcgccgcacacgtttctccggcctttccatttccataaagagaatctccgacaagcggataacccatccatgccatatgtacccggatctggtgtgttcttcccgtctccagatgaagcagcagccacgtttcattctccatttcccgccatatccggcagtatgtcacggcatgctttcctgccggatctacacgcatccggttcagctcacccggcaccggggcaaccggctgtgaaatgcactgctcttcatccgttttctttggaaaatgtccctcacactttgcaaggtactgtttctgaaaacggccgtccatgcgctgctgccagagacgctgcgccgcgacctgatttcttgcaaagacgacgatgccactcgtatcactgtcgagccttccgatgctatacaggggaacatccgccgcctccagaccatcccgctgtgcaagtctcacctgcatccgatccatcagcgtgtccccgtgatggccatgtgagggatgtaagatcatgccatgcggtttccagacggccagcacatccctgtcttcatataaaatatccggcatcattccactgttcatttccgattctgcctgaagtttgctcttcttttgctttggtgccacaagagatacctccagccgttcccctgctgcaagtacatgcgttactctcacctgcttctgatttatgcagattcctccctgctgaaatttcatacgtttcacctgcatttttgtgaaacctttttttcgcgtcagataattccagacagtctccccctgatcggcggcttctatctgaaactgcagtcggtgtgctgcaccttccatcctccacgctgcatcctctgtttcttcctttttcattttcttctccccccgcaagcgggtccctccttatgagatttttcgctgatcttgaaaccgtcaggtattcttaccggacgcaagctcataagggatccccccgcaagcgggtccctccttatgagatttttcgctgttcttggaaccgtcaggtattcttaccggacgcaagctcataagggatccccccgcaagcgggtccctccttatgagatttttcgctgttcttggaaccgtcaggtattcttacccggacgcaagctcataagggatccccccgcaagcgggtccctccttatgagatttttcgctgatcttgaaaccgtcaggtattcttacccggacgcaagctcataagggatccccccgcaagcgggtccctccttatgagatatctttcatctttggttcgaagatccagctggcgagatagctgaagatcaaagctccgctgatcccggctgcactcgctttaaaaccgccaagaaacaatcccagaaagccttcctgttccacggcctcacgcacacctttccacagggtatttccaaaaccgagcagcggtacggacgctccggctccggcgtactcgatcagcggttcgtaccagccgactgctccgagcagcgtaccaaggactaccaggatcaccataatccgtcccggcagcagtgtcgttttttccagaagaatctgcaccagcgcacagatcagccctccaacccagaatgcattcagatattccatttattttctcctttttaaacatgctccagcaccaccgcatgcgcaatgccaggaattgtctgtccctcgttgaagctgacctttgagagtagtgctccggtcggaacaaacagcacccgtttccagctgccttttcgcagcttcggcaggatcatcgccgagagcgtcaccgccgcacagccgcatccgctccctcccgcatgcgtatcctgcgtttccgggtcataaatttcaataccacagtccatatactgcgtctcaatgtcaaatccccggtcctttaccagctgcagcaaaatctctttgccgacggttccgagatctcctgtgatgatccggtcatactcctgcggctcccgctcaaagtcaagcaggttctggcagatcgtatcgcaggccgccggtgccatgcacgcgcccatgttcatattgtcgcgcacacccctgtcaacaatcttcccgggtgtaacaccgctgatccgtacgtaaccattctttgtgccaaggataaacgcaccgctcccggtcacggtccacgttgctgcgagcggccgctggctgccataaccgagcgggaaacgaaattctttctccgcacttgcgaagtgactcgaggtcacagccgctgcatgctctgcaaagccacctgccacgctcatcgccgcgagcgtcagggattccgcacaggtcgagcacgcaccgtaaagcccgaacagcggaagcttcgcctccacgtttccaaacgacgtcgcggtcagctgcgccagtagatctcctccgaacagaaatcgcacctctgaaagctccagttttgctttttccgccgccttttgcaatgctatactttgcatttcgctttctgcctgctcccaggtctcttttccgaaaagcggatccccatcttttacatcaaaccattccccaagcggtcccgccgcttctttcggaccgacgactgaggcgctccccgcgatatagaccgcgttttgaaatgcaatactctgttttccgactatctgacttcccatactgtcctttccgcagaagtctctccatacagaccgccatgttatcgtcagacgcttcttcagacaacagaatttccttctgaagcacacatgttcctgctcatcaccggaatctgctctcttcgaataaatcggagattcgctatccgcttagtgctccgcgcacttgaaacctggaatgcttatctgcgttcaaacggattcagggagacaaccgcccgtttcctttgggtatattgtctccctgactgtattttttatacgtgaacctttacatctgcgcatccttgtgctgtgtttcatccgtatactggcggatgcacgcttcgatccgctccttcacaagcgccgcaatctccgtcgttttcattttttcgtactcatcaaaataaatcggctccagaaaatgcacctgcaccttcgtcttcgcgatcgagccagtatcaaacgccttgtaggaatcgatcagcgccacgggcacgatcgggcattttgattttaccgcacacttaaaactgccgcccttaaaatccagaagttcatttccatttttacttctggtcccctctgcgaaaatgatgaaattttttccctccatcacttcctttgtcacctgcaagataactttcatgccctgccgcggatccctgcggtcaatcggaagcgcaccgaggcaggcgatcacctgtttcaaaaacggaatattctccagttcctttttgagcaccaccgacgtcgggcgcttcagcagctggagcattgccagcacatcgaacattccctgatggttcggatagagaatatacccatcctcccttgggagattttccagcccgtatccttcaatctcgacgcgccctcccctgatcgcccggttatcaatctgtctgatcagtgcgtaccgctcttcaggcgtataatgttccggatgcgctgccatgcggaataacctgacaattccgtatggtacataccagaggttcatcagtaccatccataaaatccgtctcatgtctctcccttctgcccagatatactctcggagtctgtcatgccccggcaagttctagtatgagccacctcaattaacagtctgcttcatttgtctaaatttctatctgctacgttgttgtcaatcgccgtagccaccgctacggctcattcctccgccttgcagataaaaatttatcctgcatgaatcagtcagccaattggggtggttcatactagcagctcatcaaaagaagcaatcactgcatccgcatggtctgcctgcccaaaaccataggaggcaaatacaaacggaacgcctgcctttgctgccgcatcgcagtctccctgtgtatcccctacgtaaaccggatgcttcaggctatttcgttctaccaccagccggatattttcgtctttgttttttccggtatctccgtagcattctgtatctgtgatgtacggttccagtccggtcttacgcaaaaaaagttcgatataaccggactgacagttgctcacaatcatcagctttgtccgctttgacaattctttgatcgtatcggccactcccggatagcaaatgtgacacggatctttctccagcgcttcatgttcatagacacagcagacatccatgatcgcataccgccgctttggctc

SEQ ID NO: 913 - DNA, 6966 bp, Unknown
  16S sequences of unknown bacteria
tgaggtagccgcgattctgtgccgtcttggcggaaccggaagagtggagttctgataaaaacggagggacaacgatgaagagaagattcctcgcgatggtgatggcggtcgttatgtgtttttcgcttgtcaccgtcgtgtcggcatacgacctgcatgcccacatcgtgaatgtcgaatataaagtaaccgagatcggcgacccggacgacatgactgtcagtctcgacgtaatattcacgcgcgtcgacgatccggagctcccgctcgattcggctttttataaagaaaaccgttcgctttcgattgtcattactgaccgcttcgggcatccggtcgacttcgggagagtttattcgggaaacagcgcgaatttccagatcaaaggtcccggattcttcgttgcgtcggttaatcgagacgagatctttaccgaacagggggatccgttcgagttcagcgtcggcgtagatgattacaaggctgaccacacacgtaccggaaaatgggcggaggagctcctcgccaaaactcaggaatacgaaagtatcgttccggctggacccgaagagtgggtgacaataggagagggatcgaattccacattctatgccccggacaaacactttgatttcgccgtggcagcgctcaaggagattgccgaagagctcggcacgactgaccgtttgctgttcgaagtcaatgtcgacgaggtactgacgatagccgaaggtctcgagggcggcgacaagtcggagctgattcatgacatcagtgacgactggtacattgcagactgtgctatgaaagcttacctcgctgatctcgcgaaatatactttcactgacgtcccggacgatatctggtacgcaccatacgtgaagtccgcggcgcggtccggtcttgtcaaggggaagtccgagggagtcttcgctccggacgccagcatgacgatagctgaggcgataacgctcgcggcgcggtttgaggcggcgctttatgaggagatcgacccggcggaggggaagaccggaaagcgctggtatgacccatatgtttggtacgcgagggagcggggtattccgtgtgactacgaggattataacgcgaagattacccgtgaggagttcgcgcacattttcgcgacgctttataagaaccataagaatctttatgacgaggcggggattgtggcgttgaatgacgttccggacgggttcattcctgacgttgcgaaggatgacgattacgcggacgacatttatactctttacagacttggagttctctccggaagtgattcggagcgtagtttcttgcctgactcgaacataaagcgttctgaggtagccgcgattctgtgccgtcttggcggaaccggaagagtggagttctgaaatagttaaggacatcgcacagacgttgggtagtgcgatgtccttcttttttgaagctttttgggaagagggggtttgggggagagggactttttctccgaaaaagtccctctcccccaatttcatataactttagcagtagttataagtcttttttgcaggcgttctgcgataatgtcgttgtagtcgaccatggtgacttccatgtcgcaggcgcgttggaagaggtatacgtcgccgccgcggacgtcggacattgtgacaagcatggctttggcttggctgccgccgaagtgtcttgccagtgttttgatttcggcgagggcgaagacgtcgggggtgccggctttgcaggagacgaagacggggacttcgccgtggacggcgattacgtcgatttcgttaatggtgtcgacgcgttggatgggggctacgtcccagttggtttttacgctgatttgtacgtcctggaagtatccgctgttgcgggcggttacgtatacgtagaattcgaggacgctgccggtgtcgatgaggcagtcgcggactacggcgtttttgtagcggaaggagatggttccgcctgtggtgcgcaggtcttttaagtagccggcgtccgcgagggcggacatgattattgtgtcgcagtatactgtgtctttggtttcgccttcaatggacgacggggcttcgaatctgagcgggtcgttttcgtcttcggcgaagtagtcgtcggttgcgggtctgaggtattcggagagtctgggccatgtcctgtagtattttttgaacagggagaagagcccgaggacatcgtttgattcttccgcggacagtgactccaccgccacgtgaccgtgtccgagataggtgctgccgttgaggcgcatgatggcttcaaccgtgattttcgggtcggatttgactttgtctatccacgggcagttcattatgtttctgtaggagcgttcgagcgcgtcgtatctgaagaccgggattccgcgttctttcgctaagattccgacggcggtgcttgcgacttcgaagccgcctgttatgtctatcgctatgtcggggtagagctccagaatgtgttcgagctccgcgattaccgccttcagcgacagcatttcggttgaatagaagaaacaggtgcttggtatttcaagcgattcgatgaatccgaggatgcggtttttgaccctcttggatttcagtcgccttgtgccgagatagaccgcctgttccgggtgaaagtccgctatcgcgaggacgttgaacatctgctcgtcgtcataaagttcgagtattgccttcggacggtaccctgtgagttctgccattattatatcccccctgatgtttttaagtattttttaagtaatagataaaaaccaacacactactgataaatatcattatacactgaataaatcgggtttccgcggaaaaagacttggatttatgtttttttccgcgaaaacgaccttaagtcaatgtttccttttataaattatatcacatatttgccgacatttcaagcggtttttgaaaaaaaatgaaattgtcggattttgacttgaaaattcgaaaaaaaaatggtataatagaagtatgaagtatcaagatccgcaacccgatcccatctgatcttgaaatttttcgaaaaggggggcgccggagtatttttcttttctccggcatagaaggatcatgtttgaaagatatcagaatgcaaagcgcgctctgctcgcgcggctgtacaaaggaatgaacgaacggcagctcgacgccgtcttctcggtaaagggaccgctgcttgtcatagccggcgccggaagcggaaagactactgtccttgtcaaccgcatcgcgcatataatccgctggggaaatatgtattacgacgagactgtcccggaggggatgaccgaggatttcgtcgcgtcgctcgagaaagccgccgccgacccggacatcacgaaggaggagatatgcgatctcctcgagtcctgcccgcacgagtcgaccccgccgtgggctatgctcgcgatcaccttcacgaacaaggcggcgaaggagatgaaggagcgtctcggaaaggtcctcggcgacgagtcgatggcgaaggaggtctgggcgggaaccttccactcgacctgcgtgcgcattctgagacgtttcggcgagaatatcggcgtgccgaaggatttctcgatttacgacacggacgatcagaagaagctcgtcaccgcgtgccagaaggagctcgggctcgacgacaagatgttcccggtccgcggaactatgaacgcgatttcccgcgcgaaggatattcttctcgacccgagagggttcgcggaggaggcggggagcgatttcaggctctcgaagctcgccggggtttacacgatgtatcagtcgcgtctcgaggcggcgggcgcgctggattttgacgacataataatgaagaccgtgaagctcctccgcgagaacgaggaggcgagaagctactgccagaagcgcttcaggtacgtctctgtcgacgagtatcaggacacgaacaaggcgcagttcgagctgacaaagctgctctccggcgggtaccggaacatcatggcggtcggcgacgacgaccagtcgatatataagttccgcggcgcgactatcgcgaacatactcgatttcgacaaggatttcccggacgcgaaggtcgtgaagctggagcagaattaccggtcgacacagaatatacttaacgccgcgaactcggtgataaagcacaacgtcggaagaagagggaagaacctctggtgcgacggcgcgctcggcgacaagatccgcgtaaagaagctccagaaccagaacgaggaagcgcggtatatcatcaacaagatcctcgacggcgtcacgcgcgagcaccggaagtactcggatttcgcggttctctacaggatgaacgcgcagtcgaatatgctcgagaactacctcgcgaagagcggcgtgccgtacagaatgctcggcggcgtcaggttctgggagcgcatggagatcaaggacatcgtcgcgtacctctcggttctacagaatccgaacgacacgataaggctccgcaggatcataaatcagccaaagcgtaagatcggcgagtcgacaatcgacgccgtcttcgcgctcgcggagcacgagaacagaagcccgctcgagataatggagaacgccgcctcgtacacggcgctttcgaagagcgccgcgagactgaccgattttgtccggatgataaggacgctgaaggcggaggtcgacacgataccggtctctgagctgataaagaaggtcctcgagctgaccggctacagcgagatgctgaagaattcggggcttgacgggctcgagaggatagcgaacgtcggcgagctcatcaataacgccgtgaactacgagaaggagaacgacgagccgaccctctccggtttcctcgaggacgtcgcgcttgtcagcgatattgacagctacgacgagacggcggacgcggtggtgctgatgacgatacattcggcgaagggacttgagttcccggtcgtgttcctgcccggatttgaggacggaattttcccgtcgcttcaggcggcgagcgacccggaggagctcgaggaggagagaaggctcgcgtatgtggcgataacccgcgcgaaggagaggctttactgcgtccatgtccgtgagcggatgattttcgggcgcacgcagttcaatccgcgctcgaggttcatcgacgagatcccgcaggatatcatcgacctcggctatatgccgaagctcgagccgggcgcgaccagccgctcaaagaagcccacgatctcaaaggaattcctgaaatccgccgacctcgcctcggatgtaggcaaggcgggcgcgattgagcgtttcgacgccggtgacaaggtgacccacccgatattcggcgcgggggagatactctccgcgaagcagatgggcggggatatactttatgagattatgtttgataaggtcgggaccaagaaattgatggcgacttacgcgaagctgaagaaagcgtgaggtaatctcggattttaccgaattatggtataacgtgaaatctttgtaggggcgtccattggacgcccgccaacgaaattatcacaccaagcgtaaatttgtgcgatgtcttcgagcgggcgaccaatggtcgcccctacagaggtagagcgtggtcgggagtattatgcgttaccggagactttgtcttatataataatgaggaaaaccgtcggtccgtgtggctgacggttgattttttaagatatatattaatctttcttaagttctattgacaacctcataattatatgttatcatatatatatactgtaccacccggagcaatacagcggaacatcgcacgaaaaattcctgagaaaaattttcgttttcgcggaacattctgacatctgccgcgtctaaatctccggaaataacatttttcatgttcgggggcaacaccctcagcgaggtcttttacatgaatcaacagatcgatctgaaaaccaaacaatcacggctcagaaaagccgtcacgaaatctccggggggaaaaaagccggacaagccgaaaaaaggcaggctcaacataatccaaaagcgcgagcagcgctcggtcacttactttcttatcccgtccttcgtcgggctcctgaccttctacatagtgccgttcctcgttgtcatatactattcattcgtcgacagcccgatcaaccgcgagttcgtttttctcgacaactttataaggctcgtgaagaacagcgcgttcaggcgcgccgtcgctaatacggtcaggttttcactgacggcggtgccgctggcggtcatacttccgctgctgctcgctatcgtgcttgagaagaacattccgtataagtcgaacctcagaacgatatttttaatgccgatgatggttccggtcgcgtcgataatccttatctggcaggtcgtgttccactacaacggcgtcgcgaacgagatgctgaacgcgctcgggatcgcgtcgatcgactggttcaaatcggagttcagtcaggtcgtcgtcgtgctgctgtttttgtggaagaacatcggatacaacatgatactcttcatggcggcgctgtcgaatattccgaacgacgtcatcgaggtcgcgacgctcgagggcgcttcacgctggcagatattcttcaggattaagctcaggtatctctcgtcgagtattctgttcgtcacgctgatgagcgtcatcaactcgttcaaggtattccgcgaggtttacctgctgaccggagattatccgtatgattcgctctatatgttgcagcatttcatgaataatacgttcgcgtcgcttgattaccagaaattgtcgagcgcggcgatacttatgagtatcgcgatgatagttattatcggcgcgatgttcattgttgacaaccacatagaagaggacattgaggaataaaggaaaccgccccggcggtttccaaggaagtttcatgacttttgcggcagg

SEQ ID NO: 914 - DNA, 13679 bp, Unknown
  16S sequences of unknown bacteria
acagacgcagtccgctgccgatttttcgatgcccagaaagatccacattaatactttgcatccctgatttcaatattcttgtatttgtacaaatccggtaggtaccagaacttttccatttatctaggtacagttgttgcatattctgcatcatacggactttgatttgatggaaagaggaaaatttggattttttaaaaattcaatctcttacggataataaaatcttttttgtgttttattcttttattggcgctttttctgaaatataaggtaaatttcaaaaactttttgacgttttgggtattgcaatttatttgcgaaaagaatattattagtagtagtcttttatgttttttagtatacaaaaatacatttttcaattcgccgcatcaatctgaggcaggtatattacaaaaaataaaatgaggaagggtgtcacgatgttatttcaaaaccaataccggaccaatacatgtggggagctgagacagaataatatcggatcgcccgttcaggtatgtggttgggttcagacaatccgggaccacggaggcgttctgtttgcggatattcgggatcagtatggtgttgtacaggcggtttttcatgataaagcgcttttaaaaggggtgacaaaagaatcagttgtatcagttggtggaactgtagtacagcgagatcctgagactataaatgttaaaattccaactggttatgtggaggtagcggcgaagtcattaacaatattgagccgtgcggtatccggtcttccgtttgaaattgaccagtcgaaagagacgagggaagacctgcgcttatcttatcgatttttggatttgcgtaatccgaaagtacatgaaaatatcgttctgcgctcgcagattattgcgcatttgcgccaaaagatgacccaattggggtttttggaaattcaaacgccgattttgtctgcatcttcaccggaaggtgccagagattatctggttcccagtcggaaacatccggggcagttttatgctttgccgcaagcgccacagatttttaaacagcttttgatggtatccggctttgaccgatactttcaaattgcaccttgttttcgggatgaggacgcccggactgaccgctctcccggagagttttaccagctggattttgaaatggctttttccacccaggatgaggtgctaaaggtagcggaagaggtggttggggatacctttcgcactttttcgaatcgaaaggtaacagaaagcccctttccacgaatttcttatcaagaggccattttgaaatacggcacggataagccggatcttcgcaatccattggaaattgtggatttaagcgatttgtttgcagaaagtgcattcaagcctttttgcgggcaaacggtaagaggaatctgtgtcaaaggcgcggcgtgccagccaaagaaattttttgagtcaatgctggaatatgccatggaaattggaatgaagggattgggctatctcaagggagagggagagcttgctttttccggaccaattgacaaatttttggacgataatcagcgctgtcagctggcggatcgaactggtatcagagagggtgatgtcctttattttattgctgacagctgtcaaatggccccgaaattagcaggtcagatccgctctgaactggggcggcggctgaatttgctggaaaaagacgcatttcgtttttgctttgttgtggacttcccaatgtacgaaaaggatgaggaaagtggcgcaattggctttactcataaccctttttccatgcctcaaggtggattgcaggcgttggaaaaaaaggatccgatggagattttagcttatcagtacgacattgtctgtaatggagttgagctgtcttccggcgcagtacgcaaccatgatttgaacattatgcgtaaggcttttgccatcgccgggtacgatgaatcggtattaaaagaaaaatttggctctttgtaccgggcatttcaatatggagcgcctccccatgcaggtatggctccaggaatcgaccggatagtgatgcttttgacgggtgaggaaaatatcagagaagtcatcgcttttccgatgaatagcagtgggcaggatcttttgatgggggcccccagccccgtaacgctacggcagttgcaggaagtgcatatcagactgcgttaggaggaaaagaggatgattacagaagaagaaattctggagattgcggttttaagtaagctttatgttccggaagagcagttggaacagttgacaaaagatatggctgaaattttggcctttgcagatacaatcaataccgcaggggctcaggtagaagtgtacgaaggtttggacggattgtccaatgtattccgagaggatgaagtagagcagtcttacccgatacaagagatccttcaaaatgttggcggcggagaaaacgggtatttcccggtgcataaaagcagatagggaggaggcgatgacaggcatgattgaaaaactgaacagccttttgcagaagaagaaaatcagctgtatagaattgactcgggcgtatctgaatgggattgcccgagataacggcgttcttaacgcttatgtccgtgttacggaagagcgggcacttgaaactgccgccgttgtggaccacaagctcgcggcaggtcaaattctttctccgctggaaggaattccgatgaccttgaaagacaatatttcgacccggggagtagaaacgacctgctgctcaaaaattttgcagggatatacaccgatttatgatgcgtctgtttggcagacgctgaagcggcaaaacgcggtgttattgggaaaaacaaatatggacgagtttgccatgggttcctcctgcgaaacttcctgttacggcggcgcagtaaatccttttgatatagattgtgtggcaggaggaagttccggcggcggtgctgcagcagtagcgggcaatctggcggcctacgctctgggttccgataccggaggctctattcgccagcctgcgggattttgcggactggtaggactgaaaccgacttatggcactgtttcccgtttcggattgattgcttatgcttccagcttggatcagatcgggccgctctgtaaaagtgtagcagatgctgcgctggtattcgacgccattagctgtcaagatccgatggattccaccagtataggtcaaaaggaaccgacttggccgcagttgactcaaaaaccggaaaagcttattatcggcatagtgaaagaatattttaaaggagtgaacccgcagatagaaaaagcgctgcaaaacgcggttcacacctatgaaaaaatgggggctgaaatcgtaaaattatctatgccagcggtatcctatgcgctgccggtgtattacatcttggcctgtgcagaagcctcatccaacttgggacggtacgatggtatccgctatggttatcgtacaaagcattacaatagcgtttacgaaatgatctgtaaaacccgcagcgagggctttgggccagaggtacagcgccgaattttactggggtcttatgtgttgagcgccgggtattacgacgcttattataaaaaagcacaaaatctgcgtggtgcagtggttcaaggctttgatgaagctttttctcgctgtgatgtgattttggctcctaccgtacctgcgacggcttttccaaaaggatttgccgctcaggatcaggtgcaaacctatcagacagatgtttgtacggtgccggtgaatattgcgggaattcccgcgttaagcatgccttgtggatacgacaaaaaaggccttcctatcggaatgcagttgattgcaaaccgttttgaggaagcaaaattattgcagattgcgtatcagtttgagcaggcaaccgacggagaattttatcgcaaaaccaagtgggggtgttgtcagtatgcgtgagtatgaactgattgccgggctggagacacatatagaactctcaacgaaaacaaagattttttgcagctgtactactgcgttcggcggtgaacctaacacacattgctgcccaatctgcattggacttcccggcacgttgccaaaactgaaccggcaggcggtgcgatatgggatattagcgggccttgctacaaactgtacaatcaacccggtttccaaaatggaccggaaaaactatgtctatccggatttgcccaaagcctatcaggtttctcagtatgataaacctttatgttcagacggctatatcctgttggattcgggcagaaagattcgtctgacccgtatccatattgaagaggatgcgggcaaactggttcacgagaggggaaactcttttgtggattacaaccgtggcggcgtcccgctgattgagattgttaccgaaccggactttcgctcggtggatgaggtacgggagtatgtggaaaagctgcagcttttgatgaaatacatcggcgtttccgactgcaaaatgcaggaaggttctctgcgttgcgatgttaatatctcagttcgcccaaaaggcagtctggctttggggacccgcaccgaaatcaagaatatgaattcttttgcttttatggaacaagctctggaatacgagtttgaacgtcaggtagatctgctggaaagcggcgaaccggtggtgcaggagaccttgcgttataacgatatgaccggtgagacagagagtatgcgttctaaagaagacgcacacgattaccgctattttaaagagccggatttagtgacgatttgtaccagcccagaggaaatcgagcagctgcgtgcccttttgccggagttgccggatcgcaaaaaagcccgttatctttcaatgggaatccatgaaggaggtgctgcggcgctgatccggtcccgtaaggttgcagaattttttgatgaggcggcgaagggactgcaaactccccaattagccgcagcgtttatagttgggcagatgttcagtcgctattctaccgcgacacagcgagatgagtgggaaactcctgtaacaccgtcgcagctgcatgaattgtgtgtaatggtcgagtcaggcagatgcaatcggggattggcaaagacgacttttgaaaaaatgatggataccggaaaaggagcgacagcgtttctttccgccgatgatcttgcagagatagacaacaatcagctgaaaaagatttgccaagaggtgcttgcagagaatgtaagtgcggttcaaagttatcttggaggcaaagaaacggccttgaaagccctcgttggtgcggttatgagaaaaacacgggggcgtgcaaatgcggccaaagcagagcagcttcttgttgacagtctgaaaaagggatgataggctaaagataataacctctgtcccgttttttaaaaggccggagcaaacgctccggccttttacgtagtttggtagacggaagaagaacagaaaaggagtggaaaaatgaagttaatttcttggaatgttaatggcttgcgtgcctgcatgggaaagggatttttggatttcttcaaccagattgacgcagacatgttttgtattcaggaaacaaagatgcagcccggacagctggaactggagttggatggatatcatcaatattggtgcagtgctcagaaaaaggggtattccggtacggctttgttttgcaaagaagagccgttgtccgtggcatatgaactgccgcagccaattcatgccagtgaaggcagggttattgcagcagaatttgaacgcttttacctggtgaacgtttatacccccaactcccaaaggggattgacccgcttggattaccgaatggagtgggaagatgcgtttttggcatatattcggcagctggagcagaaaaaacctgtgattatctgtggagatatgaatgtggcgcaccgggaaattgacctgaagaatccgaagacaaatgtagggaacgcaggatttaccccgcaagagcgggaaaaaatgactgcgctgcagcaggcggggtatctggacagtttccgttatttttatccggacgcaactggcgcttattcttggtggagttatatgttccacgctcgggaaaacaacgcaggatggcggatcgattacttccttgtgtcccaaaagctggaatcgtttatgaaagatgccaaaatccataacgagattatgggcagcgatcattgcccggtagaattgacgatggaatggtagggagaatcaaatgaaaaaaagaacaagtcatgccgcctcggtgggagtgattggtggtgatgatgggccaactgcgatttttaccgtttcttcaaaagagatggaaaagcgccggtccgagcaggaagcctttttaaatcgggcgcaaaagctggccgagccttgtgccaaaagttttgatgagaccattcggtatctgtgcgctatatatggcgcgcagccttgtgatttgtcccggggacagcgccggagtgtaaaggcaaacatcctcctcaatgaacacccggaattggtgcgcagacagcctattccggaaaatcccaccgaaacgcagatgcgggaatggtgccgacaggatatttcttttgatcaggcgttggccttcccggaagaaaggctggggcttcagatggaagggtaccggattccagaagaaatagcccggacgctgcgggaaaaggagcggaaaaacgagccgtccgcccgtaagaatccgctggcccatatgctggaaagatgggctgagtggtggcgcggcaacctgacgcaggaggatgaagggccggaaccgctggtcgttttggtggaaagaacacatgagtatctggcgatcgacggaaagggcggcggtgcgctgtctgacgcgctgggccggtatcagggaatcagagaggaggatatccgcgacaaaactccccggtttatcgcctatgcctatttgatggaacaagatggtatatggaaatagtcttgccaacccattgtcggatttggtatactgtttttggaattttttgccgcatatcaggtgcggagaaagggaagattatgggaaaaaatgcagaatatatccaaagggtcatgggctatgtagaggagaacgttcccgtaacccagtcgattttggctgaccgcaaagcggtttgcgccgaatttttgaagaatgtgcagggaaaagagtttgacaaaattctgttgtttggcattggtagttcttacaatgccgggctgatggtcaaaccgcttttggagtcggctttgcagctggatgtgctggtagcttctcctgccatgtatgagcagatgcgccgtagccgcagctttgacagcgctttgttgattgcagccagccagtccggcaaaagcgcggctaccatcgaagtggtcaaagaactgaaaaaacagggcgcttttgtggtaggattaaccggaaacctggagtcccctttggctaaggagtcttctgcagcagtggacatccattgcggcgaagaaaaatccagcgttatgacaaaaggcgtgctggccacggccatgatgatggcgatgattggtctggaatatggtttggcaagcggacttttgccccaaaaagattatgaggaaatcatgacagattttgattttatagccacctatatgcagaaaaatctggatttggccaaagagtggtgcgctgccaacgtggaggattggagctatttccgatctttctcactgattagcaatatcgattctactggtacgactttggaaattgctttaaaggtaatggagagtattttcctgccctccgattcctttgaagtggaggaatatctgcatgggccacacctgctactttcccgcaaagaggcggcgttgcttcagctggattcagtaagcatggatcatgagaagctttcccgcatccatgaatttttgcgggagaagaacgtaccctcttaccagatcactcaacagggcatccctggctttgtcaaagaccgtctggtgattcacagcgttaaaaatggacttttggattttgcagagtttctgccggtgctacaggtgtggagcatcagtctttgggaatattttgatcaacatgggctggatgcgtttgaaatgcctggcgatctttcaggtgctttgtctacaaaagtgaaataaaccggtttacaagcggctaaaaatatgctatgatgtgatataacatcatagcatattttgtgcttttaatagattagatagagaaagatggtgaagaatcatggagctgttgcaggatcataatgaacccttatacttacagctgaagaaaattcttcgaactgctgtggtaaatggggaatatgtcccgggacagcagattcccaccgaacaggagctgatgaagcaatataatgtcagccgtattaccgtccgtcgtgcaattcaggagttaattaacgaaaagtatctgatcaaaagtcagggaaaagggacttttgtcagtcagacgcgtcttagtcgagagcttgtaaaactaaaaagctttacggaagggtgcgaggataaccatcaagttgccaagtctcaggttttatccgtgacggtagataaggcaaataagcatgatatcagccgtttgggtgtgtctgcggaagataaggtaatccatattacccgccttcgttttcgggatgatgtgccgtttttgattgaacattcctattatccgtatccccagtatgaatttttgttgcaccacaacctcagtgggtcaatttatgcaattttaaaagagaagctggggctgattccggcgcgatccgaaaaaagcgtagagattgcctatgcaacagctgagcaggctcagctgcttggtatcaacaaaggggctgcgttgtttttaatgcgtacagttgtatatgatgaggaagattgtcctgttcatcacaacattgtttatctggacggagtaacctatcggttcagcttttagtctatctaaaatatctgtttttaggaagttgtcgtggacactcgaaaaaatatacacatatccctgtaaaattttgaccaaattcacgatttttgctttttgtgtttacaaatgcagatggttatgataatatgacgttataggataaccatgggatttctatgtgtttttccgtggtccctatgaatatggcgcggtttttgctgtgccggaaaattgcctattatttataaggaggaatttccaatggcttgttgtccgaaatccatcattgctgaaatcctgaaagccaaaggcgcgatcaagagcgtatactttgttgcttgcggcggttcttacgctggcctgcatccgggtaaatatttcctggagagcgaaagcaaagagctgaaagtagatcattacagctccaacgagttctgccatgctaccccgaaatctctgggtgaaaactccattgttatcacgcagtcttcttccggtaacactcctgagaccgtaaaagctgctgagattgctcagaaagctggcgctgcttctatcgttatcaccaacaaacccgaatctcctttggctcagaacggcgattatgttctggttcctgagaaaggttctaccgctaacagcggccaggcttattctctgaaactggctgttgagatcctgaatcagaccgagggttacgagaactatgatgagatgcagaacggttttgacagaatcgacaaaatcgttggcaacgctactcagttcatcgctcccagagctgagaaatgggcgaaaatgtataaagacgagaaactcatctataccatgggttccggttctgcatatagtgtcgcttattccttcgcaatctgcctgctgatggagatgcagtggatcaactcttctgcaattcattccggcgagtacttccatggcccgttcgagatcactgaccgcgagactcccttcatcgtattcatgagcgaaggccgcacccgtccgctggatcagagagctctggacttcctgaaacagtacgctgagaaactgatgatcgttgacgttaaagagctgggcatcaacaccatcgacgataaagtcgttgagttcttcaacccgctgctgctcgttcatgcgatccgcgttttcgctcagaaactgtctgaggagagaaaacatccgctgactgtcagaagatacatgtggaaactggagtactaatctaagattggtataaaggcgctacataagcttcgaaaagaggggtaaaaattacccctcttttttcattggtgaaaattgttttgattttacaatagaccgagttgggtgatgactatttttcttccttgcggtttttatttgccttgtgatacaataaagaaaaagggaggaaatcagcgtggaaaaaaatattggttttatcggtgctggaaatatggctggtgcaatgatcggtgggcttttgcgggcgaaaattttttcgccagagcaagtttgggcttctgcgcccagtatggcgcatctgtcctctctgcagcgtgattatcaaatccatataacggcggacaatcaggaagttgccagccattcgaatatattggttttggccgttaagccttatttaatcgcgacggttatagaacaaatcaaaggacagattcaaccggacgcgattgttgtgtccattgcggcaggggtaacgctgtctgctctggacgagtgttttgatggccctgttcatttagtacgggtgatgccgaatactccctgcatggtgggagaaggaatgtctgcggtttttccgggcagatgggtcacgccggaagaaacagaggaaatccggttaatatttgctgcattgggccgtgcagaggtgttggatgagcgcttgattgatgtggttggtgcagtcagtgggtcttcaccggcttatgtgtatttgtttatcgaggcgatggcagatgcggcggtaaaaggaggaatgccaagggtacaggcatatcgttttgccgctcaggcggtgctcggctcggccaagatggttttagaaaccggattacatcccggtgcattgaaagacatggtctgttctccaggaggtactacgatagaagcagtagaggcattggaacaaaaaggaatgcggggcgctgttttttcggccatgaatgcttgcatggaaaagtcccggaacatgagccgataaaatagaaaaaatgctattttttgccgctatgataaagaaaaaattaaaggaaacggtaaacaatgctgttttttggggaaggaacacttgacatctatcggaaaaaatattattatattatttgtattctaaagcacgattgaactcacatgtttgtgtaagtcattgttcgccgaatggtttacacaaacatgtgggtttttcttttggcccggaatataatatttttttggaggtaccaatatgaatcacggtacagtaaaatggtttaatgcagacaaaggatttggtttcatttccaatgatgacggcggtgaggatgtattcgttcatttctctgcgattatgactgacggctttaaaactctgaacgaaggccagaaagttacttttgatattgaggctgatcccaaaaacagcggaaaaaccagagctgtaaatgtttgcccgcagtaatttctgccgcaaagcaaaggccggtcttttgaccggcctttttatattcccccaagtcatctaataaatttattttgctcaaagcccgtttttcagaagaaggcatttacaacggaaaatatcaaacgggaaactacacaacgaaattggacgccctttttacttttggactgatgggtaatggcttcgtcaatttcactatgcgtgattgaagcaaaaaatatgataacgtaaatatagagataaatgggaatttacccttctgtttatatatatcagtatgtgaaaacagaagggtaactgttggttgacacatttctatgtgtacatggcggtaatgcaactgaaaaaatgttatgcttttgtcaaaggaggcgaactgacaatgaatatagcagacagaatacaatatttgcgaaaacaaaaaggatactcttaggaggaacttgctggcaaggttggtgtatcaagacaggctgtatcgaaatgggaaagtgaacaaagtatgccagatttagaaaagataattgttatgagtgacctttttgaagttacaacggattatattcttaaaggaatagaaccggtttcaacaacaaatagaaagacaattaagactttatacttaggattggtttcggtttttgcgaccatagcaggaatatagtcttttactgctaaccgatttaggtttgatgaatgctttgtgattattttagcaggaggtgttgtcggattaggaatagccctaatgattcaagtaataagcggtatgtttgtaaataagaaagaataaataaaaaggtaacttcagtttatcgagcagttgctatctgtgaatatacctcctttcgttacttcgacgaagggaggttattgatatcctgaattagtccaaaaggtaaaagggagatttaggagcagggcttgcaatctaaaaaaagccatgataaaataataaagttaaagagagaaatggaaaggcggttttacccatgtccggacattcgaaatggagtaccattaaacgaaaaaaagaaaaaacagacagtcagcgtgctaaaatttttactaaaattggcagagagattagtgtagcagtaaaggaaggtggtccggatcctgctgtaaacggaaaactgcgtgatctgatttccaaagcaaaatcgaataacgtacccaatgataacattgaacgcattatcaaaaaagctagtgccgaaggcgacaaaaatgattacgagaccattttctatgaaggatatgggccttgcggcgttgcagttattgttgaggccctgacggataaccggaaccgcacggctggtgatttgcgccattattttgataagtttggcgggaacttgggacagaacggctgtgtttcttttatgtttgaacaaaagggccttattgttattgaaaataccggtattgatgaagaaaaaatcatggaagactgtatggaagctggcgctgccgattttaaatatgatgaggactctattgaaatctttaccgaccctgtcgatttgcggaatgtgcgggagtcgttggaaggaaaaggatactcactggcttctgcggaagtcgaatatattcccagtacaatgacggcgattgaagatccggatttaattattaaaatgggcaaaatgctggaagtaatggatgacaacgacgatattcaaaatgtatggcataactgggataacgaagaagattacgaaggttagctgcagttggtaaaatgaggctcacttgagaacaagtgagcctcattttatactgctatttgatttttctcttcaaatcagaatatttgttcttttttccttgacttttaaacgaacatacgttacaatacaaacagaagaacacacgttctgattatgaagggggagtaaaaatgaaaaaaatctttatgatattggttatgattggtacggttatgttgttcggtacagcaggtgccagcgatgtggggaatattacagttggccgggcatgtatgcaggggctgtctcttatacacatctgac

SEQ ID NO: 915 - DNA, 32531 bp, Unknown
  16S sequences of unknown bacteria
tcggaatgaggtgacaggaatggagaaagtttatacaattgacgatctgatgcaggcgatcaaggagagcggacgcagctatgacaccgaccggatcatggctgcctatcaggtggcaaaggaagcccacaaggaccagcgccgccggtcgggcgagccctatatcagccatcctgttgcggtggcgatcattctggtggggctcggcatggataccgaaaccgtggtggctgcccttctgcacgatgtggtggaggatactgccaccaccggcgaaagcattgaaaagcagttcggcgaagatgtggccctgatggtaaacggcgtcaccaagctgggtcaggtgccgttttccacccgggaggagcagcaggcggaaaatgtccgcaaaatgctgcttgccatggcacaggatgtccgggttatcatcatcaaactggcggaccgtctgcacaatatgcgcaccctggaatcgatgccgccccagaagcagcgggataaatcgctggagaccatggaggtctatgcgccgctggcacaccgtctgggcctgaagctggtcaaggaggagctggaggatactgccctgcgcttcctggacccggctgcctattcggagatcgaatcccagctgatcctgcgcaaggacgagcgggacaagttcctctcgatgatccgggaacggctcaccgagcggctcaatgccgagggaatgcacttctacctggagagccgggtcaagagcatctacggcatctaccgcaaggtgtatatccagggccgggattttgatgagatcttcgatgtctatgccctgcgggttattgtggacaccgtcaatgagtgctataacgtcctgggcgtggtgcatgatatgttccgtcccatccccaaccggttcaaggactatatctccacccccaaggccaatatgtatcagtcgctgcataccaccgtgctggataaggagggtatcccctttgagatccagatccgcacctgggatatgcactacatcgcagaatacggtgtcgcggcgcactggaagtacaaggccggcctctcgggcaaggacagcctggaagagaaactggcctgggtgcgtcagctgctggaagcccagcaggagagcgacgatgtggaagacatcgtgcgcaccatcaagaccgatattgccccggaggaagtgtttgtattcacccccaagggcgatgtcatcagcctgccgtccggctccaccatcatcgactttgcctatgccattcactcggcggtgggcaaccgtatgatgggcgccaaggtggacgggcgcatcatgcccatcgacacagtggtaaaaaccggcatgatcatcgagatcatcaccggcaataccaagggcccgaaccgtgactggctcaaggtggtcaagaccagtgaggcccgcaacaagatccgggcctggttcaagaaggagaagcgggaggagaacatcgccgccggacgggaggagctggagaaggaattccggcgcagctccatcagcctgaccgagcagcaggaggaagaattcctcgcctatctggcagaaaagcagcagatgaagaatgtggatgacttcctggctgccatcggctatggcggtatttcgctggcgaagatcgctccccgcatcaagaccgactatgtgaagatgttccgtacctccgaggcggaaaaggccgcccaggttctgcccaagctggtgcagaagaagtccaaggtgtccagcggcgtcattgtcgagggactggacagctgcctggtaaagttcgcccagtgctgcaacccgctgcccggcgatgagatcatcggctttatcacccggggttcgggcgtgtccattcacaagctggactgccccaatgtcattaattcgatgaaggaccctgaacagcagagccgctgggttgccgccgagtgggcagataccacccagcgggaggtattcaagtcctccattgagctgctggcccgggatcgcggtctgctgctggcggaggtgagcatcaccctcaacaatatgcatgtgccgctgcacgcactgcaggcccgggagctcaaggacggcatgacgtctgtcaccctgacactgggtactgtgaatgtggagcagctgaccaatatcatgtccaacctgcgcaagatcgacggtgtcgtcgaagtcaagcgcgcgaatcagtaaggaggagcctgttaagatgagagctgtggtacagcgggtagccgcatcccgtgtggagatcggcggcgaaacagtcggagagatcggtcagggtctgatgatcctgctgggcgtatccggcgaggataccgaggaggaaatgcgcttcctggcaaagaagattgtgaatctgcgcatcttcaccgatgaaaatgacaagatgaacctctcgctgatggacatcggcggcgaggcactggtggtttcccagttcaccctgtatgccgactgcaagaagggaaaccgtccttcctttattgcagccggacgtccggagatctcggaaccgctctatgagagctttgtccacgaactcattgccctgggtgtggaaaaggtagccaccggacagttcggtgcggatatgcaggtctacatccagaacgacggccctgtgaccattgtgctggataccgatgagatcatgcccaagcgggtgacagtgcgcaaggcaggcgcaaaggagaacgcatgagaatctataccatgctcaccggcctgatggagaccaactgctatctggttgtaaccaaggagcgtcatattgcggtgatcgatcccggcgctgatccggagaccatcattgccaagctggaggatctggggtcggaaccctcgatgatcctgctcacccatgcccattatgaccataccggcgctgtggaggccctctgcaagcgctaccccgattgcccggtgatgctgggtgagaaggaactgccggtgtacggcgatccgaatctgagcctggctcccatgctgggcggccccaaggagccccagaagctccggtatgaccgtctgctccatgagggcgacaccatccagctggacgagctgaccttcaccgtcctggagaccccgggtcatacccccggcggcgtctgctaccaggtgggcgatgtgatcttctccggggataccctgttccagctcagtgtgggccggaccgacttccccggcggtgatgccgcagcactcaagaaatccgtgcagcgcctgcgggatctgcccggggagtataccatctgtcccggacatggctcgcccacttatctgagccaggaacgcagcaaaaacccgtatatgagaggataaacgcaccatgatgactgtattctgtgaaggccgggactacggctatgagctggctggtgtggcaatgctcttcttccggggggagaaggtgatccccgccaaggagggggaggagccgctggacaacttcattctggcggagaccaacctgcgtccgggccgggcatcgctgtcggtgacggtggagcgggaggaacgcacctgggaggccagtgagatcgtcccggtgagcgaggaaaaacccgaccacgactgcgaactccatctcgcccggatgctctatcagatcctcagcgagatcaccggcatcacccccaagtggggcgtgctcaccggcatccgtccggtgaagctggtgcagcgccggctggatcagggactcagccgggaggaggtcgcccgggaactgcgggaggactatctggtgtcccaggagaagctggatctggcctttgccacccagcagaaggaacatgccatcctctcccggaataccccggacagcttcagcctgtatatctccattcccttctgtccgtcccggtgcctgtactgctcctttgtgtcccattccattgaaaagacctacaagctcatggatcagtacatcgactgtctgtgccaggagatcgcccataccgcagaggtagcccgtcaggcgggactgcggctgcgcaccgtctacttcggcggcggcacgcctacctccatcacagctgaacagctcaaaaagctcaccgactgtgtggcagagcactttgacctctcggaggtgtgggaatacaccatcgaagcaggccgtcccgataccatcacccgggagaaactccaggtgatccgggacgcaggggtgacccgcatcagcatcaatccccagaccttcaacgatgatgtgctgcggtttgtgggacggaagcatcccgcccaggcggtggtggactgctatgagatggcccgggaactgggctttgacaacatcaatatggacatcattgccggactgcccaccgataccctggacagcttccgccatacggtggagcgtctgctggagctggggccggagaatatcaccgtccataccctgtcggtcaagcgctcggcggacctgtccggggagaaggcagtagatctgtcgtccctcaccggagatgtcaccgagatggtggactatgcccagcgccggctcatggagaacggctatgagccctactatctctatcggcagcgcaatattctcgataatctggagaataccggctactgcaaacccggcaaggaagggctctacaatgtctatattatggacgagacccataccatcctggcctgcggcgccggcggcgtcagcaaactccgggacccccatggggacgacatcaaacggctcttcaacttcaagtacccctatgagtacatcagccggtttgaggagattcttcagcgcaaagatgaaaccctggcattttatcagagccatcccattgatggaaccaagtcctgattgtaacgattttctgaacatttccgctccggaggctgtttggcagccggagcggttgtttttttgcgggaaaaagcatataataaaggcagtaattctgaagtgacaaacggcaggcaatgaagtctgccgcatcaaatagagtgaggtggattgactatgggattcatggacaaggtactggatactgcacgcagcgcggcaaacgcggcgtcggaaaaggccggggaagtgtatgagatcggcaagctgaagctgcagctttcgggactcaacagcgatctggagaaggcctatgcacagctgggccgtctggaatacgatgccaagaagaacggcaatgacaacagcctgctcattgacacctgcattaccgagctggacagcctgcatgaggatattgacagcctgattgcggagatttcggcagcaaccggggagaagacctgtccgcactgcggtgagagcgtggcagctgaggctgtttactgctccaagtgcggcgccaagatggacgccgaaccggtgaccgagccggcaccggcagctccggcacaggaagctctgcctgagagcaagccggaagaataaagcctggaatcactgactgaaaaaacgacgcccgccgatggggaaaaagtccagcggcgggcgagtttttgactttgggggaagtccgcataaacaggggagtgcgggaatacactggacacagaaccggggaagggggaaaacggatgcaggcaaaggaaggcggacagaactttctgcacggcgcgctgattctggcggcgtcagccctgatcgtcaagctcatcggcgcctttttcaaagtgccgcttgccaatatcatcggcggctccggcatgggttacttcatgaccgcctatgacttcttcaacccggtgcgctccctggcagtagcgggaatcccggtggcggtatccaagatggtatccgaggcagtggcaaccgggcgctttgccgatgcccgccgtaccttccgggcagccctgggactgatgtgcatcaccggtgtcctgggcactgtgggagtctttgctttcggagagctcttcgccgaccttgccggaaatcccggcgcttcggcggcagttctttccattgccccggcgatcttctgctgttgtatgatttcggtttaccggggatactatgagggacagcgcaatatgatccccaccgccctctcccaggtctttgaggcgctgatccggctgatgtgcggcatcggatttgccggtgctgcctataccctggggctggaaagctatacccgggacggcaccatcttcggcgtcagtgccggaggcccggcagctgtggaagccctgctttcccagttcactgcggcggcagcagtctggggcgtgagtgtcagcaccctggcatcgatgctcttcctcatggcacgccatgcctttgtgggcccggacccgcgcatctgtgccgcggatgccgccgaagggcaaaactattccgccctgatccgggaactgatccgcacggcgatccctgtctgcctggggtcgctggcagtgagcatgggctcgctggtggatctcttcaccgtcatgaaccggctgggggatgccgtcgctgccaatcccggctactttgcggcgcaatatgccgccatcctggcagacggacagaccctggaacagctgccgaactatctctatggctcctataccggcctggcgctgaccatcttcggcatcgtcccggcggtgacagcggtattcggcatcagcgccctgcccaatgtggcggcggcctggaaggtccgggaccgggagcgcacccatcggaatgtatcggtggtgctgcgcatcgtctccatcctggccatgcctgccggcatcggcatcatgctgctcagccagcccatcctggagctgttctactccgggcgccagctggagatccaggtggcggcgccgcttctgtcggtgctgggcattgcggtgatttttgtgtcactgaccgcccccatcaacagcatgctccagggcatcggacgggtggatctgccggtcaagctcatgctcatgggggccggcatcaagtttgtcaccaactttatcctgctgcgtgtcccgcaggtgggcattatggcggcgccgttgggatcgctgctctgctatggcttcattgtctgcatgagcctgagggccatctgccgggaaaccggagtctgcatccggttcggcgataccttcggcaagcccttgttcggcgggattatctgcggtctgaccgcctggatctgccggtatcagctgtttgtcgaccaccccggaaagctgtttaccctgttgtccattggcattggtgccataatttactttattttactgttcgttttgaagatagtgacgaaagatgatattttgatgatgcccgagggtgaaaaaatccgaaaaacacttgaaaaactgcgccttttaagctaatatattaagtgctgtggccgaaaggaaagcctgttttttgccgtaactacggcgtttttcaaggcttgaacacatggaacgcaaatggagccggtacaggaaattccatccggtatcctgcgcagaatacaatctggcctgtctgctccgatccgtcggatggacagggaagaaagcattttatggaggaattgaaaaatgacaaagactgaactcatcagcgcagttgctctgaaggctgagctgaccaagaaggatagcgagaaggctgttgccgctgtattcgatgccattactgaggctctggtagctggagattccgtatctctggtaggcttcggcaagttcgaagtaaagaacagaagcgagaagatgggtatcaatccccgcaccaaggaacccatgaagatcgctgcttccaagctgcctgctttccgtgccggtaaggctctgaaggacgcagttgccaagtaattgcgtagataagatctgttttttatatcgggcagcggggaaccactgcccgattttttatgagaaataaggaggagttctgcaatgcgcctggataaatatctcaaactcacccggctgatcaaacgccgcactgtggcaaatgaagcctgtgacgcagaccgggtgctggtcaatggcaaggtggcccgggcttccctggcagtcaaggaaggggacatcattgaaatcaacctgggcagccgtccgctgcgggtcaaggtgctcaaggtcagtgaatatgtcaccaaggacgatgcgcccacctgttatcagatcctggaataaacttcccccttttatgcataagctgttcgagaagcagaacagtggcataaagggggttgttttttatggagaaaaccaagaataccacagtgccggggcctcagaacctgatgctggaaaaccgggaaaagctgctgatccagggtgtggaacaggtggagagctttgacgagaactgtgtccagctggataccacccagggcgctctggtgatccggggacgggggctgcacatcgaccgcattgacgatgtgaacaaagaggtgtcggtcaccggggagattgtggcgatgctctatgatgaaacccggttcaagggcgggttcctggcccgcctgatgcgttgagtgccctggcttccgcccagctgctgaccttctggggagcggtgtgcctgggaatgaaggtggcggcagcctatgccctgcccgccgccctccgggaggagctccatttctcctggcagctggaatcgctgctggatcttctgtatttcacagcggcaggactgatcagctttctctatctgctctccactgtggacgggaccttgcgctggttcgtgctggcaggggaggtgatcggcgctgtgctgctgcgcctgacagtctaccgatggctgctcaggctgctgcgctggcccctgcggctctgctgcaagctgctccatggcgtggggaaactgaccggagccctgtggaagctggtgcaaaagtggcttccggagcagccgggtccgggactggaggacggaaatttttcagaggaaagcacgaattccccttgaaaatcgacaaggctttatagtataatcttctaaagatgatctgttttcatgtgaaatttttgaggaggggattccgatggcgaaggcaaaggctaagaaaaacaccctgctgcgtgtatcggtaattctgtttcttctctatgtagtgatttcactggttcagatccagggaagtatccagaaaaaccaggaacagctggcagcgctggagcagcagaatgaggagcagcgcattgccaataaagagctggaacggattctttcggacggcaccgaagaggagtatatcgaacggattgcccgggaacagctgggatttgcctatccggaagaacaggtgctggtggatatttccggcagttgacagcaaagattacaggaggatgcagactgaatgcagcagttggttgtggggaatattgtagagggtaaagtgacgggcattaccaagttcggcgcttttgtggatcttggtgacggtaagaccggaatggtacatatttcggaggttgccccgacctttgtcaaggagatccgggattttgtcaaggaaaatgacaccgtaaaggtgaaggttctgagtatttcggaggatggcaagatcagtctttcgatgaagaaggcagaaccgcagcaggcagcgccggcgaaaaccgagcgtcccgcacgaccgaagcgtactgctccgccccgggatatgggttggcgtggtcccaagccgacaccggagcctcagagctttgaggatatgatgaaccggttcaagcagaccagcgacgacaagatgtctgatctcaaaaagtatatggacggcaagcgcggcacttcctttaagagaggacagcggtaaaccccacttgaaccaaaccatagcggagcgggcctttggaaaagggcctgctcctgttttatatattggaggaaacgaatgatgattctgaaaaatctgcggatctggtcccgggaaggttttgccgaggactgttacctgacagtggagggcagccgcatccatgccatcggccccatgtcggaatgcccgatggacggggaaagcctggactgccggggctataccgcctatcccggctttattgacgcccacagccacctgggcatgtttgatgacagcatcggcgccgagggcgaggacggcaatgagagcaccgatcccatcaccccccagctccggggaatcgactcggtctatgccatggaccggggctttgccgatgcgctggcagccggcgtgaccaccgtagtcaccgggcctggcagtgccaatgccattgccggtaccttctgtgccgtcaagacctatggacgcatcgtggatgagatggtgatcaagtcgccggtagccatgaagatggcctttggcgagaaccccaaggggatctatggcgataagtccgagactccgtccacccgtatggccactgcggcactggtgcgggaacagcttttcaaggcccggcgatacatgcaggacctggagaaggcggcagaggaccccgatgaggacgagccggaatttgatatgaagtgtgaggctctgctgccggtgctgcgccgggagctgccggtgcatatccatgcccatcgggcggacgacatcgccacagcggtgcggatctgccatgagttcgggctgcgctatgtgctggtgcacgccaccgagggtcatctcatcgccgactatctggcaaaggagaacatcagtatcatctgcggcccgatgatcaaccaccgttccaagccggagctgtccggatttgtgatggattctcccacccagctggcaaaggccggaatccccatctccatctgcaccgaccatcccgagatccctcaggatctgctggcagtgagcgcggggctgtgtgtccgggaggggctgccgtggcagactgccatggaggccatcacctgggtgccggcagtgcaggccggcattgaggaccgggtgggaagtctcgctccgggactggatgcagacctggtgctgttcgataccgatcccctcactctggaagcccgtccggccctggtgatggtaaacggacaaattatccataaaaaattcacagaatgattgcggatttgtataatttatggtatactataggtatcaaagaaacggaggcttttgagtacaccgtttcattgagggaaaggcagatctgcccgacccgattttataaaaaggggttgagtttatgaccatcaacatcaccggaagaaaaaccacgatcaaggattcgttcagggaagaagcagagcgggagatgacccgttttgatcgcctgtttgatgatgatgcatcggcccatatcaccgtatccaatgagggcggtcgtgaaacggtggagattaccatccgttcgggcggcatgattttccgtgccgaaaagaccaccgaagaccgcaagcagtcgctggctcaggccggagacctgctgttccgtcagatcgtaaagaataagtccaagctggctgaccgtttcaagaagcgcgcgccggagatctatgccgagcctgcggcagaggagccggattacagcgttatcaagcgcaagcacttcgcactcaagcccatgcatgtggatgaggcgatcctgcagatggagctgctgggacacaatttctatatgttcctgaatgcggaaacggaagttcccaatgtagtctataagcgcaatgccggcggttatggcctgctggagccggatgaaaactgaatctaacccatcggagggcagacagaaatgtctgccctctttttgttgtgtgcagctgtctgttcagaaccgtcctgattcgtcctgcctgcgccccgagtccctgaaaagggaacagaccagatttccccattggcgctccttttggggcatcagagccggcctgggaatatgcctctgattgggtcgccgcgggacttcacaatcgtccccgaagattatgggaggtctttcccggattcccggcctgatgcgtttttggcgcatcaaaaggcggcggacagcatatcagcctgatttcatagacctgattgctttacagcaaaaatcccctccggattatttccagaggggattttcaggaatttgtcagcgcttcatgtagctggcatcggtgccgccccattccacaacggtaaatccggtgcgctccatgggggtaagctcctgttcagggatctcgatgggctcgtccagcggcaggtagaccatgtgcacccgcacaacactgtccggctcaggagtgacagtgaggggtgccagctcctcatactgctcctcggcgaacatgatgaggttgtagggggagttctgcatcttcggcacccagtaggtgatgaagtcattgtactcccggggtgtgagccccagataggccagtttttcccggaggaaagactcggtatcgctgcccttgaccacaaagccgctctcgaagttccagaggggacgggcgccgccctcccagaacaggtagtagtgttcggtgccgtcggccttgttgatgaggcgtccatcgggataggctgttacctcccagccgtcattgtaggcgggataggtgtaggtgaagggggagtagtccaccgtgacggtgcagtcggtgacctcctcgggatagagatagattaccggcttgccggtgggtgggttgagatgacccatcgcagtcttttcatagacactattgccagaccggagggtatagagcagcccctggtcggtgtcattggtggtgaccagcagctgggtttcagtggcgtagatgttgtagaccaggccgttattgaaggtgaccgttacctggctgcagtccggcaggctggttttatcggtgaaggtgccggcagaagttacctgctcggcaacctgatcaaagacaaagtactcccagggattggaggcatcgaaccggttttcctcacctgtggaggcacggtaagtgatggattcggcacggctttcccgcatcatggtcagccaggcggggtaataccagccgagctcacccgccctcgcttcggattgggtgaggttgttcctgagggtggtgagatcggcatcattgagcttgagcttgacactgtcgccatagccctgtccgggcagggaacgagtgagctccacgccctgctcatagagccgtccggtgagcttggtatcatccttgcccacaatctcaaagaaggtgtcggtcatcaccggctgaccgatgtcctccgcttccacggcactgtccagaatcagcgccaccggagcggtttcagcagtatcgctgctccgggcaaacaggccgtttccaagccagctcaccttgcgtgtgtcgtcataaatccagtaagaaccttccggagttccgcagggggcaaagcccagcaccgggtcgggggtggcaatgagcttctcattggagagctcctgctgccaccaggccagcgccacagcgggctgagaggcggcggaactgttctgagcagtactggactgcggttcgcttacgctttcagagctgctctccggttcctcttccgggagactggagctctggctggaggagttctccggttcctccggcgcggaggacagttctgcggtacagcccgccagcagactgagtgccagcatcagggccaggagtcgtttcatccgatcgcatcctttcaatctctttttatagtggtgcgggaaaacgcccggtttattccggaaaattacagatccgggggatctttccagagccaccagcgcagtctgtccgggtcggggtcgggggtttcggcgtagtaaaccgccagccggtagacatagagctgacagcggtcctcctggtaccccttgcggaggcagtccaggcggtacagttcctccgggtcctttccccggaggtcggcaatagaatggatgccgatggcttccagatccgcttcgatgttcggcccgatgcccgggatcttccgcagttcgcccatatttcccacatccttcctgttttcagcatagcatagcccaaaagaaaagtaaacaaaaacagacaccgccggtacaagcggtgcctgttcatgcaaagaggtttcgttctgcagattattctgccggggaagtgccgggcaggtcctccggacggtcgatgtcatggagttccttggcatccgctgtttccagcatcagcacccggtccggatagcgccggatcacttcccgggcgccggtatcgccggtgagggctgagatctcagcaaagagagcccgggggaagatcgccggattgccgggctgtccctggaagctcagccggcagatccggtccgggttctcccggaacagccggagcagggcttccatgctctctctggtgcagtagggctggtccgccacacagagcatacagccgtccatctctgccatttcagccagccccagacggatggtatcgctctggagcatcagggggttatccagggcctggaagccgtattcagccgccatcgcccggaccggttcataccgggagaccacggtcacccgttccagcggcagggccgccagcttttccagggtgtggcggatcatgggcttgccgtccaccggcagcagcagcttgttctcgccggagaaccgccgggaccagcccgaggccatcaccacacagcccacctgacaggggtgctggtgcagatccaggtcccagacaaagacatccgggcggctgcgcagccggtccagcagcggggtgtggtcctttcgcagggcggcgatgacggtgcagcggtcaaacagccgctccagctctttggcatagcgggcacaggaggattccagatagcccacttcatcgatcatcacatcgctgccatccgggaccttgcgcaggattgcggcagcgtggctgtccagcgcctccggaatgggttccatacggccctgtccgggtgtgccgatggggaagacctcgcctgtgacaaggtcccgcatctcgatgcggtccggggtgggacggctgccccagcaggcatagctctggaggccggcgaacggcttttgttccagcagcaggtcacacagggtggatttaccgatccgtttttgtccggtgatcagcaggtgccgtttcccggaagcccgaaaagtactcatcatagagctgagaagctgcccgggcacaggccgatttgtattgttcatagcgagtcatcagttcctttgcctcggcagtgagccgggagccgccgcccccggttccgccgatggctttttctgtgaggggaaagcccagttcctcttcggcatggcggatcagatgaaaggctttggtataggccatgttcatctcctgagccgccgaccgcagggaaccgcaccgttcaatgcagcgcagcagctgataggggccttccccgaaaaagcgctgtccctcctcattgcagaggtagagttttatctgttcgcgcatgacggttcctcctttaacatgatccagtgtccgccggcccggatcacatgggtgccgggatagatctgccgcagagcgctggaaaggctttccgcatcagcttccgccagccggagatctccgcagagctccccgcctttgagcagtaccagccgggtgcagtactgcatggcaaggtttacatcatgcatggtcagaagtaccgtgcgttcccggtttccgcagagggaacgcaccgtgtccagcagcaggtgcttgttgttgtagtccagggcgctgtccggttcgtccagcagcagcaccggagtatcctgcatcagggcacgggccaggatcaccagctgtttctgtccctcgctgagggtgagaaaatcctgctcctcccggccgtccatgcccacctgccggagcaggtcacgggcagcctgccgctgggccgcagagggctgggccagcagggacagacggctgttgagtcccatgagcaccacatccagtaccgggatggaaaagagaatgctggtgcgctggggaatcatgctgacagtctgcgccagggccttggcatttccgggggtttcgcctgccagacggcagatgccgctggaggaaatccgggagcagatgccccggatcagggtggttttgccgctgccgttggggccgatgagccctacggtttccccgggctggatggtgaggtccacattccggactgtccagtcccgtccgggatagccggcggaaaactgccgcagttcgatcattgccataccgaatccctccttgcgatgagccagatcaggaacggcgcccccataaaggaggtgaggatgctgatggggatctcactggagctgagtgtgcgggcggcacagtccgccagcaggagcagcgccgcgccgatcacaccgctgagcgccagggcatggcttccgccccggcggtccagcagacgggcaatatgaggcgccagcaggccgataaaggagatgagtccggtgacactgacaatggaagccaccgtcagggtagccaggatcagcaccagatggcgcatccggtccacatccacgcccagcagagcagcttcgtccgggtccagggccagcagggtaatctggcgctggagcaggaagagcagcccgccgcagaatcccacacacaggacggtgggcaggatcttttcccgggtgatgcttgccaggctgcccatggtccagaagtcgatggcagccagctgctgattggggtcagcggcatatttgaggaacatcacagcggcttccgccagggcgttgaccgcaatgccagccagtacaaaggtggcggtattgcgccggtcgccgccccgggccagcagcagagccagccccacagcggtgagaccgccggtgaaggccagcagggtgttggtgagcagtccgcctccaaagaagaggatggatacgctggcacccacactggctccggaggatacgccgatgatgtccggtgcagccagcggattgcggaacagcagctgatacacgcttcccgcaaaggccagaccggctccggcagtcaccgccataatggtacggggaacacggagcaccatcagcaccttccaggacatctcatccccggacagcaggtcagcaggggtcaggggatagcgtccggcgcagagggagagcagaatcgcagctgccaggatcagcagtgccgcaggcagaagaaatttgcgatgggtcataaattacagaacagaagaggcgtcaaagccatagaactgctggtagaagtccacacaggccttggtgtagtcctcggtggaaacagcgtcaggatagagcacagaagccatccagatggagcccaggtaggagctggggatgggagaatcccagctttcgatcacgctgggcattgcgtagaccttgccgttctttacagcatccaggtcagccagggcgggatcgttcagaacatcgtccacagtgtactcagcctgaggagccagaatgatggcatcggggttccaggcgagcagctgctcataggaaacggtagcccagtaggtatcggtgatctcggaagccacattttcagcaccggcgttgcggatcagcagatcctggaacatagcgggaccggcagtgctcaggaatgcgctgttgccgcccaggtatacacgggcaggctccacgccttccagcttggcagccaggtcagcaatggccttgtcatagctctcggtgagctcattggcacgctcctgcacattgcaggcagtaccgatcatcgagatggtctccttgaattccttctcgctctcggggtttacagcgatgaccggaatgcccagctcttccagcttggtaacagcatccggcaccttggcggagaggattaccaggtcaggctcggtggatacgcaggtttcgaggttgaactgcttgaggctgcccacattgggaaggctgggcagttccggagcagccagcttgtagagctcacgggtgtcagccttggcctcgatgcccaccagcttctcatccaggtccagggcagccaggtaggaagtggtgatgtagtagccgctcaccagacgctcgggttcctcttcgatggtcacttcgcggcccagggcgtcagtgatggttacaggataggtggtttccagggaagcggtctgttcgctggaggactgcgaggaggaattttcctcagcgggctggttggagcaggctgccagagagagcaccataaccgatgccagcagcatggaaaggatctttttcatgattttttacacctcattatagttttgaaaatatcaccatcgcccgaaaaaacaaatcccggaggatttgttttctcagtgtgaagattgcagtattttgtccgtttctatcttagcaggaaacgatcagaacagcaagtgggacagcagtgcaatgatcggaatgcagatcacagtacgcactacaaagtttaccaccagagcgccgaagctgatcttcatcttggaaccgagcatggcgttgccggcttcggtcatgaagatgatctggctgatggagagcattacaacgaagaatacgctctgagcagccacgccggtgctcaccgaaatggcaggcaggctgacctcaatgaagcccagcagtacagccggagcaacagcagcggcatccggcaggcccagcaggctcagaaccggagcaatgggcttgcccagccaggtgaacaggggggtcaggtgtaccagcgacagggtcacgatcacgatggggatcatgtaggcgatgatggcctgggcaaacttcagagcggaaaccaggctcttccagaactcagccatggtgaagtcacggctgcgcagggcagcagcgttcacagcgcgctggaagcggctgccttcctgggaagaagcggcatcagcaggctcggtggcgccgtcgatgtaggtgttgggaacccgggacagagggggaatccgaacggtgatgacggtcatcacgaataccatgacgaaggtgagcagcagcagggtgccgtacatattctcgataccgccgatggaggacagtacgccgatgtagcccaccgagatggtggagaagcagacagcagcagcagtagcttcccgctgggtgtaaaccttgctctcatagtactggtcggtcatgtaaacacctacggcagcgctgaccacataggaggacaggcagttaaccgcggcggcaccgggcatcttgaagagggggcgcatcagaggctccagcagggtgccgaagaactctacgataccggacttgagcacgaatacgatgaaccagccgcagatggatacggtggacataacagtaccggccagagtcagcacctgaccgccgatgttggggtcagcgaagatggcagccggaggcaggttgaaccacacagccaggactaccagcagggctacacagtagtggatctgcttgtaggtggatacattgcccagatacttggcacaggcttcattcttgaagaagcgggcgccgatgatgatggcaacgagcagggccagggcgaacaggaccacatacttgaggttgtcgccgaggatgcccttgatgaagttaacaatcagtacgacggggacgctggagccggaaaccgggataaagtacaggaaaataccgatgagtcccaggacggcaaagcgcatgacatcgcgttttgttgctttttccatggtgaagcacctctagatcaatagataagattggtgagcagagccaccagcggaatggcgatggcagtgcgcatcaggaagatgagtaccagcttgccggcgcccagggggatcttggaactgagaatggcgttgccgcattctgagaagaagatgatctgaacgatggagagctgaactacaaagaaggcagcggcagcacaggcgccggtacccgaaaccaggatactgggcaggctgatctccacaatgccgatgaggacactgggagcagccagcgctgcatccggcaccccgaacagtcccagaaccggagccagaggggcgccgatccaccggaagaggggggtatagtagaccagggtgagcaccagcattacagtgggaaccataacgccgatggttttctgggcgaacttcatggcctggaggaagttctgaaggaaggccttggcagtgaactgttcactgcgggcagcgccctgttccacagccagacggaaccgctcggaaaagctcattttccgggtggtgaccaccggagcggaaccatcgatgcaggtatcggggatcatcgaaaggggcggaacccggatcatgatcgcacccatgaccagaaccagcacaaagcttgcgatgagcagtacgccatacatctcctcgatgccggcaatggaagccagcacgccgatgtatcccacgctgatcacactgaagttggtcaccacggcacaggcctgccgggtggtgtatgccttctgggtgtaatactgttcggtgaagtaaacacccaccgaagccgaggatacaaaggaggagatcatattgatggcagcttcgcccgggagcttgaagatggggcgcatgatgggttcacacagcaccgatacaaactccacgatacccgaacggataatgaagatcaccagtgtaccagccagagcgatggtaaagaacacggtggaagccagtgtcaggatcttaccgccgatctccggatgctggataaagggcagatctacattcagtgtaaccatccataccaggatggcacttgccaggaaaaagcccatcttgatgacaggatcaccgctgtaatactgttccagcgccttgatatgaaagacccgggcgccgatcagccccaggaccagcagggtgcaggaaatcaccactaccagtcccagtgccggtccgagcagagccttgatggtatcggtgatgagcaccaccggaaccttggaattctgcaccggaacaaagaacaggaatacgccgatcaagctgagcagcacaaacttggaaacggacttagtattcatcaaacccgcctcgccttacagccggcccagaatccggtcaaagacatcggtgacaacaccgcgggaggcatagaccttgtaatcccggtcaaactcgggagctacattctcagcaatgtaatcggagaggaacccagccacatccagaacattctgctcattgatggtcttgcccttcatgaagtcacaggccttctcaaaggcaaccggcttgatggcaacagcgccagcaaacatcttcatctcacgcacatagtcgccgtccatatccaggcccagtgcgacaccgattctggatatggtcaccttcttgcgggagcccagctttacaaaggcgctcttgaaggcgggaacggggaacaggaagcggataaaggcctcgttggcttccaggatggtcttgccgggacgcaggatcacatcggtcaccggtacgatccgggtgccgttgggggaggcaatctccaccttggcatcatacagatacatgacagggatcaggtcaccggcgggagaggcattgcccaggttgccgccgatggtgccgttgttgcggatctgcagggagcctacatcagcagcagcgtccatcagggcgggcaggtattcccggacgatgggatcatgctccatctgggtcatggtgcagtaagcgccgaccgagatggtatcaccctgcttttcgatcttcttcagctcgggaatgtgaccgaggtagcagagggcatcgggctgaaccgcaccggagtgcagacggatgacaaagtcagtgccgccgccgacaatcttgctctcaggggtgagggcagccaggctggcaggcaactcggccatggtcttgggtgcataggatttcatcataaatcgttacgcctcctcggaagttctctttactgcgcgcaggatctgggtgtagcccgagcagcggcagatgttgccggcgagggcgttgcggatctcagtctcagtggggtgggggttgtgcatgagcagagccttggtggacatgatcatgccggtggtgcagaaaccgcactggatggcagtttcctcaatgaagatcttctggatcttgtccagttccccattctgctccagaccttcgatggtcaggacgctcttgccttccagctggcaggcaagcaccaggcaggagtgcatggcctcgccgtcgatgatgacggtgcaggcgccgcactcaccctctccgcagccttccttggtaccggtgaggcccaggtcctcccgcaggagatccagcaggcgcttgtccgggcttacttccagctcggtgggacggccgttgagaataaagttcagtgtcatttatctttcctcccgattcttcaggtaagcagtgatcttgtcaggggtcaggggcaggtcgttcagatcgctctgcagagcatcgttgaccgcgccaaccacagcggcggaagccggaacatggcatacctcaccgatggtcttggcgccgaacggaccctctgtgttgtggttctcgatgagctcgacccgtacgctgggagcctcgaaggagttgagcagatggtagtccttgaggttggcgaagggaacaccgttgggacggtagtgcacatgctcggtcagagcagcgccggcgcccataacagatgcgccctgggtctgagcgatgcagatctcccggttgatggcctgaccgatatcctgtacagccaggtagtcgaggatcttgaccataccggtgtaggtgtccacctctacataggcgaagtgaccgccgcatacgccggggttatccttgctcacatactcataggaggcaaagatctcgtgctggtagcgctgctgggaagcataaaccagatcgctccaggtgtaaaccacatcaggctccttggtggagtaaacagtcatgccgtccagaactacatcggctacatcacagccccgctcgacagcgaagtgctccttgatgcgctccttgagcagcttggcgcattcctgggtggcacggcccattacataggtggtacggctggagaagcagcctacgaagtcctgcggagttacggcagtatcaccctcctggatgcgtacctgatccacctcgatgcccagttcttccgcagcgatcatcttgaaggcggttacagtgccgcagccgtggtcatgcagggtaacgccgcagcgaacggtgccgctctcggttacgcacatatccacacgggtgtagtccggcttggcaggatagaagccgtttacatgaccgcccaggctgacacccatacctcgcttgtagcgcttgttctgagcgttgaactcagcgatctccttcttgcggttctcccagtcaaacttctcacggcccagttccagcacctgacggcccttgaagtcgcccaggttcaggccggtggacagctcgatgtcgccctcatggatgacattcttcagacgcagctcgatggggtcgatgcccagcttgcgggctgccatgttcatgccgtgctcgaagttgatgttgaactccggcgagctccagccacggaaggcaccgctgacaatggtgttggtcagggcaacctgagcgtggaaggtctcatggggatagcggtatgtacggaagaacttgcttcccagggtgcgggcgtagttgatggagttgcccagataagcgccggcatccagcagcaggtcacagtccacatcctggagcttgccgtccggagtgaaggtgaacttgttcttgaagtacatgggagcgcggcagtaggtggagcggatgctctcctcacggttgtagaccagcttgaccggacgctttacccgcagggcagcagcagctaccagcggctccagaacccactcctgcttaccgccgaagctgccgcccatggtggtctttacgacacggaccttgttgtagtccatatcgaacagatccgcaataaaggaacggatgccgtaaacggtctggttgggggagtagatagtcagttctccctggctgtcgaactcagccacagcggcatgagtctccatagccatgtgattgatgcggtcgatgtgagtggtggtgtccacttccacaaaggtgccgtcattttccggacgggtgccgacttcattggcgatggggccgaataccgagccatgctcatccatgttgtcgatcttgccctcgagcgtttcatgggcgtccagagcaaagggatactcctcgtactcaacctcgatgagggaaacagccttgcgggcgatctcctcggtagtggcaacaacggcagcgatccggtcgccgacgaagcgtacatgctggttgaagatccgctcggtatggatcagatcctggcggtactgggagtgataacggttgtactccttctggcaggtgttgccgtagtagagcacatccactacgcccggcagttccattgccttggaatagtcaagcttcttgacgaaaccatggggaatcttgctgaacagcacagccatgtggagcatacccttcagctccatatcgccggcgtaaacagtacggcctgtggccttgcccagggcatcgtgaatgggatacgatttacctacgtgtaccatataaacctccttgcaaatacccggtgcgttgtataccattttataaaaataagcataccaatcgctattttgcactgcttactatagcctttggattggtctatgtcaagaagctgtgatatttttttaacccaattggaaagtttttggttaagatgataaattgggtggaaatatcccggttttcctcataattatcgctattttttgcaaaatacagcgacaaaaaggccggatttgtttttgtacagagcgacaaggaattttgaattggtatagataaaataaaaagagcgccggaggttccgacgctctgaaaagctggttttggatcatttactggaaaattccggtcaaagaggacggcgcagggactggtacttgtagctgtcgccggggtgatagctgcggcagaacatcatcacctgatcgccggaggaaaagtagctcttgatctggagaatgggggagccggtttccaccttgagcagcagtgcggtgttgtgcaggcagagcagggcttccacatcctcatagacagtgagatcgggatagcccgattccgctgccatccggctgagtcccttggtatagaattcccgtcccacagtggggaagaaatccgggtggaagtagatgtcctcataggcatagggctgatgtccgatgcggcgtacccggcgcagacgccagtagctgcggctgggatcgagacccagcatcttgtagccatagctgccctcggagcagagcttgcagctgacgatcttgacagcgttttccccggcttccagcagcaggtccggcttggagctcttggctgtggtgaggaaggtgccgctgcccttccgccggatcagcagaccttcatacatcagttcttcgatggccttgcgcacggtcatacggctcacacccagctgggcagccagttcccgttccgccgggatcgcctgttccggcttgtattccccggagcggatgcgctccatcaggtagtctttgatctccagatacttcttctgcatgtcggcctcccggaaagtagttgatcttgcttttttccattgtaccacaaaccggaaaaaccgcaaggcgcaaaaaaatgacccgtccgccgggcagaaccgggggacgggtcgggtgaaaacgatttacttttccttccagaaacaggcaatggcaacacagccgtcgccgatatgggtaccgatgaccgggccgatgccctgggtcatctcctcaccccaggtggccttttctgccagcatggagcgcacttccaccgcaccctcgggattgtccgagtggataaagccgatggggagggaggcatcgaatccggtttctgccacatagtccaccatccagcgggcagcggccttgatgccccgtgccttgtggaggatggagatatgaccgtccttgatgaggaccaccggcttgatattgagcataccgcccaggatggtgaccgttgccgagagtcgtccgcccttgtgcaggtactccagcgtattcatgcagcagatgatcaccagccgttcccggatcttttccagatagtcagcgatttcatccactgtacggccttcgtcccgcatgcggcaggcgatccgtaccatcatggcaaaggcggtggtagccagtgagctgtccactacccggatcttgccggtatactgttctgctgccacacaggcggactgataggtgccgctgagattcttggagatggtcatcaccagcagttcgctgccgtccgcacccagacgctcatatacctccaggaaggtggcgggattgatctgactggtgtggggcagttccttggaggcacgcagccgctggaagaattcctccttggtgatgtcgatgccgtcccggaagatctcctcgccgaactggacggtcagcgggatcatttcgatccccagtgcctgacgctcctccggctcaaaatcgcaggtgctgtctacaataatttttacgctcataatctgtatcctcgcagtagttttggctggttcaccgtgcttcccgggtttcagtgaagaagttcgatacgatctccagcgccgaaaccagggtatccagttcttccggcgggagcttttccatcactgcatctaccattttacgatgaaatgccgagtgatattcgttggcagccagtcccttttccgtggggatcacatagaccatacgcatatcattgaggcgtttttcccgtttgaggtatcccttgtttgccagggttttcaccgctacggtgagcgatcccaccgtgatgcccagccgtttggagatggcgctcatggagctgctgtccccgcaggcgatcacggcttcgatgacatggaactcactcaccgagagattggaaaactcatggctgctggaaagggcccgatcctccagctgcaggatcgtattgaaggcgttgaccaggaatgtattgattttttcacgctgcatgcaggggtacctccttatgcgggtggtaacaatggcttgtgctttgaatttcaaagagtatctaacaatatatcactcacaggcagttttgtcaaggaaggcgccgcaactttttccaatatttgcgaaaggccgcaaagagggaaaaggacctgacaagcaggcccttttcacaagcaagcgggaatggattacttttcgaagtatcccttgacgatgggttttccttccgccatcatcttcttgcccttggcatacatctcataaagcttcagctcatcgccgtccagaaccaggatatcagcatcgctgtccggcttcaggcagcccttgcggggatagaggttcagtgccttggctacattgacagtacagggcttgagagcctcttccagcgggagaccctgctccagatgcagtgccaccatggtttcatagacaccggtgctctccgccgccttgatgccgatgagctcgttcttctcgttccatacgggcatactgccgttggagtcggagctcatggtcacgctgccatcgggagcttctgtcatgaattccttcataatggcagcgcagccggagggcggcgaagcggtgaagtccacataaccgcccatctttgccagcttcatcatatccttgagattgttcttggcatgggtgggacggaaggtcttgacgggaatatcggtcttttcaatgatcttgaatacatccttgaggcccttcttgccggcgcccatgtggatgtgtaccacgcccggcttcttgcctaccagaccagccacacgggcagcggcagccagcttggtgagttccttgcgggtgatgccggcgtagcggtggtcggagatgcagatcttcacgccgatgacctcatcgatcagggcaatatcccggcccacagaaccagtgacagtgggggaaggatagtcataggaaccggtgtagcagtaagcagtcaggccttcctcgttgagggccttgaccttggcgagcaggctttccacattgcgggagatggagtcggtacccagaacgcccacaacggtgcagacaccgccgcgtaccagatccgagagaccaacttcggtcaccttgctggtgaagccgctctcaccgccgccgccggtgacatggatatgctggtcaatgacgccggggattaccttgcggccctcgaggtccaccacttcggtgccgggataatcgaagtcgatatgctctgcaatgtccacgattttgtcattgcagatgaggatatcggccttgccgatgtgttcaggggcatagacatcgccgtttttcaaaagacggaacatagtatcaaatcctttctgtatgggacagagtaaaaagcagagccagatctctttcaccatttgttacatattattataccatggaatcgggacggagaaaatgcattttcagccaataaaaactgcgttttttcgtctgatgcgccaaaaaaggggtggtgtatggtcgaaatctgccgctggaaaacaaaaagccttcgtttgctgtcctgggagggattcttcagggtgtgccttgtcagaatatgccggatatgctacaataaataaccggactgggaaaagtccgcctttcattagcagagtagatggccaggcgtcaagtgccgcagggacggggagttgccgtgcggacgaaaaaccggtggaaaaccggtttgcggtcgggctgtcgcatcccgctgttacaatttcaaagatcggtgcaggctctgcggcagcgtgtgcctttcctgactgtacagcaaatttatgaaagttaggaggcactgctatgaagttaatcgattccttccggcgttcggcggcgcagcttcgtgatctgcgttccctcaccggcgcgtcgcttctgctggcgctgagcatcctgctcacctatttcttccgcctggatttcggcggctccctgagcgtggggctttccttcaatgccaccgccctgatgggaatgctgttcggaccggtggtcaccggcctcgccaatggcctgggggacatcatcaaatgtgtcctcaagcctcagggcccctatttcttcggctacacttttaatgccatgctggcaggtgtgatctacggcgtgttcctctatgggaaaaagcccaccctgctgcgtgtggtggcaaccaaggctaccatcaacatcgtcatcaatgcctttcttgccaccctgtggatggcactgctgggcggcaagggcttctatgccatgatcccggtgcgggtcatcaagaacctcaccatgatccccatcgagtcggcgatcctctatgcggtgctcaacgccgcttcccaggcactgcgccgggccggctattataaaataagagaataaacagaacccccgggcgctgtctggccgcaaagacagtgcccggggatattttgttttatgcgggagccgcgctctccggctcagaacagtgagagctgagtgccccgggtctgttcctcccattcccgcagcttgcggtgatagtcggtgctgaccccgtaaaaggctgtgagcgcccggatcttctcatagagcatccggcggtattcccgatccaggtgtccggaggcgtagagccgggccagacccgcttccgcatcggggaagttctgccgtacacagtcaaagaacatgccccgggtcagtccccggagattcagggtgccgggcagccagtaatcggcgccgatctcccgggtggcttcgatcagcccggtgaggttttcggtgctgtcggtgatgagggggatcaccggcatcgagtggactcccaccacagcccgggtgcgccgggcaaattcccggagcatctccagccgggcccgggaaggggcggcgcccggttcgatcacccgccgcaccggttcgtccagggtggtgacggtggaggcgatgcccacataggtcagtcgggagagctcatcaaagagatccagatcccggagcatcagcaccgacttggtggagatggtgatggggttgcggtagcggatcatcagacgcaggatctcaggcatccgcttttcccgggcctccaccggctgatagctgtcggtgacgccgccgatgttgatcaccgccccgttccagtgcggggaggccagccgccgttccagcagttccacgatgttttccttgatgaagatgtcctcaaagaagttggtctccccggcctggggtttcagaaactcctgggagtagattgcaaagcagtaccggcaccggtgggcacagccccgatagatgttgaggtcgtagtcataggggtcgccgcccacatggttgagcgcctgccgggctgtgatgcggtggatctgcatgacagcatcacttcctgtcccggagatagcgggcaaaggggtcctcccccacggtgaaggtgcgtccgttcaggtagtccagcggggcgctgtccccttcaaaccggaaggtgagcgaccaggcacagagcgcctggaaccggaagcccagatcattcttcatggaggagtatttgccttcgcccaccagcgggtgaccgatctccgccatggtggcacggatctgatgggtgcgtccggtgatgaggtgcacctccagcagcgaatagcgcccattgctgtccagcaccttgtattcggtgatcatggtgcgcccgtccggcaccgggtgatggaacacctcgatgcggttttcgtccgaacgcttgcgcataaacagttcaatgcgcccctctgccggcttgggggtgccgtgtaccagacagcggtagcgcttgtcgatctgccgcagcttgatcttctcattcatcacccgcagggcggcggcggtcttggcacagatcaccagaccggaggtgttgcggtcgatgcggttgcacagggagggggtaaagctctgttccgttgccgggtcgtattctcccttttctgccagataccgcagaatgcgcccaatgagggtgtccggggtctggctctcgtcctcatgcaccaccagaccggcaggcttgttcaccagcagcaggtgctcgtcctcgtagacgatgggcaccatcggcccggcaaaacggaagctctcctccggggcggtatcgaagaattcatcgccgatgtacatctccactacatcgccggcagtcaggcgggtggagatttcacaccgcttgccgtttaacttgatgcgtttcagacgaagatatttgtacatcaggcttttgggcagcagcggcaccgccttggtgatgaatttgtccatgcgctgtccggcatcgttctcccggatggtaaagctcctcatgcaaagtcctcctgtgatgttctcccctcatcataccacccgcccggggaaatgtcactatgtcactttcctatggcggcgggatatgctaaaataggacagagaacatgcctttttatggcacagcagggaggaggccgccaatcatgccgcagaatgatgtggatcacagacagcatcgccagcgcctgaaggagcgctttctccaggagggactggacagcttcgacccggtgaatatcctggagctgatgctgttctatgccattccccagggtgacaccaatcccacagcccaccggctgctggataccttcggttccctgtccggcgtgatgaacgccagtgtggaaaatctctgccaggtcaagggtgtgggacagcatgccgccaccctcatcaagctgtttgcggcggtggtgcgtccctatctggacgatgccaaccggggcggcgtggtgctccagtccaccgatgagatctgccgctatctgctccccaagtttgccgggcgcacggtggagaccttctatctggtctgcctggacggacgccgccgggtgaactactgcggaatcctcagtgagggcactctggacagtgtgccggtgtttgtgcggcagatcgtggaaaaggtgctggctgtgcacgccagctttgtgatcatggcgcacaaccacccatccgggttcgccctgccgtcccgggcggacatcgataccacccgggaagtgattcgggcgctggggccgttgtcggtttcggtggtggaccacattgtcgtatccggcgaggactgtgtttccttccgggattccggcttcctgaaccggtgacaaagcgaaaatgcccttgcacagctagggcttgtgtgatatagtaaggaatgaacatttgttctgaaattctgccgccgcggctcattggagggccggggcggaactgctgatgcgggaaaggagagtgagcccatggcagaaaaggaccggtttgaactggtatccccttataaacccaccggtgaccagccccaggccattgaaaagctggcagcgggggtgctggccggggacaaggaacagaccctgctgggtgtaaccggctcgggcaagacctttaccatggcgaatgtcatagccaaggtgaaccgtcccaccctggtgctggcccacaacaagacgctggccgcccagctgtgcgccgagttccgggagttct

SEQ ID NO: 916 - DNA, 32759 bp, Unknown
  16S sequences of unknown bacteria
cgaaaaccggtgtggcaaacgacggaactttttcgctcaagcgcggttctctcgcggacgacgtgtcggtagccctatcgtcgtacacgggtgcgggcgcggtaaacgcgttcggcggaactttctccaacggcgtatttaccgccggaaaaaccgccataatctcccaagcgatttccgaagtaactgtcggaacgggagacgacgacgtcgcttctgtacggtatatgtcgggcgaaaataccactctccgcctcgactttaacgtggcgaatatgggagagaaggagattcttataaaatccataagcgaaactgccgataccgcgggcatttccggcgaagtcaaggccgcatatttaatcgatgcggagtacgaccaatctggagaatggactgttgtattcagcgcgtatgtcggagatgtcgagctctcgaatctgatggcgtggcacaagtccgaaggcggcgtatgggatatttacgatacagacattgaatataatgacggctttgcaagctttacggttgacagtttaggctcctacgccataagccaagtcccggagccggccggcatagccgccctcttgggagcggtagctctcgcatttgcggcatatcgcagaaagcgcgggtagcctgatgaactcctgatagaaacggcggatatttgtccgccgtttttttatgcaggtgtaatccgccttccgcattcggaatacctatcggcggctttcgcggcggcggtattctatggggaagtgtggataaatattataggggacattttttaacttttttttattgtgaatcccctctgaagattttttgcaaaattctaaatccgacgcgaattaaaatactccagtgcataaaagctaaaggagttagacaagcggtttaaggaatggatttgagaaaagctacggaaagggaactaaaatttgcattgaatgagatcaactctcgcccccgaaagacactaaattggaaaagtccaagcgattatcttcacgaactaaagtgcgccgccccctagggggcaattagtaaatgaatcaataactttaatctttacaaacaatcaacaatatctaaaaacatctaccgtcagttatgcactggcgttttgaaaataaagaaaaaaaagacaagaatcggaattaactgtaaaatgttaaaacggtaaaaatttgattgaagattgcctcttaaagaaagaaaattataaggataaatttacggtaaataatcttatggactcaaaaaaaacatcagggcaacctttcaacctaaaatttgcgccaaacccgagcggctggtgccggcatttttccgggcgcgcggcaaaactttcgcccgccgacaaggttaaagttttttatgacgcggggttccgcgcaatggagtttaacgaatacggcgaacttcccgtcgaggagcaagaggctgtcgcaaggcagatggaaaagttggggatgcagatgggcgtatttgccccgcgcgtcgggagctgggaggttccgaacctcaccggaaacattctcgacccaaaatcgcgtatacgcgacaaagagggggttaagcgcatggtgcgctccattatggagtcggctctcgaagtcggaaagcgcgcgggggctaaatggtttacagttgtaataggggcggaggacccgagcctcgaatacggctatcaattttcaaacgctgtcgagcacctcaaatacgccgcggattttctcgagaaaaacgacggccccattatggtgttggagtcgctcaatataaaaaaccatccgggcctgtggcttaaaaaaattccgcaggcgtacgccgtttgcaaggctgtcggaagcccaaaatgcaagattttaaacgatctctaccaccagcaggtcaccgagggaaaccttattgaaaacatcgactccgcctgggacgaaatcgcatacttccagattgccgacaatcccgggcgcaacgagcccggcacgggggaaataaactataaaaaaattatggagcacatttataagaaagggtacgaaggaataataggcctcgaactcgtacaatcaaaagcgacccccgagggcgacgagttctttgtggacagcgtccgctcgatagacgttgcgtaggctcggcattttttggcgattcctttgtgggagcggctcttgagggttgagataatcttggaaacggagtgtaaaatgaaactgctaaaatacatattttttacggcggcgatactaatgtcgtctttggcgctttatgcgggtgagacggtaaaatatgttttcctatttatcggagacggaatgtctataccgcaaagaatgacagccgaggaattttcgcgcataaatacggggaaggggcttgcgataaattccatgccgcaccaggctctgacaatcacccgctcaaagaactcattcattacggattccgccgcgagcggcacggcgatagcgtgcggcgtcaagactaataacggggcgataggcgtgggggcggacggctcaaggcttcaatccattgccgaggtcgcgcgggattccggaagaaaagtcgggattctcacgagcgtcaccttaaaccatgcgactcccgcatctttttacggacacaatccaagccgcggaaattattacgaattggggcttgatatgatagcttccggcttcgactttttcgggggcggcggcatcggcaagagcgacgacaaaaaatcgaaagcctacaaaggagacatttacaagctggcggaaaaggcgggatacaaggttgtgcgccgcgacatggaatctctaagagcgttgaagcccggttgcggaaaggtaatcgcgacgggttctgacggggcgctcgaatactatctcgacaacccttcgtctgcgcgcatatctgaattcacaaagaaggcgatagagcttctcgacaacgataagggattttttatcatggtcgagggagggaaaatagactgggcgtgccacgccaacgacgcggcgacggcggtttcggaaataatagattttgacaaagcagtcggagtggcgttggaatttctgaggaaaaaccccgaagacacgcttgtggtagtcacggcagaccatgaaacgggcgggctcacaatgggcagcgacggcactgcctacaattcctacttggagcgcttgaacgcacagaaaacttcaaggggattgttcgactcccgcttgcgccgccttttgaaggaaaatgaggcccttgaattcggcggagtaaaggcgctattgtctgagacgtttggatttgttttcgagaaggactcgaagtccgggcttgcgctctccgacgatgaggtggacgagcttaaagaggcgttcgaggagtggaaagacgagccaaagggcgatgagttgtcgtttgttgcggcgaagattttgaataataaggcggggcttgcttggacgacccatgctcacacggctctgccggtcgagacttccgccgcgggtgttaaatccgaaaagttttcgggcacgatagacaacacggacattgcaaaaatattaagaaatctcgtccgatagcctgatttttgctcgcatttatatagtatatagcagcgcggggtatgcgcttttacgcgcggtggcaggatagcgtcaatccgcgcggttattgtgggcgggcgttgcgttttataatgcggagcgtgcgagattcctttacgtcgggattttcgcaggtcttgggcgcgtatttcggcattttttgaatgcatgctcagaattttagccaaagagcgctttgattcgcatgctggcgggcttagacgcgagaaatttagcgcgcaggcgtcaataaaaaattgacgcgcgggcaatagcgtttaaatcttgacgcgatttataaaaaaatatgccggaagaatccgaaaacaagcaaatgcattttatcaggcagatagttgccgaagacataaaaaacgggctgccgccttcagccgtgcacacgcgctttccgccagagcccaacggctgtttgcacataggccacgccaaagctttttgtctcgattttgggactgccatcgaaaacggcggactttgcaatctgaggttcgacgacacaaatccggataaggaggacacccggtttgtggactcaatccgcgaggacgtccattggatggggttcgattggggcgaccgcgagttctatgcgtccgactatttcgagcgcctgtacggctttgccgaggagcttataatgagcggcaaggcgtacgtctgcacattgtcgcccgaggaatttaaggagtacaggggagttcccggacagcccggcaagccgagcccgcacagggatcgcccgccggaagagagcctcgatttattccgcagaatgagagccggcgaatttgaggaggggcaatacgtattgcgcgccaagatagacatggcctccccaaaccttcatatgcgcgaccccgccatatacaggataaagaaggaggcccaccaccgcaccggcacaaagtggtgcatataccctatgtacgattttgcccactgcctgagcgatgcgatagagggcataacccactctctatgcactctcgaatttgaagtgcacaggccgctttacgactggtttatagacaacacgagcattgttaagacgctaaaagtccatccgcgccaatacgaatttgcgcgcctgaacttgtcgtacactatgatgagcaagcgcaagcttcagcagcttgttgccgaaaaagtagtggacggctgggacgacccccgcatgccgactctttcgggaatgagaagaaggggatacaccccggaggcaatccgcgacttttgcgaaaagataggcgtaacaaaatttaacagccttaccgacatcgccctgcttgaacattgcgtgcgcaacgatttaaacaaaatatccctgcgcagaatggcggtgttcgaccccctcgaagtggagatatctaactggggcgatgacgagatagatatgctcgacgccgtaaacaaccccgaggacgaatctgccggaacccgcaagatacctttctctaagcggatttacatcgagcgcgaggacttcatggaaaacccgccgaaaaagtttttcaggctttctcccggaaaagaagtgcgtttgaggtatgcgtactttatgaagtgcgacgaggttgtgaaggactcttccggaaatatggtaaagttgatatgctcgatagacagggcgtcgcgcgggggaaattctcccgacgggcgcaaggtaaaatcgaccattcactgggtggacgcgtcggcggcgaagaaggcgaaggttcgcctctttgagaatttgttcacgcgcgaggatatgtccgatttgcccgagggaagcgacttcaaggaattcttaaatccgaattcggttgtggagtgcgaggcacttgttgagccctcgcttatggagacaaaggcgggagagcatatacaattcgagcgaaacgcctacttcatgccagactccaagctctcaacgcccgggaatccggtatttaacagaacggtgactctgaaagactcgtatggcaagtgataccccgaagcatcgcgcgcttttatcagttgcgattgccgcgctgtctttcatcggttgcgcgtggggcggtgtcgggcctgaagattcgggctacgatattcccgccgcaaatctcagaatacgcgatccctacgtttttgcagacaaagagagcggcaagtactacatgcacgcaaatggcttcaaattgtctgacgccgaaatatcgaagtttggcgtggggcgcagggctctgtatgcctacgagagcaaagacttgaaaaactggaaattgttagggccatccttcatagctcccgcagacttttggggaaaatcggacttctgggcgccggatatgttttatatagacggcaagtattatataatagccacattcagcgccgaaaagccgtccataaaaaccgtgagtggaaaattggtgccgatgcgcggttgcgcggtgcttgtatccgacaggcccgataaaggctttaagccgctttccggcaagcccataacgcccgaaaactggatggccttggacggcacgctgtttgaggacggcgacggcgaactttggcttctgtactgccgcgaatggctgcaagttggagacggcgaaatagtcgcccaaaaaatatcccgcgatatgaagaagacgcttggagagccgaaggttctgttcaaggcgtcgagcgcgccgtggatagcggacaaatccggaacgcacgtcaccgatgcgccggtcgtaaaccgccttcccgacggcactctatatatgacttggtcttctttctccggcaagtaccgcataggcgcggcgaaatcgccttccggaaaaatagacggcgaatgggtacacttcccgcgtgctttgaacgacgacgacggcggtcacgcgatggtttttaaaacattttccggcgacaccaaaatatcataccattcgccaaattcaaaaaatgagactttgacgattcgcgatttcgggtttaaagacggcaaattctttattggcgacaaataattcatttgacgattcggatttcagatatagaaaatgccgaaaatgcgaaattcgcgggagcttaggcaaaaccgcatttaagagagtcttttactttgaggaaaaaattatgaaagtctatataaacggaaaatattacgaaaaggatgacgcgaaagtgtcggtgttcgaccacggttttttgtacggcgacggtatctttgagggtatccgcctatatagcggaaacgtgtttaagctcgacaaacacatagacaggcttttccgttccgcccgcgcaataatgctcgatatgccgtggacaaagcagcagataatcgacgccgtttgcgacgcatgccgcacaaacgggcttcaaaacggctacatacgccttgtcgtgtcccgcggcaagggaaagctcgggctctctccgttttcgtgcgaggatccccagcttgtaataatcgccgacgaaatacagctttatccgcaagaactttatgagtgcggcttgaaagccttgacagttcccacgcgcaggaactcgcaggcggcgcttccgcccatggttaagagcttgaattacctcaacaatattctcgcgaaaatcgaggcccacaattcaggatacgaagaatgcctgttgctcaacaatgaggggtatgtttccgaatgcagcggagacaacgtatttatagttttcgacaacaagctgattacgcccccgataagctgcggctcgctcggcggcatgacgcgcggaactgtcatagagctcgccaagtctctcgacatagattttgacgaaaaaccgattacgcgcttcgacatctggactgccgacgagtgcttccttaccggaacagccgccaagctcattccgcttgtagagctcgacaagcgcgtaataggcgacggcaagcccggcaaaatcacaaagcgcctgatagacgcattcaacgaagtagccccgaagataggcgtgcatatctaacagagttgcggtctatgcgcttttgcgcgggcattaaaatttaagggacgccatttggcgtctcttttttttcgcgccagtagtttttttagaataacggcggtaaaattgtgcgggtttaattaagccttgtggggggccgtaaatttttatcataaaaattcggcaaatggatttttatgcgggcacattttttttcgatttggcattaaagaaatcaaatagaaatgcgatgtagccgctgacttttacaataaaaatatttttacgataataaattcgcgccgcatcgagattaaatagtggagcgaaaaataaaaattttatatgaagcagggctatatatttgtcttgcgatttagcgccgatgggagaagttattttacatatgccaagtacagacaacgactcttttgcaaagaaacttgaatttgaggttttggaaagccgctttggatattcgcgcgtaaagggcagggtgaagccggaatttctgaacgggcttggaatagcgcacggcggatatttgttctcaatggcggatttcgcgcttgcgttagcctccaataccgacgaacgctcggcagtcagcgcgagcgcctctgtaaactacataagcccatgcccggccggcgcggaaatcactgcggaggcaaaatgcacgttctctgacgagaagggcgcaatattcgatgtccgcgtttttggagagtcctcggaaagaccttttatgatttttcaggcgcgcgcaatttttaagagaaagaagtagtatcccgtttttagcagataaaaatggttgactaattattaaaacgttaagatatttgtagagttcaacggcgatacgcatatcccggttgatgggggtttgtcatttaacgtcgcagaacaacgtcaattcaacaattataataatatggatagaagaagttttgtaaaaaatagtgcagtaataggagcagcggcggcattgccccgttttagttttgcgcaggttaaaggcagcgacagagtcaaagtggcgctcgtaggctgcggtggccgcggaacgggagctgcatgcaatatgattgcagccgaccccaatgtaaaattcgttgctcttggcgacctattcaacggaaggcccgacagagccgctaacaagatttatgaatttgccaaaaagactgtcggcgaagcgaaggcctccgagataatcgacacttcgaaagtaaagaaatttgtaggttgggataatattgaccaagttctcgcagaggatgttgatttggttatcgacgcaaccccgccggtattccgcaccccccactatgaaaagatagttgcagccgggaagcacgctttcctcgaaaagccgggcgctgtggacgtaatccagggccgcaagatgtacgagctcgccaaggaggcggaaaagaagggtctttgcgttgtatgcggcaaccagcgccgctacgacaaccgctaccaagacttggtaaagcgcatgcaggacggcgaaataggcgaactcctagccggacagtgctattggaacaacggcggctatattggcggttctgccgaaggaggcccttggggcggcggcaaggagggaacagaggacacgctcgaataccagatacgcaactggtggagcttcatctgggtttccggcgaccatattgtcgagcagcacgtccataacatcgacgtattgatgtgggcgtttggcgacgaccgcctcccaatcgaagtgacgacagctctcggcggcagaagcactgacttgccttgcccgcgctttggcgacagattctcgcacttcgcaatcgactttgatatgggcaacggccttcgcatggaaagctattgccatcaggatccgaatacgtccccgaacgtaagcgaaagaatcgttggttctaagggcatattccagggattgcgcctgaccgacctcaagggaaagacaatatacgctcccgcaaagctcgagctcgacccctatattgccgaacacaaatatctgctttctgcaatacgcagcggcaagagggtaaacgagctaaagaacctcatgaattccaatatggcggccatcgccggaagaatgagcgctttctccggaaagaggttcaagtacgaatggatggtcaaaaagtccacggaagacatagttcccaagaatgtcgatttgatgggcaagacgcaggatctgagcttgaagaatccggtatcggttcccgttcccggaaaatacaagcttgtataatccattcattgatgcctgaagcggggttgtttcccgcagatgtaaatttaaaggtcgccaattatcttggcggccttttttttagatgcctattcgggaatggaaacgtaaaattctaagaaattttttttatatttttttagtataaaaattttttcatgaaaaaaaatgcaatcaaaaatatgttggttgcagagaaagaatccaaataaagaagcaaagaatgcaaggggattccaatattttatcgcgcattttccgattaaaaaaatcgcaaaagaaataaaatgcgcggataatctcgttgaatttttttgccacggaatggctgcaatctgtttatattagggcaatggaagctcatcggaggcttggtaaaatacaaagtttttgagtgttaaggaagtgtcataaaatagttgcaatttattttttaagcatcatatttctttaactaaattttttaacaggaaaaaaatatggcaccagctaaggtatataaggaaaaggacgctaataaaaacatccttaaaaataaaacgctcgccgtaatcggctatggttcccaggggcatgcgcatgcgctcaacctcaaggacagcggttacaatgtaatcgtagggctctatcccaagagcaagtcgatagaggtggccaagaagcaaggcttcaaggttctccccacagccgaagcagtcaaggccgccgacgtcataatgattgccgtaccggacatgattcaagccgatctctatgaaaaggaaatcgcgccgaatctcacaaagggcaagactctcgtgttcttgcacgggctctcaatccactccggcctcattaaagtgcctgccggcataaatgtaattatggttgcccccaagggccccggccacactgttcgttcgcaatacctcgaaaacaagggcgtacccgccctcatcgctgttgcgcagggcggaaaagaagcaaaggcaatcgccttggcatgggctgacggcataggcgcaacccgcgcgggagtaatcgaaaccactttcaaagaagaaatggaaacagacctcttcggcgaacaggcggttctctgcggcggcgtgagcgcgctaatccaagccggttttgaaactctcgttaaagccggatacaaacccgaaatggcatattttgaatgctgccacgagctcaaacttatcgttgacctcataaaccaaagcggcatatccggcatgaggttctccatatccgaaactgcaaagtacggcgatgtcacccgcggtccgcgcgtaatcaccgacaagacaaagaaggaaatggaaaaaatcctcaaagaaatccagtccggcaagtttgtgaaagaatgggttgccgaatacaagagcggcctcaaaaagtacaacaagctccttgctgaaggcgaaaagcacccgatagaaaaagtcggccagcgtctgcgcgcgctaatgccgtgggctgcaaagcagaatatcaagggcgcacaagcctcctattccgctgttgtggaagcgcccaaggcgcctgcgaaggctcccgctaagaaggcgaaaaaatagcgattctatttaatcaaaggactcggttgcgaaatcgaccgggtctttttttttaatgccagaatccaaggcgcgcaaataagacagtgcgccgcgggtttatttaagaactgcgcggattctataaattcccgccgaaaaatatatattgaatgaagaaaataaggctcgcaacacgttcaagtccgctggcaatggcgcaagcgcacatggccgccaaatatataggctcccgcattccaggggcggagtttgaaatagttgaggtaaaaacttccggcgacaagcgccaagattggtctcttgaaaggtacggcggaaaggggcttttcacaaaagaaatagaagaatctctactttcgggcgaggccgatgttgccgtccacagcgcgaaagatctccccacggaaactccagaagggctggtattggcaggttgtatgccgcgcgacggttgcgccgatgtcttgattctccgttcaggggtacaggttcctgaactgatagcctctggaagtccgcgccgccgggcgcagctaaaaaaaatttttccacaggcagtctggaccgagtttaggggaaacgtgcatacgcgccttaaaaaacttgccggaggttttgccgacgcttcggtgctttccctcgccggtcttgaaaggcttggaatcgagtcttacgaggggttggaatttaagccgataaagcttgacgtatgcgttcctgcggtggggcagggaataatagcgcttcaatgccgcgcagaggatgccgaaatttaccgtccgattaccgattcgcagacgaacatggcgttcgcgcttgagcgggagttcttgaagtcgcttggcggcggttgccagagtgcgtatgccgcaaattgcgaaggcgatgtattgaggatataccacgaggagtgcgggtttcaaaaaatcgtgtttccggaaggcggagattttgcgtcgagaatggagatagtgcgcgatttagccggcggattgagggaaaagaaactgcattgattttttaatgcgggtaaaatttttaaaatgttttgcgggcgggttggcttttagctaagccgcctttgatattgcagattggggcggcatgttttgcgagagtgcgcggatttatgcgcgcgtatgcgaatcttgccgcttaatatttttagttttagcctgcgttgcggcggcggtttccataagaagggcggaatctcgctaatattaaacagcggggcgtggaagatttttagtcctgaaattatttccgaagttggtatttttttgaggtgctttaaatttttctgaatagaaaatagactgaggcggggtttaagaattttattgaaatgggcaataaacaatttcccgcgccttaaatgaaatggctggaaagttgtatttgagcagatgggcggatttcttaatgctttaaagtttttaaaaggtatgcggaatgcggcgcactgagaaaaatattttttcttagattctgtattggcctagccatggataataaacagtgggagcaacacggagttttttgttggcgggagtaaaaaatctttgtaatgaaagaaaatttttcccctcggttatatatatgtgagattttttagagtatgtttgggaacgtgaatatagttgggttagaatacttggttctctgtgcgcatattctgccaaaacattggatgggcgatttaccgtggattgcagaactgcctaaaaaaagcttgaaattttccgccttgccgcttcaataaaccttatgaagtccatgaaacatgtattattatcatttgtagcattagcttttgcagcggcagcctttgcggctccttccaaagaagaccccataataatccaacattctaagctcgacgcaaaacgcttgcagcccggcgcagtgccgagttcaagcgggcagtggacccgcatagagattccgttgtttgcgaaggaaaatcccgacaacaaggcgaacaaccaaaagtggattcgcaatgtggacgtcgatttgatattggtgtacaaggaccagatggcgaccgacaagcgttcgctggacagccttattgtattgcgctcaaaggcgaagttgttcgccttggaaataaacaagaagacgccggtagtgttctatattccttccgaggcgtacgaaatatacaggcttgcggcggatccgtttgcgtggaagatagaggtgtcgataaacggtacgccgatagaattgacgaagcaaaacataaagacaatgctttcgaggaacatttacaagaatgacgatccgaaagcggtgtacgaatcgtttatgaaattggtggagaaatcggccaaggtaaacgacggcgtgctgatgtctttgcctgagtgcccgttcaacgtaaagttgtacgagtatggcaaatcgcagttggtgccgaattacattacgacaaaatagggtcgaggcacagcgcgcaacaatgtgcggtagagtgcgttgcatgcgcgcggtgcaatttgtgcgaagtaaatgcaaaaaatgctttactaagcggctgaaaaggtattagatttattttcattccgaatttttattttacccccgttcacattcagaaatgagttctaaaagcaagcttataataaactgcggagcaacccacgttagcgcgtcggagtttggcgtatccgccggccgtcttgttttggaaagttttcaggtgcaagaactgaaatacgactattccaaccaggaagaatggctatcggaacttgcggcgacgctaaagatgatgagagtatcaggtaaggcgacagtaatagcgccgtcgatgctcctgctcacaaagacaataaaaataccccatgtagacgaagcccgcagggccgaggttatacaatttgaggcggaaaagaatattccgtacccgataaacgaggtttcgtgggattacgaaataatatccgacgacggagtcgaaacggaaatattcctgacctcgatgaaatcgacggctgcggacgatttttgcatggcgctttcgcaagccggcgtaataccagagtcgatagaggcgtcctcaatactcgactacaacgcgtggaagtattgcgggcttgaaaacgacgtaattctcctaaatgtagggtcgcgctttacgaatttgatgatagcgcgcgaggacggagttttcgtgcgaagcatacctgttggaggaaattcgataacgcaggcagttgccgattcgctcggatgcgactttgtgaaagccgaggagctgaagcgcggattttttgcgaatgcgtcgctttcctcgaatgcgggagcggagcactttacaaatgcggcgacgtccgtgatgcgcaggataggagttgagataaagcgctctatagtaaattacaggcgcacttcgcgcgtcgaagccccgaagaaaatatatttgtgcggccgcgggtcgctcttgcccgggtttgccgaatttttggcggaagaccagaagatgagcgtggaatactttgacgctctggcgaatgtatcggtgagtccgcgtgtaaaccaggaattgttgtcgagctgcgcgtcgcaggtgagcgaaataatcggcgaggctgcaaggctggtaattcccggcttgatgagcgtaaatctgctgcccaagcacattgttgaagaaacggcattcgcaaagacgaggccgctgatggtgttgggtgcggcgatattggtggccgcaacattgccgcccatgttcttatttacaaaatcgataagcgagaagactgaagctaccgccaaattccagtcgatgatgctcccgatagaggacagggctgcggagttcaaaaagaacggcgagactgcgaattctttggaggcaaaaataaacggtttggaaggtttggcgaaatcgaaatcgaactggataaatctgtttatagatatagagaagcgtctgatggagcaaaaggacgtctggctcgacaatctgagagtgcaccgcgcagtaaagaacggcgtgcaggagtacaagctcgagttgacgggaaggcttttgataagagacgtggatccggaaaatttggaggcgtacgatacgcagaaggcaatagacagaataacaaagctgctgaattcctttgtaagttccgaatttttgaagtcgtttgagaatgtgaggaccgacccgtcgaatccccgcattttgaagtttgactttactcttgttgtaaaccccgacaagccgatataacggtcaaagaatttgtctgatgaaatactttaagaaataccctatattttttatagcaatgttcgtattgatagcgctgtttatagccggcgctgcgtacgatgtaatgctttataataacgatacggcgtcgcttgggaagctgaatagcgtgatgaggcagtacgacgatgtgcttgcgacagacccgacccagccctcgatagacgcttccgcgaagaacataaaggagcttgaaaagcaccttgccgacttggagaaggacttgacccgcgagagcgagcatatattcaagccgcttacggccgaagaagggttccagttgcgcgagcagttgcgcggtatggtaaactcatggcgcgccgaggcgaagaagcgcgacatatacgtacccgatgaaatggattttggatacaaaaagtatgttgcgccgaccgccgactctccgaaagacgaggcgatgccagcgatatggaaacaggtttgcgttttggactacatcaaccagaaacttttcaattgcaaatctaaagaatccccaatggcgatattgaacgtacagcgcgagatactgcctgaggaaggaataaaagaggaaacaaagacgcgccgagtaagggcgtcagcgcgatcaaagtcgtcggctgcgctgaggggcgacaactttaagatagacgaaaatataaccgctcgcaagcccggcagtttgaatactctggcatacaggtttgtgtttaccgggcatactgatgtgctccgcaggttcttgaaccagttgaaggatttcgacgcgatgctcgtagtaaggagcatagatgtgaaacccgcagatacgtcgctaataatgatggcgaaccctgaggaggcccttgccgaggaaacgtctgatgcggccgatgcatttgcatcgacaggttccgaagatggcggtgaagcgcctgccgcaccggtgatagacgaaaataaagttcctgttgtgacggacaacatttcggaattcacagtggtgatagaatacgtagaagtggtcaaagacactgcaaagccaggtgataaaaaggacgccgacaagaatggcgcagccgataaaaaggcaaaggcggccacaaaaccaaagaaacaataaagaagcggcacagaaatgaaatactacgataagatattttttgtaatcgccgtgatagtggcgggtttgtcttgcggatattattttatgaacgaacccaagggcgaactattggaagcgcgcgtgcaaacattagaaaagaaattgcccgccggcataccgtggaagaagataatagtgcccgaattgaaagtgacgtcgatagaatggcccgaagtcagggcgcaagacgaagccggaaaatggttcttccaagtatttacgccgccccagatatgggttgacaagaagggaaacttcatgaccgagtctccctattacaaggaggtcgcgaggcagtcgtttgcattgaagtatgtaggcgtatccaacgagccgtatccgataaaatacctcggatattttgggacaaaagcggagccgataatccagtttgagaatacggctacgaacctatcattcataggtaaattgaatgaggagataattgcggctgctccgtcaaccggcaaaaaaatcaacctcgggctgactcccaagaaattcgagataaaacgggttaagaacgataaaaataacacaatatcagacgttgtgaccgtagtgttgtacgataaatcccttgggaaggacgtgacgatttactccaataaggagaccgtcatagacgaccgcaggagaatatcgttctctgcacccgatggcagtgtatggcatgtcaaggcgccaggcgaatcgcgcaagattgggacagctacatacaaggttaagtcgatagattttgataaaggcaatgccgtaattgagatgattccggacaataccgatatcgaaccacaaacaatgaacctaagcgcggcgggagtgacacccgtcaaataattgaaaataattctttaaaaaaccccaaaaagtgttaacgtccatttaacaaattataaatacagcgaatatgaaaataaagacaacccaacgaaaagcggcatttgtcgcggcgatattagcttccgccgtgacggcaagctttagctatgccaagccggaccagacccaagagaaaatccgtcttatggttgcggccgtacaggcgcgtgacgcgggcgatcttaaatcttccaagcaatcgcttgaagagcttttgaagattgcgcccaatgacgaaggcgtacagcgtatgcttgccgacgtgaataaagatatagagcgtcaggcaaaaggcgaagcacctgtgcttgttggtgcaaaagccgcgcaagaagaagctggagctaaggatgccgaggttgcaaaggacggcgaagaggccgaagctgcggaaggcgaagcaaaagtcgagcccgtcgatgctgcaatgtccgacgctctgcgcaaacagcagctgcaagttatagcagcatttgatttgatagacgaagcgtacgatctcatggacgacggcaactgggatgaagccgccaagaaattgtcatttgcacaggaaaaacttcccgaagaatcctattcaccgatagccgacgaggctcgttcagagctcaatagggcgaaggctgcaatggcgaagtcccgcgcgaagattgcaatgtctgaaagagacacagccgctgcaaaatcttttgccgccgaatatgccgctgctgaagaaagcaaggacgccggcaatgcgtttgtagaagaggttgaagaattcacagccaatccttacaacaattcgatatccgatataagcccggattacgctactcgccagaacaagattgaaaaccttttggaaaaagggcgcaggcaatatctgtatggcgactatcagggagcgcgcgcgactttccgccagattgaaacgctcgacgccgacaatatacaggcgaaagcgtatcagcgcttgatttctgaaaagcttgccgaccgcggccgcttgacttatctggcaacccgcgaagcgatgatggacgaagtaagcaaggcgtggcagcgcccgcaagtttacaccggcacgacagtcgatagaggcggcgcgagagccgattctgtaatcgacaaaaaactcgccgaaatcatcatcccgaacgtgagcttccccgctccgggcgtgacactcgcccaagcgataaacactctctctatattgtcggttgaatacgataagtcgaacgacgcgaagaagggtgttaacatagttcttttcggcgacaacgcatccgaagcaaagccggtagttctcacactccgcgacctttccctcggtcaaatactcgactgggtcacccagcaagccggtttccaatacgatattgaaaaggatacaatcgtagtccgcaaggcaatggataacagtgtcgcttcgatggacactctcgacttcccgctcccgacttcgactgtcatgcgcatgataggcttcaaggctgctgtcggcgagtccggcgattcggacaatccgttcggcggcggcggcggtggtgctgcggctggtgctggcgacggcaaggaagaggctatcaaaaacttcctcgttaaagccggtgtagagtttggtcccggagcgactgtcgcgtttgacggttcaaaactttgggtcacgaatacgcgccgcaacctcgataaggttcgcaacatactcttgcgttatagcgaaaccaagcaggttgaaatcgaagctaaatttatggaagtcaaccagggcgtcttgaaggaactcggattcaactggaatgtttctaggaagaatgctgatggctcttacagcactctgttctccacagttggaagaaacacaaccggtctgataagcacatataacaatcgtacgcttgccgactctataacaagcgcgagtgccggatctactccgataacaatcttgaagcccgcccttgaggcgacaccagacgttccgaatccgtacactgtcgaacctgttgttccgattttgccttcaactataaatatggcttccggcgcggctcaggctgccaacacagttcttggtgttataaacggctatgatgtaagcttgatagtcaatgctctcgaacagcgccagggttcagacctgctctgcgctccgaaggtgacggttatatccggcagcactgcttcgataacggtttcgcaacgtatgcgttatccggaatcatggggcgacgttcaatctaacgtaggttcttcgtcagtcagcgtcggtgacactcaaacttcttccgctggtgtaactatcacccccggtactcctcaggacttcacttcggttgacgttggtgtgtcgatggaagtaaccccgaatgttgaagaagacgatagcatcaacctcgtactcaatccgaatgtaacagaatttgaagggttcatggaatacggcggcgttgcggtcgctatatcttccggaacaaccgtgacggttccctctggattcattcagccggtgttctcggtcagagaagttaagactactgtgacggtattcgacggcgcgacggttgtaatgggcggtttgactcgtgaagaagtccgcacaatcaacgacagcgttccgattctctccgatatcccgtggattggcagactcttccgctcgaagggtgaatcccgccagaagaggaatctgttgatattcgttactgctaacagaatctcccccggaggcagcgttggccgcgaacagttccaggatatgcgtcccggaagcgtctaccagaatcctgtcatagtttcccctggtggtgcagtgcatcgcgtacttgaagacgaagctactgaaactgtcactcgctaatccagtataataaacctctttaaagtgcccgtttaatcgggcgctttttttttgcttaaacagatgcttaaggttaagaaatttcttaaaagtgcctgtttaatctggctttttttttgtaaaaacagacgagtagtaataggggtctgtattatattcttaggcttattctaatatttttttgcctatatgggtctgtattccagcttttataaaaaatattttcttagcttaataaaaatagggcgtgattttaagcaatttatatttctacgataaatcggaagattctaatggtttgactcatttattttttgattcttggaaagcataatacatcttttacaattcgccttttagtttacttttaaactatattttatttttgcatttgatgagttttttcagggataaagcttcttgcttatagggaaaatcgtcggtagattgattgaatcattctctttttattagaaataattttatattttatgctaagtgccaatgcggcaggcagttaaaataataaagatgtttatcctccgtttaaaaatttttattattgattagttcatttatgggcgtggatattctgccaagcccgctttgtggagttataattgcacgtttcttttcaaacttaatgggaatatttagtttcaaagagttcgcgcaggggtggaagaaacttttagaacttgctgtaaacttttatgtttaaattaaacaaaaaaaattacctatataaaaaattcagtccttcccaaacagtcatgctctaagatattaattgcttcgataaagctgcaaacattctttgcttcgcaaaaactattattttatttccgagacgacgaggcttgctccgcacgttttttgaacgcgacattttatatttcctgaccgatatgaatcatacatagtctatggtgatattatttcattagaactgtaattttctaaaagagaaaagaaaatttacgtcctgactcaacataataaatgcggcagatgatacgcataaaaaatatgcgcgtcttgcgttttcgccgaggcaatatctgttgcgtatgcaggttaaaaatatactaagctgttcgtaaaatcgctaataaaacaagatatttctaattacaggctttataagataatattatatagctttgcaaaaggcgtcaaatatactggaaatacacagctctgcgccgtttagcgccaagtgaaagccaatttacattgcatagaattgatagtgcccatgcttgcagataatcttaatgaagtacaaaaaagccctccgaatgagaacggaaggcttttatttttgcagtgccagttcgcttgttgcttacaagtgcatacagaataaactaaaaatttcttttttttgcaaaccgcttaaattcaggccttgggactatttgccggccgtgacatttacgcattcgatatttaacacctttgcgattttttgtatctcatcagcgtggtgcccaataccgagtgcaaagtggtgggttggcccttccatgcaccagctccgcaagaatgtgcgaatatcaggcttaaacttagcgtgggtgtttgtattccccgtgggcggaatggctcccgcaacagactctccttcagccactataaatttaaattttccgtcggcttttacgcctattgagagtatggtaatgggcccttccttaatcttgaactcaactcccgcgcccgctccaggcttgccgtggtatttttttaatgacctcaacacgggcttgccgtcggcaatatttagatggtgggggccgtcatgcccgacaagaactgtccctttgttgaagtctatcgggtgaaattcggcaaagcttccgcctatttcgagcctgtccattatcatcattgcaatgcaatttttgatgtcaaattccccgcacattgggaatccggcggcggtgagaagcgaattgcccactatcaggtttgtgacgagctcgcgcattttggagccgggaagggcttcgtaatagtatgcgagcccgtcgagcttcctgtcggcagcgaacttttcaagggcaacagccgccctcgccgcgacatcgagatccttgtctgtaagcttttgggtgattgggtctgatacgggatccggggtgtcgaaaaatgagagaatccgctttttcatagcttcgactgcgtctttatcgtcggcgagataatgctttaaaatttcgtcgggctcgcaaactgcgacatggcagccgaatgtggcggcgactgctgttgggtcggtctgcatatcgtacatcgcttccaatacgtgacccattaaccctatgcgggcatagcgcaagtcgtgcaaaacctttgcaacagagcaccattttgaaatttccgcgtctgcgagtttatcgccctcgcgcattcctattataatatcgtccacggggtttcccatgcgcacggcgacgtccgcaaattcaggaactgcgcacaaatcgtcgttgcacagctgtataaatgtcgtcgctttttcgtacggcattgcgctttgcggctgcagggccaccaaaactatcggaatggtaagttcttttgccattgccgcaaaagtcgccgaggttgcgtaagtcaccatatcgacaaagagaaggtcgaggttcgaccgcttgatttcgtcgagtgtcttgcgcgcgctttcagcgttatcgacaagcccgaaagaaaatgtttttacgccgttggatttgattttattttcaaacgtatcgagttttttgagcattacgtctttaaggccttcaaattgtttccaatatgtatcgagcccgacgccgactatcccgacatttgcagtcagcggctttcttcgttctaccgtgcttttgggttctgccgacgccacgacgcaaagggcgcatgcgcaaaatatgagtatgattcttttcattgcatttatgaatattgttcgtttctttccttagagttaacgcactaactttttgcggtcaatatttttcttccaatgatgtatgcaaaagcgcgggaatttttgttaacgcctctaaaaataccggtatttttcctcgcggaattttcttatgggggaactcttgaaatgatatcgaggcttgcggataaaaaatctctttatagaagtcggtatgccaagctgaacgtttatattgtaaatttgcgcgccctacacagcgcaaaagtttttgccggacacaataaaaatttcacggcgcataacggtatgcaaaaatacagtgattatgcctttttatatggaaagtttattgttttgcggaacttttttacttccacaataagcgcgtatatgttaacctaaaaaagttcttagcataaaatacttagggggatttatatatgagaaaattatttgcattcgcgtttttgtccattctttcggccgcagctttcgggagagcgtactatatatcctcatcgggcggcgatgactctaacgatggttcgcaggcggcgccgctaaaaacaatcgccgccgccccaaaggaaaattccgagatatacttaaagcgcggtgacgttttttacgggcccattaccaagtttaaaaactgcaaaatatccgcgtacggcgaaggcccaatgcctgtcataagcggctttaaaatcgtaaaaaatcccgacgcatgggagcgccagccaaatgatgtatggcgcatagacctcacaaaaccagagaattttgacggttattttgcggagggaaaagccaataatattggagccgtttacgatatgtcttccgacaagctttatgggcacctcgtatgcaggtacaaccagctcaactcatacggcgacttctgggtatcgggagatgtcaaccgcgtaaatgttcaagataagaaggaaaatttccgctatctttacttccgctcaaaaggcaatccttcgtcgggaggggcgaagattgcattctcaacatacggcacgggcgtcacaaacctcgagaactgcgaagtggactccgttgcggtgacggggtttggcgtccacggcattgcgagggcatggaactgcaaatttaaaaatatgcgcgtagatataataggcgggtctgtccagcttgggtatgcccattgggttcgcctcggaaacggctttgagttttgggtgtcggacaagcggccgtgctcaaacaatcttgtggagggctgcacggtgtcgagaacatacgactgcggctcgaccatacagggaatcgcaaacggcgacatgcttatcgaaaacgtgaaattcatcggcaacacttttatacattgccgccaggcgtttgagcattttattcgctccaaagagggaaccgcaaaatattccgactgcgaattttcttcaaacaggtgcttcgaaatgggcgaaaacgaattctcaacccccgagacgcgcgatgccgcattgctttcttacgagcgcaaaccaataacaggcctgtcgataaataaaaatttcttctgggggtcgagcgcatattgcaaccagtactgcacggcggagatgtcggagaatactttttacgtatttaaggaccaatatctgctctttaacagatggcagccgcaggacgctgtattcgcggacgaagaaggtgggattgataaaatgcgcaaggtgctcgggaacgaatccgataaaatattcatagtcgataggggcgactctcagcttaggtccaaaataatatctgaacattttaaaggtgctgaagacgacataaaaaggctctgcaaatagcgcgccgctgtctgccgtttcgtcgggaggttgttctgatgttgcgcgcaaagtctgcgtcgggtaaaagacctcctgcatctttccaagtaaaaaactttcgcgttcttttaatcgtaggttagtctctaaatttaaaaatattttaattgctatgaataaactcttaatagttttattttcagccgttttggctctgtgcgcccacgcgggcgttgcaggaaagttttttgcgtaccgttctttctggcctgaaaccgaggcgatgaagcagtttgccgacataggtgtcaatctttacgccgttatgccgtcgaactcttttaacagcctcggggaaccctattgtaaatttccccccttctgggtgtgggacgagacgtacctttgggaaaatgttgacgcgcagttcgacgtcgtcctaaaagccaacccgaacgcccgtttcatttgcatggtagatataaacagccccttgtggctcgtccgcaggctcgataagaaatatggttttggcggcgacagctaccagcatatttcaaatgcgctgtgtattccggaatggaaaaacatcacgaaaaaaatgctccgcgcctacgtgctgcacatggaggaaaagtacggagacaggatagtgtcgtacatagtggccggcggtggcacgagcgaatggtactgcaactctcagggatacgcgaatgtcccaaagcgcaatgcatggtatagatggctgaataaaaacggttttccaaagtgggaagttcccagccgcgagcgcatggactcccccgcaatcgacggaaattacttcgaccctaagacccagcgcgcggaagccgagtattcgagatttctcgaagagctgatttccgacggagtcgatgaatttctcggcgaggtaaaaaaaatagtgggcgataaaaagcaggttggcgcattttgcggatttataccattgcgcctgtacggcaagctggacaattcgagaacgttcgcgtcgaagtcggttgacttcgttggcagccccggcggatattttaaccgcgacatagggcttggcggcggaatatcgtcgccgcggaagtcggttgacctttacggcaagcgctggtttcaggaaatagaccatagaacgcacacgtacaacggtaagctttccccatatgttcaaatagggggaatacacgcatcgggcgcaaaaaaccaagccgagacaaacgcgattttaaagagggagttttctttggcggcggtaatggggaattccctttggtgctttgacatgtggggcgggatttttaagactcccgagacaatggagctcgtaggcaaatcctacgaaatatggaaaaagtacaaggacgccccgctcgactaccgcgcggagatagtaatggtaatcgatccggacagcgctttttatatgaaaaatcccttgaaaatcgagcgcatgattaaagcgctttattcatgcggagctccgtttgattatattcttttcgacgacattgaaaatctggatttctcaaaatataaaatggcagtcttcccgtggggatattcaataaccccagaaaagcggaagatattggaaaatcgagtgatgaattcgggtaggactgtcgtgtttatggacgccgcgggaatgtcggacggcgcgcgcgcagaccccgcaaatgtcgagaagctaacgggctttaagtacaagaccaaaggtgtgtccgaaaaggacatgggcggctggaaaagcgtatatggcggaagtattacggactttgacaagaattccataatgagattggcccgcgaagccggtgtccatatatatacggacgagcccttgcccgtgtactcaaacggaaaacttgttgcagtgcatgtgaaggagggcggactcaaaaaagtgcacctgccaaagaaagccggaatagcaaaagagttgtatagcggtaagactgttgttgaaaatgccgattcgttcgaatacgacttcgcctctccggacacggctttgtttgagatttcggattaaaaaatatcctcgcgcttaatctgaaatggctctgccggcttacgcctgctcgaatttcagtttgggcgcgcgctttttaacagtggtggctcttttgcatagttgcgctaaaatttttacttctgcgcgctttgacgcaagatccgataaaatctatttgcgcgcaatatgttttgcaatgccaatgtattttcctcgcgctcttgcaaattaaaataaatggaaaattcgctccgcttttgcaaacataggcggctgaacttaattgaaaaaattgtttttaggcggtcgtctgccgcgcgcggaaatcgggcgataaaaaacggcgcgctcgagcctgcgcgccgcatattttaaaggttttttaggcttcaattagatgacgttgattccggatttgcgcagcttgtcgagaaagtcggggtcggcggcagaatcggttattacagtgtcgatagagtttatgtcgcagaaaaaacgcaggctctgaacgccgaattttgaggagtcgcagaggaggattttttcgcggcagattgacagcgaattttctttgaactctgcgtgtatttcggctacttcgcttgcgccgcgctcgagatccagcccgttgcatgaaaagaacgccttgtcaatcgagaagcgcttcatgagcgaaagggcggatatgccgcagtagctgtggcttaccctgtcgagctttccgccggttgtgattacgtcgatattgtccttcgacataagcggaactacgcagtcgtgggcgtttgttatgacggttatttttatgtctggcagcgattcagcaaaagttaacactgtggagcttgcatcgagaaatatcgtgtccgatggcgataccagccctatggctttttttgctatttcctgttttgcggcgcggttttcgtttaggcgcttttgcaggggcagctctgccgaacgcttctcgattctaagcgccccgccgtgggttctgataagcttgttttcagcgtcgagagtttcgaggtctctgcgtatggtttcgtcggtgacgtcaaagtatttggcaagctcgatagttctaaggctgggggaattctcgagcatattgagaatgagtctttgtctttgtcgcgctaacatagtaataaatatttgtcgatttttaataacatttagtcaagacaattctggcctgaacaccctgatgctatgcgctttgcatgcgatatttgggcttttttgcgaattaaaacgcgggaaaaatgtacaaaaatgtattttttagccttttattgaaaattttagcccaaaaaatttaaataagtctcagaaaaatgtacaaaaatgtaataaatgcccgtttttaaggaaagtttgttgacgcaaaagcagttttttgcaatttttgcagcattgtttttttatttaagtcaaccaaaaggaaatatatcatgaataagtatgtgcaaaaagttctcggcgaactgaaagccaagcagccctgggaaaaagaattcctccaagcggcggaagaagttctttcgtctctgactgccgttctcgacgccgatccggtttacgaacagaataaaattctcgaaagaatggtcgttcccgaaagagtaatactcttccaagttccgtgggcggacgacaagggtgagatacatgtaaaccaaggctaccgcgtacaattcaatagcgccataggcccttacaagggcggtctgcgcttccacccgtctgtaaacctcggcattctcaaattcctcggttttgaacaggtatttaagaactccctcacgaccctgcccatgggcggcggcaaaggcggttccgacttcgacccgaagggaaaaagcgacaacgaagtccgcaacttctgcaactcctttatgcgcgagctctatcgccacatcggccccaataccgacgttcccgccggcgacatcggcgtgggcggccgcgaaataggctacctcttcggacaatacaagcgctgcaagaattcttatgacagcgttctcacgggcaagggcctcgaatggggcggaagcttgattcgtcccgaagcgactggctacggcaacgtatacttcgcccaggaaatgctcgcgacaaagggcgactcggtcgaaggcaaaaatgttctcgtatccggctccggaaatgttgcgcaatacactgtcgaaaagctcattcagctcggcgcaaaaccgctttcgatgtccgactccaacggcacggttatcgaccccgacggcttcgacgcggaaaagctcgcatacgttatggatcttaaaaacgtcaagagaggccgcatgagcgaatacgtcaagaaatacccgaccgccaagtactacgaaggaaaacgtccgtggggattggtgaaggccgagattgctcttccgtccgcgacccagaacgaaatcgacggcgacaacgcaaaggctcttatcgaaaacggctgcatatgcgtttccgaaggcgcgaatatgccttcaacccccgaagccatcgaaacgtacatgcaggcgggcattctctacgctcccggcaaggcgtccaatgcgggcggtgttgcgacgagcggccttgaaatgtcgcagaacgctatacgcttgagctggactcgcgaagaggttgacgaaaagctccacaacatcatgaggagcatccacaagaacgccctcgaagcggcagccgaatacggaacgcccggaaactatatgaacggcgccaacattgccggattcaagaaggttgccgcggcgatgctcgcgcagggcttctaataaaattctttaacagccgctttgcgcgggaacgcatgcggctttacaaggcgcttgtcccactcttgggacggcgcttttttttgtgttaaaaaagtttagcgcgactcaaaaaaaggagttcggcataaaattaaaataataaaagcggtggattagaaaaagcgtatgccgtttttatttggagtgcaggcggatttttttagttttcctgcgtgggggaaatgatttgatgatttgtgtagaatctactttcgattgggaggcttgcgcttttttataaaaaattttgcacagttttttgcgagtttttcaacgcgccgccgattcttggcgtgaatgcgttgttcttgcgcgcggggtaaatctgcggcggctgtgggaatgagtgttctttgcggtgaaaaaattttctttttgttttgcgcgacaaaaaaatctatctctctgccgatttcctaaaagttttattttattgcaaaacggtgggcttttagcgcgcaaaagcttttttgttatgcggcataaaatagattttttttgggtgggagtgcgggaaaatcttttggatataaagtttatttttaaaataaactgggcaaagggcgtgagcgcgtaaaatatcagccgcagccgcaaataataatgttgcgaatgcggaagcgatgtgaaagactctctaaataatttttcgcataatgagccaagaaataaatacaaaagaagacaactcgcacgatttgtttgcggtaagaaaaggcaagctcgacgcaatgcgcgcgcttgggtacgatcccttccgccagaattggaaacaaacccatacgtcaaaagaggcggtggagtcgttcgacgaatccacgcccgaaggcgaaaattcggagcacgaagtaagcgttgccggaagggttatggttttccgcctcatgggaaaagcgagttttgttaagataaaggacagagacggcgttatacagctgtactttgcgcgcgacggtctccccgaaggagtttacaacgactggttcaaaaaatttctcgacataggcgacataatcggcgccaagggaaaactttttaagacaaagaccggcgagataaccgtgcgcgtaaacgactttaagatactcgcaaagagcctgcgcccgttgcctgaaaaatggcacggactcaccgacagcgagcagatataccgccaaagatacctcgatttgattgtcaacgacgattcgaggcgcagatttatgttgcgcacgcggattcagcgccagatacgcgagttcttctggtcgaggggctttgtggaggttgagacgcccgtgctgcacaatgtcgcaggcggcgccgccgcgcgcccgttcataacgcatatgaacgcgctcgaccgcgatttctacttgcgcatagcgcttgaactctacctgaaaagaatgcttgtcggagggttcgacaaagtgtttgaaatgggcagggtattccgcaacgaggggctcgaccgcaggcataatcctgagtttaccatgcttgaagtttaccaggcgtattccgaccacatcggaatgatggagcttatacgctcgctgatatcctcaatatgcgagaacgtgctcggcacgacagtcataaaccgcgccgacggcggaacaatagatctcggcggagaatggcggaaggcgacttatatggagcttgtctgcgaggcttccggcgcaccggattggttcgagctctcaaaagagcagaaggttgcaatagcgacgaaattgggagtggaaaccgacgtttcaaaagaacaccacgagataaccgacgatctctacgggcgccttgtggagccgaatcttatccagcccacttttgtcatgaacgtcccccgcgaactttgcccgctcgccaaaataaaccagcaggacggaagggtattggacgtctttgaactctgcataaacgggcaggaaatagcgcccgcctactccgagcagaacgatccgctaatccagcgcgaaatgttcgaggcgcaggtcggcgaggagcgccaaaagctggacgaggacttcctcacggcgctcgaatacggaatgccccctgccggcggaatgggcataggcatagacaggctcataatactcctcaccggcgccgccaacataagagacacgatattgttcccgtctttgaagccggaataagtcgatgaagtggtggctttatatcgcgctaaaacagctatttcccactgggaaagtagtgtcgttttttgcggcggtgtcgctgcttggtgtggcgctcggtgtgcttgggcttttcggcacgcagagcgtaatgaacggtttccattccgagatatcgctcaaattgcgcgatactacgggcgatgtaatcatgcgcaattacgggcgcccgatgcactcgcttgaagccttgaaagagcggctaaaatccatgccggaggtcgagagcgtggagtttgtggcgcaggggcctgtgatgatggtggtaaacaacgtcccggtgtttccaatgcttcgcagctacgacacaataagcggagaatgcgctttgcctatacgggaaaaaaaattcgtcagaatgggctcgatagacgat

SEQ ID NO: 917 - DNA, 28204 bp, Unknown
  16S sequences of unknown bacteria
ggaaagtatgatgttcatagtgaggcgttctgagcttgcaaagccgcttcacgcctggctttttcttacggtgaatggcagttgcatttactttgcaaatttacgaaaacttttctgtccgccatctcccgcgtctccgcggcggttcatccgtctgaaacaaccggttccggaacgcttcgtctgaatccgaaaccataactttacaatgctttcataatttgttgttggaatcttcttcctggtatgatataatgatgttgtacagatactgtttcgtgtatgaaatggcgtccttccgctcccggaaggtctgatgttcaactcataaaggagagatacaaatgaaaaagtgcaagaaatactgcgaagagggatgcggcgcccttaagctcgccctcatcatcaccggctccatcgtcgccgccgccggaatcatcctgcttctgctgaagctcttcaagcgtaagcacgtgaagctgccctgcgactgctgctgcgacgaccacgaatccgacgactcgtgggacatcgacgaggatgttctgaacgagctcgagctcgacgactccgacgaggacgagaccaaaggctgcgacgccgaggcagaagacaccgaagaggaagtcgaggaagcatccgaggacgcgaaaaagtccgatgacacaaccgatacctccgacgccgaataatcagtaaccaataccgcataaccgccgtgtacgccagtaggagcatcacggcggttctttttttcaaccggaacttccggcaatttcgcggtccctcttgacaccggggattttttttgctataatcaatatgtcaaacgaccaacaacaccgcgtgacgactgcgcgcggcacaaagcggaggaaacaatgcgtgagacaaagttgcttttctgcggagacgtgtgcttccggcaccaaaaaaacagaggtccgggtcacgccgcctccatactgtccgaacttgaaactgtgctcgacagcgcggacaaggtcattataaatctcgaaacaccgctcgcgccggacggtgtcggcgcgccgataaccaagagcggaccggctcttatatccgacccgtcatgggtggattttctcgaagaagccggatgcggcctcgcggtgatggcgaacaatcacaccggcgactacggagaagacgcgctctcatacaccacagagctgctcaccggacactcgataccatatatcggcgcgggatctgatatcgacgaagcgtactcggcatacagattcacctcgaacggcacaagcgtgtcgatcatcgccgtctgcgagaacgaattcggcaccgccggtaagagctccgccggcaccgccggttacgccccggaaagaatcggctcgaagatcgccgaggaaaaactcgtatccgacaaggtcatcgtcgtcttccacggcggctgtgaaaacaatcccgttccgtcgcccgggtgcagggcacggtacaggaacctcgtcagactcggcgcggacgccgtcatcgccggacacacacactgtattcagggctacgaatactttcaaggctgtcctattgtctacagcatgggaaacttcctcttcaagtggagcagcatcgaggaagaaccgtggtaccgcgggtatatcgctgaactttcgatatgtgacaggctgactgtccgcccgataccgtacagattcgatacggacgggtctaaaatccaccctctcgccggagatgagctcgaaaaaacgctcgcgtacatcgaaaagctctcgctgctgattcccgacacagacgagcttcagcggctctatgacggctggtgtacgatctccgggctctcatatataaagtgcctcgtcgcgaaggacgaatacttttccgctcagcgcgcgccggacgagatcgtccatctgaagaaccttctctcctgcgagtcgcacaacgagctcatgcgccgcacccttgagctcgcgttcacaggcaagctcggcgaggcaaaggaaattgccgccgagatacgcgaactgcaaaaaatcccgacataaaggaattttatcatggaacactccggaatcagacagcagatagaaaacaagctcgcagcggcaagagaaaccgccctgaacctcgcgggcacgctcacggacagaaccagtcttctcgattacgcttcactcgtcagaaccgtgaacggtattgaaatatggaccgaagccctgagacgcgccgtctcggagcatgagataatcgtgatacccccgcgtgatgaaccgtactacatagacggcactgtcgtcctgccgtccgaccggcgtatcgaggcttcgggctcgacgctgaagctcacgcccgactgtgatgttctcatgttcatcacggcgagcgccgcggatggaacccatgcgccgatcgaccggaatctgaacccgcccgtacacaacatatcgatacacggcggaaaattcgaggaatcccgcacccgccgcggcggctacggcacatccggaaagaacgaccaggaacgcagtatgcacggtatttcgactctgttctatctcgggaacgccgaaaatatcatgatgaccgacgtaacaatcgctcacaccgcgggcttcgcggtccagaccggaaacgtcagcggcgccatcttcgagaacatccgcttcgagcactgctacgcggacggactgcacgtcaacgggaacaccgaaaaccttctctgccggaacatctccggacaggtcggggacgatctcgtcgcgctcaacgcctacgactggcagaactcttctgtcaacttcgggccgatcgacaccgtcctctgcgaaaacctcgaactctccgccgacagcccgtacaaagctatacggattgaacccggaagatactggtacgacgacggcgtgggcgtagactgcgcgctgaaaaacgccattctgcgcgatatacgcggaatacgcaccttcaaactctactaccagaccccgccgtatcgtatcggcggcaagccggagcgcggagacgtcggcagcgcggacaacctgttcttcgaggacatcacaattgatctgtccgaaccgatcgacggcttcgatgtctacaaaaattccgacccggtgcgcggctgcttcgcggcgttcgagctcggcgcggacatcggatatatgaggctcgagaacatccggataaatctatataaagacaaattcccctactcctgcctcgtctgctgcggtccgaaatccgtactcaaaggcggcaccgaaatattcgacccgtatctctcaagccgcgtccgccgtctcgacctcaaagcaataaccgtgaacgccgtccccgcggaaaccgccgaaggtctcacaagagaaatcgtcttcgacgatgtcgaccacgacgataactcaaccgcccgcggcgtattcgaccaaatcaaatttgaaaaataaataaagaggtaaacccaaatgaccgaagaagaaaaactattcgcgggccagctcttctgcgccggcgatcccgatctcaaagcaatcaaactccgctcccacaaactctgccacgaatacagcctcacctacgaagacgaaaccgaaaaacgcgccagactcctctccgaaatcgtaggcgaactcggcgaaggttcattcatgcagggacccatctacttccactacggcgtccacaccaaaatcggcaaacgcttcttcgccaactacgacctcaccgtccaggacgacgccctcgtaaccataggcgacgactgcgccttcggacccaaagtcacaatagtcaccccactccaccccatgctcccgaacgaacgccgcttcatgaaaaacgaaaacggcgaagtcaaacgcctatgctacgccaaacccgttaaaatcggcaacgactgctggctcggcgcccgcgtcaccgtctgctccggcgtcaccataggcgacggctgcgtaatcggcgccggaagcgttgtagtacgcgacatcccaccgcacaccttcgccgcaggaaacccctgccgcgtcatacgccaactcaccgataaggacagcatcagacacaaacccgacgtcctcgccgacaactcaatcattgaggacgaaaactacgggaaagactcatgcagcctctatgatatgaaaaaataaatccaaagcttgcaggggagggaaaggactttgaaaagtcctttccctcccctgcacccctccctatctcaaactttatacaaaagacaggactgaagattactccacagccctgtcaacttctttatataacgccgagacggatcttgtccgctatcatcgctatgaactccgaattcgtcggctttccgcgctggcggcttatcgtatagccgaaataaccgttcagggtgtctacatctcccctgtcccacgccacctcgatcgcgtgccgtatcgcccgctccacgcgcgacgtcgtcgtcccgaagctcttcgccaccgccggatacaacgtcttcgtcacgtaattgataatatcctgatcctccacagtcagcattatcgccttcctcagatacccataccccttgatatgcgccggaatgccgatattatgcagtatcctcgatatcctcgcctccggcggctcattctcgtccgcccccttcggtctcgccgacatgctctcactacgcgacgcctcacgcatctcctccgccgtactgaacaccgccgcgcacagccccgccgtatcgtacggacgaatcatataatccgcgttatcaagcttgcaaacctcacgaagcagactctcattgtcaacgctccctatgtaaatgaaccggggagccctcgtcccgctctgctccgcgcggcggttctcactgaaaatgagctgtatgccctctcccccgtcaagcatcgcgtcgcagataacaagcccgcagcgcgacatccttatcgtgctctccgcctccacgcggtgcgccgcctcatagacattctggaaccccgttttagtcagggtctccacaacgttttccctctcctgtttgtcactcatacacacaagtatacgtatcgacgtatccatatcattatgccagcctttctttaattaatccggtaaggtccgcacctcaccgccaagcgctcttctttcggcgttatacggtttaatctttcctcttccggttcggtgttactattttaccatatattaccatgtatgtcaagtggtattaatgccaaatattggtatttatttttgtgcattatcactaccgtttcccgttttgtgtcacaacgcggcgtattgcgtcaccttcggcacaaaatttttcaggcacggcaccgtttttcattaaatgtcatcccggcgcgacagccatttttcgcggcacggagcgacaaatttcacacgggtacttgacaaacagactttattatggtacaatttccctgtgtgggccggaggaatgggtttccgccggtcaatcccgaccaaaataaaggagaaaagggtgctcccctgatcggagacccaaaccggaaaaatgaaaacttacagctataaggactccccgctcgaaatgcacggactgccgttcttctcagaaaaccatatcatcgaacgcgtcccatcggaggtccgcgaaaaggtcccgtcgctcgccttcctcggcagacgccccgccggagcgagactctgcttccggacgaactcaaagaatctccgcgtgaagatgacactcggaaccctctcgcccgacatcggaatgtcgctcttcgcctgccagtccagcgacgtcatgatcggggaaagaagccgcgcgcgcttcgccggtcttgtcacccctccggattacgacacgaaggtcgccgaaaagaccttcggcaagagcggtgagatggaggacataacgatcttcctcccccgtaacgagatcgtcgaggacctcgaaatttcggtcgacgacgacgcgtcagtcgaggctccgacgccctacagatacggacctatgctctgctacggctcgtccataaccgagggcggttgctgctgccgcgtcacgaacgtctacagcgcgctcatctcgaatcacctcgatatcgactacataaactatggcttttcgggcagcgcgagaggtgagcttgaaatcgcggacctcataaaccgcatcccgatgaccctcttcatctacgactacgaccacaacgccccggacgcggagcacctcgcgaagacccacgagccgttcttccgccgcatacgtgagaagaacccgaccctgccggtgatcatcctgacaaagcccgacttcgactacgacccggcaaacgccaagcgccgcgacataatccgcgcgacctacgagcacgcgctcgccgacggcgacaacaacgtctggttcatcgacggcgagagcttcttcggcgacaccgaccggcacgcctgcacctgtgactgctgccacccgaacgacctcggcttctaccgcatggcggcgtgcatcgaacctgtcgtaaagcatattcttgagaccaggtaaacactggtttaaggttgttttcgcagaaaaagcccataaattcaagccttttttctgcggaaacccgaattattcagtgttaccccagatataactgatgagcttaatttaagaaaggataaaaatcatggaatttttcagatcggcaaaaccgatattcattaaggacaagagtcttgagatgaactttcaggcgggattcgtctgcgagttcgacgccgaggcgggaaagaagtacgccctctcgtcgacaggctcaaccttctaccgcgtgacgctgaacggcaagtttctccactacggtccggcgagacctccgcacggatatctccgcgtcgacgagataacgcttccgactgttcccggcaggaacatactcacctttgaagtcgccggatacaactgcccgacattctacacgctcgacgttgtctccttccttcaggctgagatcaggtgcggcgacgaggtcgtcgcgtacaccgggcacgacttcaagggtatatcgctgaattccctcagagagcagatcgtcccgagatacagctaccagcgcgcgttcaccgaggtctggtacatggactccccggcagcggattggcagaacggtgacttcaagggcgaggcgcttgaaatcatcgacctcggcggccgtgagtatctcccgagagagttcaggatacccgaatacaagatcaacgaccgtgtgtccttcgtccgctccggaagcttcgtatcgaacggcgtcaccgagcatcagctctgccgcaacaacactccctcagcagacgtgaagtgctttaactattcctcctgcccgaacgacgtcctcaccgagaccgacgtcacgttcagagcggacgattcccgtgagctctccgccggacgtttcgcggagtattccttcccgggcatcgacaccggattcatcagaaccgagctcaccgtcaccgaggacgcggttatccacgtgatattctccgaaaagagaaacgatgaaaagatcgactacggaagcggcgccagcgatgtactgaacgtcataaaataccgtctccccgccgggaagcacgctctcgagtccttcgagtgctactccttcatgcatgtcggcgtcatggtcaactccggcaagattgagaatctgaagttctctgtccgcgagtactgctaccccgtgaagccgctcacgctgaagaccggggacgagatcctcgacaagatactgcacgcgacctacgaagggttccgtcagaacaccgtcgactgctacatggactgcccgggcagagagcgcggcggatggctctgcgacagctatttcaccggtaagacctcgcttctttatacaggcgacgtctcctgcgagaaggcgtttctcgacaacttccgcctcgcgaagttcccgaagatatccgatggcgcgcccgcggagctgccggaaggtctcctcccgatgtgctaccccggcgacaacctctggacctcatccattcctcaatggacgatgtggtacgtcatggagctcggcgaatacgtcaagcgcgcggcgtcgctcggaatcaaagacgccggtgagccgttccgcgagctcgtcgacaaaatactcgggttcttctccggatacgagaactccgacggactgctcgaaaagctcccgtactggaacttcgtcgagtggacccgcgctaacaactgggtgcaggatgtgaactacccgacgaatatgctctacagcgccgttctcgacaccgccgcggagctgtatgacagacctgagctctgtgagaagagcgcaaagataagacgcgaggttctccgccagtcctttgacggcaagtacttccgcgaccacgcgaagaggcgtgaaaacggcacgctcgaggttctctccgaccgctccgcgatctgccagcatgaggcggtgctcttcggggtcgccgaccttgaaaagccggagttcgccgttctgaaggagagcatcatctcgcgcttcggcgtgaacggcgactcatccggtcttccggaagacttcgagccgctcgacctgttcatcggcttcgccatccgcgtcctcgtcatgcagaagctcggactgtaccgtcagaatctcgaggaaataaaggctctctacggcagcatggcgctgaagaccggcactatctgggagcaccgcgcgggctacgcaagcctaaaccacggcttcggcggattcatctcgaccgtgatactcgacactatgcgtgagctcagaaagtaacactcatcactgaaaaaagtccccgcccaccgtctgtggtccgcggggactttccgcatgtcggtcaatctgtgtcagcgttttccgtgcccgccgaaatacgcgtcggtgccagtctttatctcacgcgtgtacatcatgacgcagcccatgttcagaatggtcataaggctgacgaaaaggtcggtgaactgccatacagcctctccggacagcgtcccggtgacagccgcggcggcgaagataaacggatataccttcccggcgtgccggagaccgaggtacgcgatgctctcgctcccgtaatagtaccagcatatcatcgtgcagaacgcgaagatgatgaccgacaccgagagcgcccggtccgaaaaaggtatgaacatcccgaaagccccgagcgccgtctccatcccgtcgacgccgaccgagagccccttttccgcgccgatcagcacgacgagcgcggtcatggtgcagatgacaagcgtgtcgaccgcgacctcgagcataccgaacacgccctgcacggcgggacttttcacctcggctccggagtgcgcgatcggagccgttccgcaccccgcctcgttcgagactatcccgcgcgtcacaccgaccgacaccacccttgacagcgtgaagccgaatattccgccgcccgccgcggatatgtcagccgcccccgcgaagatcttcccgaagaccataccgagaagcgggatattaccgaatataatatataatgacattaaaatatataatccgcataccgccgggatcagcttcgccgaaatatccgcgatcctcttcaatccgccgagaatgacggcaagaaccggcagagccacaatcactccgcatacgactgtcggcagtccggtcagtcttgtcagcgccgacgccgcagcctcagcctgcaccgcgctgcccatagagagagacgtcgcgagacacagcgcggcgaacagcccggcggaaaagcccgaccatttccgccgcgtgtccgtgatatagaagaacgccccgccgtgccagccatcctccttcagccgcctgtgcccgagggcgagcacggtctccgcgtactttatcggcatcgccgccagcgccgagacccacatccagaatatcgccccggcgccgccgatataaatagcggacgccactccggcgatattcccgacgccgagagtccccgcgagcgcgacgcacatcgcctttgccggcgacattccgtcgactccgccgctcctcagcgccgtgagcgttctcctaggatggacaatggcgaacggtccgagcctcgcgaagagaaccaccccgcagacaaatatgaccgccgcgagccccggaccggacacgcaggaatttatatactcaagcacatcagaaagcatctcacgtctccttttctcatctcaaccgatcatatgctaaaagccagaattttagcactcccgggacaagccctcaccggtcgggtggggagtgcttatgcccgtcggggcgtgtctatggcattcttgtattcatattgttaatattatgtaaactgttgggcgaagtacttgattttttcgctcgatgagagtacaatatagaatgtaagttagcactcaaccagaatgagtgctaacgtaattaaaattgaaactcaatgttgtgctccacccggacggtcgtttacggatcgtcggaaggcggcatgacgaatataattattcgggaggaatccatcatgacaatcaaaccgcttggcgaccgtgtcgtcgtcaaaatgactgaagctgaagaaacaaccaagagcgggatcattctcgccggcgccgctaaggaaaagccgcaggtcgccgaagtcgtcgctgtgggtcccggcggactcgttgacggcaaggaagtcaagatgaccgtcgaagtcggacagaaggtcatcacctcgaagtactctggcaccgaagtaaagtgcgacggcgaagagtacatcatcgtccgccagagcgacattctcgctgtcgttgaataatcacgacggcataccttatataaaaggagataattattatggctaagaatataatttatggcattgaagcaagaaacgcgcttctcgccggtgtggacaagctcgccaacaccgttaagatcaccctcggaccgaagggcagaaacgttgtcctcgacaagaagtacggcgctccgctgatcaccaacgacggtgtcaccatcgcgaaggagatcgagcttgaggacgccgctgagaacatgggcgctcagctcgtaaaggaagtcgcttccaagaccaacgacgccgcgggcgacggtaccacgaccgctacccttctcgctcaggctttcatcaccgagggcatgaagaacgtttcggcgggcgctaacccgatcgtcatccgcaagggcatccagaaggcagtcgacaaggctgtcgagaccctgaagagccattcgaagaaggtcaacggctccgctgatatcgcccgcgtcggcaccatttccgcaggcgacgaagtcatcggcaacctgatcgccgacgctatggagaaggtcacctccgacggcgtcatcaccgttgaggagtccaagtccgccgagacctactgcgaggttgtcgaaggcatgcagttcgaccgcggctatctgtctccttacatggctaccgataccgacaagatggaagccgtcctcgacgacgcttacatcctcatcaccgacaagaagatctcgaacatccaggagatcctcccgcttcttgagcagatcgtccagcagggcaagaagctcctcatcatcgctgaggacgtcgaaggcgaagctctcaccaccctcgttctcaacaagctccgcggcaccttcacctgcgtcgcggtaaaggctccgggatttggcgacagacgcaaggaaatgctccgcgacatcgctatcctcaccggcggcgaagtcatctgcgacgaactcggtcttgagctcaaggacacccagctcgcacagctcggccgcgcacgtcaggtcaaggtcaacaaggagaacaccataatcgtcggcggcgcaggctccgctgaggatatcaaggcaagaatcggtcagatcaagtccgcaatcgagaccacgacctccgatttcgaccgcgagaagctccaggaaagactcgcaaagctctccggcggcgtagcagtaatcaaagtcggcgcagccaccgaaaccgaaatgaaggaaaagaagctccgcatcgaagacgccctcaacgccaccaaagcagcagttgaagaaggcatcgtagcaggcggcggaaccgcttacctcaacgtaatcgcagacgtcaagaccgtcctcgacaccgtcgaaggcgacgaaaagaccggcgtcaagatcgtcctcaaggctcttgaagcccccgttcgccagatcgcagaaaacgccggcttcgaaggctcgatcatagtcgacaagatcatgaacgcaggcaaggtcggctacggcttcgacgcgtacaacgaaaagtacgtcgatatgatggaagccggaatcgttgacccgaccaaggtcacccgctccgctctccagaacgcagcaagcgtagcagcaacagtcctcaccaccgaagctgtcgtcgccgacatcaaggagcccgaacccgcagctcccgcaggcggcatgggcggcggtatgggcggtatgtattaataaacccataagcagggggaggaaggacctctttgaaaagaggtccttcctccccctgcacacccttcttctccagaaacttttatacatttttaaaggacgcataccggcgcataacggtatgcgttttttgtagattgacaaatggcggggatgagtgtataattattacattcgcaatgcaaaaggagcccacatttgaaaaagttcattcacacattcatccccgccatactcgccggagtctgcatcgcactcggcggaaccgtcttcctctcgagcgacaccaaactcgccggagcactcttcttctgcctcggtctgctcaccatcctcacctgcggattcggtctcttcaccggtaaagtctgctacaccctcgacaacaaagtgacattcctcggcactctcggaataatctggctcggcaacctgaccggaaccggtctctccgccctcttcgcccgcttcacaagaaactatcagtccctgaatgaaaaagccgcggcgacaatatccgccaagctctccgactccctcgtcagcctcttcgtcctcggaatcggctgcggaatctgcatctacatagccataaactcatacaaaacacaggacggcttcctgaaagtcaccctcgtaatcctccccgtcatggtcttcatattctgcggcttcgagcactgcgtcgccgatatgttctacttcttcctcgccggagaaatcacacccgacgcgctcctgcggataatcgtcatcaccctcggaaactctgtaggcggaatgctgattcccgccgccgagaaactttacaaaaggaaaagctgaaacattattgacatcctccacagcatagtgtataattatttcagatatcaaatctgaaaggacaagcacatgaaatacgtaaccttcagctacgacgacggctgccgtcaggacatcagattcacagaaatcctcagaaagtataatctgaaagcgacctttaacctgaactccggcttcctcgggaaccgcggcagaatcaaccacttcggcttcgacctgccgttcgacaaaatcgacccggacgaagtgaagcaggtctacgaaggcttcgaggtcgcctcgcacggaacagcgcacagaaactttcccgacctcgacgacacggagctcgaccgcgaagtatcagacgataaaaccgcgctcgaaaagctcaccggtcaacctgtcataggcgccgcgtatccgtgcggagcgtttgatgacagaatcgccgaccgtctgcgctcgcatggaattctctactgccgcaccatcgtctccggtcactcctttgacattcccgtcgacttcaatctctggaacccgacctgccgcgaccacggtgacgacgccctcgggtacgccgaaaaatttctgaagctcgtgaccgataaggacgcggtcttatacatctggggtcactccttcgagttcgacaagaccgactgcgaccgctggtatgaaatcgaaaagctctgcgaaatgctcgccggtcacaaggatatcacctacgcgacgaacggcgagatattcagagctataacaagccagcagacataatgcacaaaaaaatctcccatgatttgtacacacgggagatttttttgattcacttgacaaatgaagcgatatatgctataatttaagaaaaaccgacaggaggcacggacttgaaaaagatcttgaaagctgccattccgatactgctctcgtgcgccgcggtcatcggcatattcgtcggcgcgctgtggatatacgaccgcgtcggcagctacccgttctggacactgcaacagcgcgacgtcgcgaaaataaccatcaagaccggaatcaccaccgagtacacgatcacagacgaggatttcgacgacgcgatgtcggtcatacagaacgtccacatcggcaggagagtcaagcgcaaggacagatatgacttcttcggcggcgcgtgtggctcgatacgcctttatctgtccgacgggaaaagatatgatatcacatactccgcatccggtcagaagacgctcttcgacgagcggcactccaacttcatcggctacgtgaccatcgacggaaagagctacgcaagctacgacactgcgaaccagcgcgcgttcgaaaagctcgtatggaagtacacagcgtccgaaaacgacacggaggcggcgtcatgacgaaaaaactgtcaaagcgcggcgtgatcatcatatccatcgccggaatcatcatacttctgctcgtcattttctgcggaatactcatcgggctcgcgaacaccgggaaaatacccctcgcggacataaagagagacgacgtcgagtcagtcacaatcagctcgacgtcaaacgcgaaaaaagctgaattcaacgccgtaaatcatgaggccatcaagataatcgaagtcctccgtgatacgaaggtctacatcacgccaccgctgatcttcggcaccgcgccggacacaatgagcggcacagcgggcatattcacaataaaaatgaaaaacggagacatacactatgtctcaatcgacggaaagcaggagcccatcctgaaaaggggacgcggatactatttcctgataatagacgggaaaaggtacgacatcaaggaaagagccgcctattacgagcttgtcggaatcatcagaaaaaacttgaagtagcataaagaccgccatgaaaaagctacgtggcggtcattaatcgtgtgccgcccaaacggacttcaaaacccgcagaatatttatgcaatattggcattgacacggacggctgaaatatggtataatagttagaagcgaaaagaagtaaaaacacggaggtataaatatgcagtcaaaatccgcttatcttgttcttgagagcggcaaggtcttctgcggtcagtccttcggaagcgacgccgacgctgtcggtgagatcgtgttcacgaccgctatgaccggttatctcgagaccctcacggacccgagctattttggtcagattgttatccagacgttcccgcttatcggtaactacggcgttatttcccctgatttcgagagcgcgtcccccgcactttcagcttatattgtcagagatatttgtcaagagccttcaaatttcagaagtgaaggtcctcttgacgtttttttaagggagaaaggcgtggtcggtctcgcaggtatcgacacgagagccctcacgagaatcgtgcgcgaggtcggcgtcatgaacgctgcgatcgtccacgaggaaccgaaggatatcgataagataatcgaaaaactccgcgcatactctgtcagaaacgccgtcatgagcgtaacctgtaaagagaagatgatctatacccccgaggatcccgcccgccgcgtcgtgctttgggacttcggcgcgaaggcaaacatccgccgcgagcttgtgaagcgcggctgcgaagtcatcgtcatgcccgcgaactccacggctgaggaaataatcgccgagagaccggacggaataatgctctcgaacggccccggcgaccccgccgagaacaccggaatcatcgaagagctgaaaaaggtatgtgagcgcagaataccgaccttcggcatctgtctcggacaccagctcctcgcactctctcagggcgcgaagaccgaaaagctcaagtatggccaccgcggagccaaccagcccgccgtcagaacgagcgacaagcgcgtcttcataacaagccaaaaccacggctacgctgtcataggcgacacgcttccgtccacggcgtcggtgagctatgtcaacggcaacgacggcacctgtgagggagtcgactacaccgatatgcccgcgttcaccgtacagttccatccggaggcatcggcaggaccgctcgatactcagttcctgttcgaccgcttcatcggtatgatcgatcagaagaattaagggaggagtttataaatgccgctcaataaagaactcaaaaaggtaatggtcataggctccggtcctattgtcatcggtcaggcagccgaattcgactacgccggcacccaggcgtgccgcgctctcaaggaggacggtctcgaggtcgtgctcgtcaactcgaacccggcgacaatcatgaccgacaacgcgatggcggacgaagtctacatcgaaccgctaaccctcccgaccataaagagaataatcgaaaaggagcgcccggacagccttctctcgaccctcggcggtcagaccggtctgaccctctcgatgcagctcgcgaaagagggcttcctcgacaagatgggcgtaaagctgctcggcgcgaaccccgagacgatagacaaggcggaggacagacagtccttcaaggacaccatgctcaagatcggtcagccggtcattccgtcggtcgtcgtcaacgatcttgaatccgctatggctttcgctcactcgaacggctatccgctcatcatccgtccggcattcacgctcggcggctccggcggcggcatcgcctccagtgaagaggaattcatcgaaatcgcggagaacggtctcagatcctcgcctatccaccagatactcgtcgagaagtgcatagcgggctggaaggaaatcgagtttgaggtcatgcgcgacagtgccgggaacgtcatcaccatctgctcgatggaaaacctcgacccggtcggcgtccacaccggcgactcgatcgtcatcgctcccgccgtcaccctctcggataaggaatatcagatgctcagaaccgcggctctgtcgataatcgacgagctgaagatcgagggcggatgcaactgccagttcgcgcttcatccggagagcatggaatacgcggtcatcgaggtcaacccccgcgtctcgcgttcctccgcgctcgcgtcgaaggcgaccggatatccgatcgcgaaggtcgcggcgaagatcgctatcggctatacccttcccgagatactcaacgccgtcaccggaaagacctatgcctgcttcgagccttctctcgactatgtcgtcgtcaagttcccgaagtggccgttcgataagttcgtctacgcaaagcgcacgctcggcacccagatgaaggcaaccggcgaggtcatggcgataggcacgacctttgagcaggcgatcatgaaagctgtacgcggcgtcgagatcggtatgtcctccctctcacacaagaaataccgcgacctctccgacgaggagatcgcggaaaggcttcacaatgtcgacgacgagagaatattcatcgtctacgaggctctcagacgcggcacaggcatcgatgagatccactctatcacaatgattgacgagtggttcctctcgaagctgagaaacctcgtgcgccttgagaagcgtctcgcgtccgaaccgctcacgaaggaactctatctcaccgcaaagaagctcggcttcccggataaggtcatcgaggagctgaccggaaacgctcttcccgccgggatgcaccgctccgccgtctacaagatggtcgacacctgcgccgccgagttctccgctgagacaccgtacttctactcgacctacgacgacgagaacgaagccgcggagttcatcgacgagcacaaggacggaaagaaaacagtcatagtcttcggcgccggaccgatcagaatcggtcagggcatcgagttcgactacgcgtcggtacactgcgtctggtcgctcaagaaagccggatatgacgtcgtcatcgtcaacaacaacccggagacagtctcgaccgacttcgacaccgccgaccgactctattttgagccgctgacgaacgaggatgtgatgaacatcatcgagaccgagaagcctttcggagtcgtcgtcgctttcggcggtcagaccgctataaagctcacgaagttcatgagcgagaacggcgtcaacatcctcggcacaagcgccgactcgatcgacgcggcggaggaccgcgagcgctttgacgagctcctcgagctgcatcacatcaagcgccccgagggctacacggtcatgacgaccgaggaggctctccagatcgccaaccgcatcggttatcccgtgctcatgcgtccgtcctacgtgctcggcggtcagaacatgatcatcgccttcaccgacgacgatatcaaggagtacatggcgataatcctctcgcacaatatcgagaaccccgtcctcatcgacaaatacctcatgggcatcgagctagaggtagacgcgatatgcgacggcaaggacatcctcatcgcgggcatcatggaacacgtcgagcgcaccggtatccactccggcgactcgatcgcggtgtatccgtcatggaatatcaatgaccgcctgcgtcaggatatcatcaactgcacgaagaatctctcggtctcgctgaagatctccggtctcgtcaatatccagtactgcatctacaaggatgagctctatgtaatagaggtcaacccgcgctcctcgagaacgattccgtatataagcaaagtcaccggcgtgccgatggtcgatctcgcgacaagatgtatgctcggcgaaaagcttgccgacatgggatatggcaccggtctctacaagacctcgccgtacgtcgcggtcaaggttccggtattctcctttgaaaagctcatgaacgtcgacaaccacctcgggccggagatgaagtccaccggtgaggtgctcggactcgcgtccacacgtgaggaagctctctacaaggggcttgtcgcggctggctacacgctcaagaaatccggcggcgtattcatcaccgtccgcgacagcgacaaatccgagatcggcgagaccgcgaagagatattacgatctcggcttcgacctctacgcgacccgcggcaccgcgaagatcatcgaggactacggcatgaaggtcaagctcgtcgacaagatacacgagggcgagaacaacacgctgaagctcatcgagtccggctggatcgactatgtcatctcgacctccgcgaagggaagaatcccgacccgcgactcggtcaagatccgccgcaagactgtcgagcgcggcataccatgcctcacctcaatcgataccgcgaacgcggtcgccgactgcctgagaagccgctattcacaggcgtgcaccgaacttgtcgacatcaaccatatgcgctccgaaaagcagacactcgagttcacgaagatggaagcctgcggtaacgactacatctacgtcaactgcttcaaccagaagatcgacaatcccgagggactttcgatcaggttcgccgaccgtcatttcggcatcggcggagacggcgtcgttctgatgtacccgtccgatgtcgccgatgtgaaaatgaggatgttcaacctcgacggaaccgagggcagaatgtgcggaaacgccgcgagatgcatcgcgaagtacctcatcgacaacggcatcgtcaaccgcgactatgtgacaatcgaaaccctcagcggcatccgtaaagtcgctgtcgagaaggtcaacggcgtcgtcagctacgcgacggttgacatgggcaaggcggagcttaaccccgccatgatccccgtcaagctccccggcgacaccgccataggagttcccacaaaggtcgctgacggacgctacaggatcacctgcgtatcgatgggcaacccgcactgcgtcgtgttcagcgaggatctcgacagcccgctcgattatctcgacctcgagaagctcggaccgaagttcgagaacgacccgctcttccccgagcgcgtcaacaccgaattcatcaaggtcctcaacccgaagacgctcaagatgcgcgtctgggagcgcggctccggtgagacatgggcgtgcggctccggcgcctgcgccgctgtcgttgccgccgtcgaaaacggctactgcccgaagaacgaggacatcacggtcaagctgaaaggcggagacctccgcatcagatacaccgatgacgccgtctacctctccggcggatgcgtgaaaatttacgaaggcaagaccataatctgatcagagttaaaaaatgaccgccgcggttctgaccgcggcggtcattttgttttcgattgaatatccgtcccacaaaaaatgccacgcgtcgccgcgtgacattttttgtttttttaaccgactataccggatctctcgataccgccgacaaggtacttctgcatgaagatgtagacaacaagcagaggagcaaggatcagcagaccgcaggtatttctgatcgcggactcataaaggttctgagccgcgtactgcgtatcgagcgtcttcgggatcgccacgacatcaggcatgagcaccatcgacgacttcgtgaagaagaccttcgtatagaagttgtcggtccactgccacgagaacgcgaacaggaagatggtgatcatcatcgggattgaaagcggaaggatgatctggatgaaggttctgaacgtgcccgaaccgtcgatgtaagccgactcctcgagctcatccggcacgccgcggaagaactgacgcatcatgaagatgtaaagtccgttcttgaacgcgagtccgccgagagacagtagcgccagaggccagtacgagttattcaggttgagcgatgtgaacggaatgacgttgagtccctcgaacacgccgccgccgagaagattgaagataccgagaatatcgaagtatctgaacttcatgaacatcgagagctgaagagttctgtgcgggacaaccatggtgaaaatcacgaggaagaagatcagcttgttgcccttgaacttgaacttagcgagtccatagccgataaggcagcagatgaaggtctggataagtccacagagaatcgacagtgtcgcggtgttgagaagcgccgagaagtacttattctgcgagatgatcgcgcggtaagtatcaagtgtcggatactttggtatcagcttgaccgtcacatcgacgaagtcgtcacggctcatgaaggaaccggaaatcttcgcgaagaacgggaacaggatgacataggagataccgataagaagcacgtatctgaagagtccccagataaggttcttgaagaagtagccgttgaggaacttagccttcaagcgctccttcagaggggttctctcgaaatcaaccttgatcttgtttttgctctctttcatgaccttcggcggcttcggcgctccggtctgagcagtctgttgattattcattcttttccctccttagtcgcgcttctggtagaagacataagcgctgagtattgctgcgacaagtccgatgatgacaagaacgatgaggaagtagatccacgccatcgcactcgagagcacgttaccgccggcctgatcgtagaccgtcgaaatgtacgtcatgacctggttcgactgagatgtgaacgagtcgatgaccgtgtagatcgagttgacaaggatcatcgggctgatcatcgggaaggtgatcttccagaaggtctcccaagcggtagcaccgtctatgtcacaggattcgtagatagcgggggagatggactgaagtccggcaaggtagataagcatctggacaccggaacggttgatgatatcgtaaatgttgttgaccatcttgacgacatactcaacgagctcggtaccgaccttcatgttatcgaacaaccgctcgatatccaccgccgaaagtatctcggatgtggtattctgaccggaaccgtcgttgataccctcttcggtctggttcatgtactcaatcatcgtgttcgcctggtcgattctgtcgatgataccggtggagattatgacagggatgaagaatatcgcacggaacgccgcacggccgaccatcttctgattaagaagcaccgccatgaacagcgagaagataacgatcgcgggaatgtcgaagataagctgctggataccggaagtcagcgtctgaacgaactgaggatcgacaaacaatgcctcctggtagttttcccagccgacgaactcaagcgtgtagccgccgccctggcctatctttatcttgttgaacgaatacttgatggagtcgatgactatcggcagataaatgatgatgaacccaagcacgaacgggaggacgaacacccaacccgcacgcgccttgcgcgcatcaagagaggccgcgcgtctgcgcttcttcggagcgcttgtaagttttgcttcgcttgtcattttaacacctctccttatttagtcttgacgtactcgagagcgccgatggtgtaggtctttccgccatcctcaacggtgatctcaaagttattgtagttgagaatgaaggatgtgccgccctcataggtgaccttgacgatacgtccgtcgtcagaagtgtacttggtcttctgatatccggtcgtctcttctacggtctcctcagtggtatcaacagtggtgtcagcggtggcagtaccctcagcggcagtgccgagtctcgcctcaagctttgccttcttttctgccttttccttagcgagctcctcagcctcctgctctgctgccagagcgtccgcctcagcctgcttgtcggcagcaatctcctcagcggttgcaacgcgctcaccgataaggaactcatgtccgacaatcttcttatcctgaagatttccgatagcgtcattcagctcggtgtaaagattcttgaccgaatcataccagatatcgaagttgacggaatagtattcctggaactccacatcctccttgaggagctgagtgttctgagcggaaagcgtgaagtacagcgaagcgccgttctcgatcgccttcaggagctcatactgagtgtcgcccgccatgttgatagcggttcccgcgaaattcttgctgccgtggagcaccattccgacgaacggaacagcctcgctggcgcccgagaatctcgacgagtcgagcgaaacgttgatgatatcggtagcatactcgatggagtaaaggttgccgccgtcgatcatgacgttctgataatcttccttgatcctcgcaagaagatcagtggtgtaactcttattgtcctcgcggttgtacggatccttcttatcgaagtcggagttcaggtcagtaccgagagtagcgaccgaaattccggtaggattcagcttcgagtacgcttcagtgaaatgatcgtagaagtagctgtaaacggacggggagaccgccagtgcgtagccgcgctcgaacgactggagcgtcgaatcataataacgcttggtcgtgtaacggttatccatcgtcttgatgaggtgctttctcatcgaaacgccgtcaaagagcttgaacttgccgatgttcgcgaagtcaaaatccgggaacacgcctatgcccttgctctcagcgtactcaacgaacgaagtgaagcccttgtttccaccgacttccttgtcgaacttgacactgtaagcggaggtatcattcatgccctcattagcgaagccggtgagcttgaagttgacattcgtgatgcccgcttcctcgagcttgccgtacatctccttgaggtcatcaaaggtggtcagaggcttcagaacctcgaccgggatcgagaggattctctcgacatcgtcgatacaaccgaaggactcgatgtaaagcggaatctgattcttcacgtcagtgaggtcagtgagcttgccctcagcctcgaggtactcgcggtaagccttcgccataccgacatatgatgcctcgtagtacttcgtgagtccggactccttagcgagctcgtcgtcagtcagcatgatgaactttatacgatagcttcctgcgtacttacgcttggaaacgacggtataagttgcgttctgtccgaccgagatagactcggcaaggttgtaggaatccttaggacgcggggagaactgagtgtaaacggtgttgtacttgtggagcggtccgccggagttggtggtgatgcttgcgagagcgtcgccctcctcgactatcgcgaggaagccgtttgtcttcttctcgtagacctcaccgtccttggtctttatctcgcggatcgtggtcttggtggtcttctttccgtcctcatcggtctcggtggtggtcttttcgactgccacgttcgtctcgataacgccgtaaaccggcattctcatgacttccttatgctgtccggaaaccttctggtaagcgtaatcctcgccgtaaatcttgctcgagaggataagcggcttggtggtgacgtcctggaagcggacaagcgctccggaaccgtccgggaagaaggtataaccttcataatcgttggagcctgctccgaaatacggaagcggtctgatattggtaagctggaaggacgactcgtcgtaacggataccgttagcgggaagtctcacatcgagatttccgtcgtcgtcgagcgtgtactcaagcgaaagtctgaacaggacaggcgccttatcggtaccttcgtactgagtcatcgcgtggtcttcctcaagtgtctcgtaggtgtactcagggcagtactgcttgatataaccctcgatgaggttcagctcacggtcggacgcgtacgggtcgaagacgtaaatcgccatctgctcacagatcgggaaagtcgcgataagctcggttcttccgcgctcggtgaggttttcatcgttcggatccttaagagtgtagaacgcgtccatcttggatttcgcggtgccctcgggaatgttgttcagaataagctctctgaagcgggtcgcctcaatctgcttcgggacgagcttacgggtctcttcacgacccatcgtgtactcgactcttacgccgttcttgatcttctttacgttgatctgacctctctggcaagcctcggtgaagctgaggaggtcgagctcggaatcgttgtcggtgtacttgatgatgatctggctcatcagctcctctttgaccgactgagaagccttggtggaatcatccgcgatatcccacgggttcgagaagagtatctgtccggtcttcacgttgacgtacgcgatttcgccggatacaggctcgacatagagctcgtagttgcccttcgagagatacttcgtcatcgtggcgagcttatcctcgggggtcgcgaatttttcggtgaggtaactgattgtaggaacgccggtctcctcatcaatcccgggaaccagaggttcgtcggtcttggacttggcgtcggcggcgctcagcgaaaacgctgaaagagagcccgcgaccataacaacagtcaggaacgccgataataatctgaattttttcatttactataactcctatcctgttattacattcggtacgtgatctcaatcacgatgctggatatgaagcttacgatcttggcaagaagcgtggagaacaggatgcctatgaacatgatgacgcccataccgacgatggtaccgagagtcgtgataacgttcttgccgaatgtatagtcatgcgttgtcatcgttccgaagaagatcaggagtccgcaccatacaaacgcgatcgaaacgaggaggttgatcgtcttagcctcggtcgccagagcgaagttcgagatgatgaccgacgggatgatgagtatcggaatcggaaccagcgcgtagcaggtcgcgacgaagatatccctgaaggttccttcaccatcgaacagagtggtcaggcaccagttggataccgaccagagaagcacaggcacgagaaccgcggtcaactggatcaggatagtggaataagctctgcgcgggttgaagacataaccggtgccgaccgactgatagtagaaggtgagtatcgcgagcgcgagccatacgaaggacgcacggaccgatccgcggtattcatgcttcagatcccagaagccgtcaaacgggtggactatcaggtggtttgcgtacatgagctcctcccagaaggtcttgcggcccttcttgagctgagtcttcttgttgagcttcgcagcgtacttgttgaagagtacgagcagtacgattatcgcgacaacgatgatcgggatgagcactatgtacttcgaaatccagttctttctgatttccttgaacgcctcagagtagttctcggtatcataagcggacttgtagtacgtgagcgcctcctcgtacttcgcgcttctgtaaaggctcttgcctattccgatatacgcggagtcgaagttgttgtttctcttgaggatctcgagccagtagtcgatggttgtgtcgtaatttctctcattggtattgcgcagcgcgtcaatcagcagatcgccgtactcggtgcgtctgaataccgagatattgtcggaagtcttatcgagaagcaggatatcgttatcaagataagcgatagcctcgatggactggatgttgccgagctgctgcccggtgtcgccgaagatgaacagaaggttgccttcggagtcgtaggtgtagaccttggatctcttctcgtcgatgatcgaccaggtaccctccggaccgatagcgacgtcgatgatcttggacggaccggtgatctcagccgtcgaaacgttggtgatgttaacctcaccgccgggaccgaagaagccgtttctcttcatgatgtcggagcccgcggtattgagcttcttgaccggagcgtaggtgccgtcattggacctgatggccgcctgctgctggttctcgtcgatcgaagaagtggtaacgtagatgaagcccttctcatcgatcgttatgttgttgaactcagtcgagacatactgctgggagagctttctctgctcctcggtctggaaacgtctccagatgatgtcgagcgcgccgatcgtgaccttctgagctccgatgaagccctggaagtcgccttcctcgttgatcgcgataacgcccatgtaagtcgtggaagaaatgacgtagatacgtccgtacgagtcgaccgcgatagcgaccggcttgtagatggaaccctccgggaagacatccgaatccggctcctcgatgaccttatagaaggtaccgtcgagctcgaacatcacgatacggttattatcggtatcagcgacgtagatcttatcttcagtgacgaaaacgccggaaggattggtcagcgagtccgggacaccctgtccgttggtgaactcgtcgatgtagaacttcagcttgtaatatctgtcgagcaccacgatacggttattcgccgcgtccgcgatgtagatattcttgttctggtcgaccacgagatctctcgggtcgtcgatcgccggatcaactcccatataagcagagtcgatctgtctgtccggagtatatgcgtccgggctcatcagcgcgaagccgtcgatcgaatacgtataagtggaataaggtgtgatagctccgaccggaatgcatccgagcacgagtatcatgcacgccgcgagggcaagtattcttgataatttcttcatcatgattgtagcccccttagtccttcatacccgacgaacccatcgtctcgatgatgttcgactgagagatgacgaagacgatgatcggcaccgccatcatgagcacctgagcagccgcggacgcgcccgcacgggcgataccgcctgcgacgatctggttgatcgcgtagttgaaggtcttgagctgttcggaatagatgtagatcgagttgccctggttccagagaccctggaaagagtaaatgatcagagtcagccaagccggcttgaccatcggcatcgcgatacggagaaacgtgtagaactcagtcg

SEQ ID NO: 918 - DNA, 5702 bp, Unknown
  16S sequences of unknown bacteria
cgatctcatgctgctgctagttttacaaaagtgattttgccgtcgccatccagggagaaatccagggtgacggtctcctggacaccgtccacattcacggtgaccttcaccttttcgctgccggaggactccagctcctgccgttccagcagttccatcttctccactcggaccggcacacccttcaccagataggaggaagccaccgaatcattgaggaaggaatccaggcagttgggagcaaagtacttccccacttcctcttcccactcttctgcggcgtcgtcccagtcctccatggcttcctggagcttttccgggtcgggggtcacgccctcaccgatcatcgacaccatatcctctgtgaacaggtcgtcattggggcaggtcatcatggcctggatcacctttttggggccggtgctcacctgatttcccgctccggggcgaagaaaataaaagcccacgccagcggccaccaccaacaccaatgcggccaggatcaaaagactcttctttttcatggagagttccctccttccagcaaaaccggaatgaacttcatttaagaatattcagttttgccagaaatattcaaaaaatccatttcaatttgcgcggctacgcgcaaattgaaaaccttgaacataaggatcgttattgctatccgaatggccaatataatttgtatacatgaccacattggtacccacttgatagccaggattccaagttgcataatctccccaagtagaaccaacgataaacggattgcctgctgtaactaacaccaaatcacagaacgaacactgcgaagcagttcccgaaattcttaaatcggtacttcccgcgcttccataataaacaaagcccattccgcgtccctgcatctggtgtttccctcctgacggacaagaaactacatacttcatttctatttcttcattttcttcggtggaaacattaagaggatttgcgaatgcaggtaaaaccattgtcatcagaaccgccattgctacaaccagcatggacattctcttcagcattttcttcataattgattcctcctttttctcttacggtattgtgtggacttctctctttatttgttattatactttttttttttaatttgtaaatgatataatgtgctaaatttccagattgtttttgttagaaattcacatataaactttcatgttcttttaactaaccaagtgacctataaaaaattatattcaaaaaagtcctgctcctttcggagcaagactttttttattgaatcattttttcaaagatgtttctgtctctgaactcctggctttgcgggcccggatgatatcctccagcttctgcttgggagcggcggcgttctcatccagagcggccacatactcctcaaaggtgatgacccccttctggaacagattctccagagcctgctcctgggcatagcgggaataggggctgttgggggacacatcgatgcggatctccacccgcagccgccgcagctcctccccggagagggcgtagatcccccggctcagctcggcgggatagtaggccgcccacagctcgaaccagatggaagccacatcctccacaaactggcggaaatcggcgatctgctcgttgaggggcagagccgcctggtcccgcacggcgatgatggcggcgccgctggccttttccgggttgacctggcccagggcggcgtcgcctgcaccggccagatctcttgtctgctgcaccagctcctgggccagggcctgggcgtcgggggacatgggcgccgcccccagatagctgacgatgtcggtgacggcgtttgcctgcatatcccgcacccggatggccgctcccacctcttccagcgcctccttgttcagcaccttgtcggcgttatagaccagccgggaaaaggcggtcattttggcattcatcaggcgccgggccagcattttgttggtttcgatctggttggggatgaggggagtgacctccccatccccccgggacgagccacggcggcccatccagcggaaagcggcaatgggatagagattcagcccccggccgcccccatagaggcgcaccggcttctgatagagcacatcccgggtgccccgggtgcagcagaccaccccgtcctcatcccgccagaaagccagaagagtggtgcacagctgttcttcctcccgggtgtcactgtgctcccattcctcttcccgctcctgccggtccagggggccgtcgtcggggacgatgctctgcacctctgcctcccccaggccataccgccgggccgccttccgcacctcccccaccgtctggcggcgggcgatgagcaaatagggctgcttctgcacatcggggcaggtttcgtcccccagaaacaggtcgcaggtgtccaccacctgggcctggcagtccccgtcgtggaaatagaggtagctgtccccggcgatgcaggcgtttttcaccacttcccagcacagcttgtccattttcagccgctcccactggcgggcggcataggcggtgagcttctggcagatctgggcggccccgggccccagagcaccggcgtgctccatgggcgcatactggatgctcatggtgttcatacagacactggccaccttgtgctccaccaccggctggataaagttataaaaaggcagttcctccccgccgctttccacgccataccactgttccccccggaaaaaccggtgggccttcttggtcttttcataaaggtctgtcatccggtggtgctcatccccccgggtgtaccagcgccacagaagagccgcggtcattttttcgctctttcccatttattccaccctttcctgacgccggccggtgccgtcatagcggtcgatgttccgcagaatacgccccaggcgtcctttttctttttcttcgggggagggacttctttccaacttcccctcccttgcaaggcggctgccctctatcagccccagccggtagcagaacaccgcccccagggcgcccagcaggacgccccaaagcaaacagaatgtcatcatccttttacctccctatttttgcagctgctgaagctgccaagccctgcgcatctgggcgatctggtcctcgttgaagcccagggaaatgtagccggaaaagtccccgtactgggccaatatcttagccaccgccagctgacggttgaaggcgtcctgctgctgatcggcggcctccttctgggccgccagctgctgctcccggatctgctgctggtttttccattcctgctggctgttttcccaggcctgctggttcttctcggcctgctgctgggccagtttgtattcccattcctgctggctctcaaggaaatccggatacccctgggccaggctcagaagaatgtccgcctgggtctgggcggcttgcagttcgccctgctgatacagctcattgatccggttgttcaggccctgtaatgcttcttgccttgccagctcaccctccagcacattctgctggtactggttgctctggctggcggcggtgctttcggcggccccctggccggtgatgcccagcttggccatggtctcgggcagggcctgcttctccttcatgtagttgatgtaggtctgtttggccagggcgtcgtagtcggcctggatctggggccgctgggcttccagctgactggccccctgttgggccgccaggcggtaggcctgggcggcggcattggccgcgtccatgtactggttgcggatgggggcgtaggcattgggcaggtactggctgccgtccacgccgccgctatacccataggccgcccggatgctttcggccgcctgatgggcggcgtccatcccggcccggtccccggcggcgttggccgcctcccaggcgcttttggccgcctggatctgctgataggagctggggctgctttgcttgatgtaggcgtcgtcaaaactgcccaatttctgatatgccatgggtttcctccttttgtatcaatggatgtaaagatgctttgttttacaggggcgcttccagcagatgtccttccatatccaccacgaaggcatcccccggcagggtgaaggccggacgcatcccgcaggtggtaatcaccgttttggatgcaaaggccccggccgtgtccaccgtccagaactggtttgcaccccgggtgtcgggagagcgggtggcccacagatagggcgcgccctggaaattggaaatgcgccattcatcggtctggaacagatccacaagggtgccttcggtgcccatcccctcttccccgcctcccagctcggtggccgaaagcaggaagacctggcgctggagatagcccggggcgtgctcaccaccgccggtgtaggggatctgacaggtgggaatcttggcggaaacagcgctgtccaccgtggggagaaaggcccccgacagccaggaatcggccatggaaccgtcgtactcgttctgcatggtggaggcgatggtgcggcggccggccacatcccggcgcagcagcagggtatttccccccacccggtcgggatagccctggtgggccaccacatactcctgccatgcgtcattctccttgatgcgcacgatatcccccaccttcatcaggatcagcggctgggtctcccgcaccgtgccggtcacctggcagtaggaattctgatacaccccgtccttgctgcgggcaaaggcccggtaataataggtggcccccggggtcaggccctcatcggtgcagctgctgtccggcccttcgtagatcacttccccgtcgtattcgtccttggggaaccggtcatcccgccgcaccacccgcagggcggcataggccgtgtcctcgggcacggtggtccagctcaggtcgatggtgccgatccggttggacaccgctttgaagcccaggggctgaccggccatggtgccggtataggcaccattccgccgcaaaatcatacattctcccatgttttcacctcacgatccgcagtttcaaaggcagctccacggtgggctttttgtcataacacaccgcctggagcactccctcttccgtccagagcctgcccaccaggccccaggcttgcagccgggcccggtctgtgtccaccgtgccggtgagcaccacatcaaccaaaggctcatggctggcgctcaggccggacaccgccacctgctgggtgtaaggcccttccccttgccagtctgttcccagcaaggcttccagagtgtagctcttccagtcctccggggtcaggccgctgtctgtggggttgccctcctggtccagagcggccagatgccccgccgtgggggaagcagcccgattggccttttgctggatggcggccaggctcaggttgaactggctttcgctgccctcatatcctccggcctgggcgctttcataggccgtggtgccccgttcgccctgagggccggtctccccttgagggccccgttctccctgaggcccctgaggcccttggggaccctgggggccctgggcgccgtctgcaccgtcggcgcccggttctccctggggaccttggggaccgatctccccctggatgcccgccgggccttgcagaccccggggaccttgttccccctgaggcccctgctcgccctgggggccttggggaccggtttccccctggata

SEQ ID NO: 919 - DNA, 3636 bp, Unknown
  16S sequences of unknown bacteria
agacagctctgtgcgccaccagcttctgtaacattatgagtggatacctgcacatcgacttccccctgtggctatcctgcatcatttggggttcgttgatgtttatcacctccgtctatggcgtgaaactcattgattttttgaatcgcgtttctgttcccgcactgttcatcatgcttatctggggagttattgctgcgcttatgcgcggtgcggctgccgctgtgacggtctatcagccgcccatggttcttggctggacctatggaattacgctggcggtggcaggctttgcctctggcgcagttacctgtggtgactatacacgatatggaagaaaccggagagacaccattctttcctgcatcgttggcgttctgcccgccggtattggcgcactggtcattggtggtttcttagctgtcgctatgggcaactttgacctttctgtggtgttctccagcttcgggtttcccatcatcggtatgcttgtgctgattcttgccacgtggacaacaaatacaggcaacgcgtatatctccggtatcgctatctgcaatatgtttaagctgaaggatggtcggcgtccggtcgttacgctaatagcaggcgcagcaggaacagcgttggcactgcttggtatcgctgatgtgtttgccggcttcctaaatatcattgcggcactggttcccgctgttgccggcgttgctatcgccgactactggattatgggaagagggcgcgcggatctgtgggaaccgtttgaaggagtaaattggatcggtgttgtatcgtggctggcaggtgccgctgtcgccaagtggggaacgttctttgtgcccactctcatgggcattgtagtggcaatagttgtttactgccttggtgcgctgctcatcaagagcgagaagctcaaccctatttatgtaatgaatcttaaacttgcacagtctgacataaaggagtgaattgcaatgagcgtcaagatcctgaacctgcttcccgtcacaggggatgtgttgacaccggaaatgttcaagtatatgtgcaaatatttggagtctgatacggaagtacagacgtatcagatcacttccggtcctccctctatcgaatgtgagtatgatgaagctttggctgcgccggatgttctgaggttggtcaagcagggagaagaagatggctttcaggcaatcttcatcaactgctttggcgatcctgcggtaaaggcagcacgcgagtttgtggacattcctgtttttggcggcttcgagccggcaacacactttgcactgggacttgccgataatatttccatcgtgacggtgatgccgaatgtggtatcccttatggaagggaatgtatctaaggcccggttgaatgaccgcattgtcagcgtccgcaatgtaaacatcccggtagaggaactgcaagatcatgaaaaactttgcagggcactggtcgaacagtcccttcttgctatccgcgaggatggcgcacaggcgattgttatgggctgcacaggttttgtagatgtggcagaacgcatcaagcatgatctgttggccgagggctatgatgttcctgtcctggaggcagcacagtccgctttaaagctgtgtgaggtatatgccaaaatggggttgcggcagagccgattgacgtacatgaccccaccgaaacgaaaataacaggaggaaaaaacatgagtgtgctcgctaactatgagccgaaaagcgtgttctcatattttgagaagctctgcactattccccgcggatcaggcaacacagacggcatagcatcctatctggtcagttttgctgaagagcacggactggagaactaccgggatgcggcaaataatgtgattatccgcaagcccgccagcgcagggtacgaaaacgctgatacgattattctgcagggtcaccatgacatggtctgcgagaaagaagacgggcttgactttgactttgcaaaggatgcgatccagccggtggtagatggcgattggatccgcgcgaagggcacaacactgggcggagataacggtatcgctgtggcaatgattcttgcgatcctaagcgatgactctttggcacatcctcctattgaagcacttatcactgcggacgaggaaatcggaatgcttggcgcgtttgcgctggattgcagtcaattgaagggtcacaaactcatcaatctggattccgaatacgaaggggtattgatgtgcagttgtgccggcggtgtcaatgtccgcagtacaataccagttgcacgggagcgaattactggtgcggtgatcgatattgcagtcaaaggactgaccagcggtcactctggtgttgagattgataaaggccgtgcaaatgccaacgtgctgattggccgcatgctttgtgagttggccgccagggaaaatttccgtctggcagcactggagggcggctcgcgtgaaaccgctattgcagcgtctggttccgcgcaaatcgtagtggagccatgtaaggcagccgaagtctgcgagatcgtgcaaaagctgggcgcacagtatgccggcgaatacgcaactgctgagccaaatatgcaaatcagtgcgcttgccggagaaaccagaacggttgatgtgcttacgacggcaggaaccgaaaaggtatggcaggtcttagtatcgcttccagacagtgtgcaggccatgtgcattgatatgcccggactggttcagacatcaaccaattttggaaccttaaagctggaagagaacgcgctctcgatcagcaatacggttcgaagttctatcacggcgcagaaagaatggatcgttgagaagatttccgctatcgtcaagctggctggcggtacgactacgacggatggcaattatcctgggtgggcgtataatcctcattccgtcgtaaaagaaacgatactgtctgcatataagacgctctttaacaaggaagccacggtggaagctgtccatgccggtattgagtgcggcctgttttccgacagcattcccaatctggattgcgtggctatcggccctgatatgggagatgtccatacaccgcgtgagcatcttagcatctcgtcttctcagcgtacttatgaactattgaaattggttctggcagaaagcaaataacaagcgtcgctggactggtatgcgttatccggtaagtacctgataatcgcattataaaagcagccaaggaactttccttggctgcttttgaattacatctacatggcatccctgccgctaaagttaccatcagcggcgggcatcatttttcattccaccaacgccttgcccaaggcgcggcaggcttcaagtgccgcgtcgtcgggcgcctccgtgcagatcacactctcgcaaacgaggttcacccctgcgctgtcgcagtcactctcccaagtgcgcatccactcgccatcgccccagccgtaggaaccgaacagtgccacacgcttcccgccgaggctgcgcttgcaggcatcgaacatgggctggaactccatttcctccagcacctcgctgcccatggcagggcagccaaaggcgatggcgccgtaggtgttcagatcgccgggtgcgacctcggcgggtgtgagcagcacagcctc

SEQ ID NO: 920 - DNA, 20531 bp, Unknown
  16S sequences of unknown bacteria
ggtatggacgctgctgggcgctttgtttatcgcgctcatgatgtatttggccagcgaggccaatatgcagcgttttctgcacctgcttcagttggaatcctatcagctggatggatatggccggtctgtaaaacgcaatgctaggatggatgtatggccggcctggggatgcgcgctagtatatgcggcgttgtgcttgggcggctttgtgttgcaagcggtcttgcaggcggctttgtataacttaatcgtgggggctctggccctgtgcttgttcgttgcgatctgcctggaaacgggaaaacggaaaaaacagcagaaacaaaaaaaggaatatgtgcggacagaccgtatgaaacgcctggaacgctgtacgaaaatggtattggcggcagtttccctaatctgcgttttgcttggctgggccgtcatagcgatgacgatagatagcagcgtgatggtggccgctcttgggtgctttgttgcagcaattctctcagcgcttccagtatgcatgttgccgcagtgggttgtgttggcggctatgttgaggcaacgaccggagcagaagatcaaccgacggtttgtagaggacgccgttcgaatcatagacagtagagatgacctgatccgcgtcggtattacgggaagttatgggaagaccagcacaaaattcgtgctgggaacgatcttgcaggaaaaatatgatgtgttggtaccgcccagcagctataatacgccgatgggcgttacgcgtgtgattcgtgagatgctcaacgataagcatgaggtatttgtatgcgaaatgggcgccaggcgctgtggagagatcaaagagctgtgcgatattgcaaagccaaagtatgggatcttgaccagcattggcaaccaacatttggaaacttttggaagcattgaaaatatccagaaaaccaaatacgaactgatgcagagcctgccggcagatgggaaagcgtttttcccggcggacggagctttgtgcgaagatctgtaccgtcagcataccggccccaagtgcttgtttgggttgacggaggattgcgatgttcgtgctgtaaacctggatgtagggcctttcggcagcgaatttgatttgcagattcgaggggcggatagcgtacactgtaccactgagctgttgggaaaacataacattatgaatgtgctaggttgtgcggcggcagcgtatgaattgggattgacgctggagcagattgcggctgggatccaaaaggcggagccggtggagcatagattgcagcttatcaacccaaacaacgggacgcttgtcatagacgatgcctttaatagcaaccccaatggaaccaaggcggcgatggaggtgctctccatgtatacgcagtttagaaagatctgtgtaacgcccggtatggtagaattgggagaaaaggaagaggaagagaaccaagcctttggggaaagaatggcggctgtgtgtcaatttgtcatattggtaggacagaccagagcgatccctatcaaacggggcctgctaaaggcaggttttccagaggaaaatatatttgtgggtgacaatttagaccaagcaacggagattttaggtgcattgattcggccgggagatgtcgttttatttgaaaacgacctgccagaccactatgagcattgagaggagatacgggcatgaagacaaagctggcggtattttttggcggcaggagcgtagaacatgatgtatctatcgtcactgggctgcaagccattgaacatgtaaacctggaaaaatatgaggtaatccccgtgtatttggcgcgcaatggcgcctggtatacaggggaaaagctgttggatgtatccatctttcaggaatttgaaaagcacgaggcggaagtaacgcaggttcgcctgtctacggtgccaggagagggacttttgacagataaaggcgccttggctgtggatgtggcgctgctgtgtatgcatggcttgcatggagaagacggcaccttgcaaggcctattagagttggcggatattccctatacaagcccctcggtggggggatcggcagcaggcatggataaggcattgatgaaaaaggtattcgcgggttgcggatttccgatgatgccgtctatcgatgtaacgcgccatgcctaccagatggccgatgagcaatggctggcaaagatggaagcgcttggatatccattgtatgtaaagcctgctaacttgggatcgtccatcggtatttcccgggtagaaaatagggatgcgctgaaggacgcgattgatcttgcttttgcctacgatagaaaagttgtggtagaaaagggtgttgcagatgctatggaaatcaactgttccgttctgggtatagcagacgactgccgtgccagcctatgtgaaaaaccgctggggtggaaggattttttgacctttgaggataaatacctgcgcggcggcaagggaaaaaatgcagccacgagacagatccctgcgcccattgaagagactatgacggacaggatccagaccctggccaaacagatttttacggaaatggactgcaaaggggttgtgcggatcgactttttggtggataatcagacaggtgagctgtatgtaaacgaaatcaataccatcccggggtctatggcgttttatctttgggagccctgtgggctttcgtatgaagcgctgatcgatgagctggtagggatcgcaaaatgtgcagctgaagaaaaaaagaaaaacagctatgcttacgattccgcgattctccaaaaggtgagaagcggcggtgcgaagggcataaaaggaagcaaaggcacgaaataaccaaagcggaaaggcggagcttatgagacgtttaggctattggctgatcgggttgatcattctttctttcgtgagcaattttttcctgccatatgcgggccttgtatccgtattgggatatgtggttaccattgtgttgtggcttgcctactatggctacttttcctttggcattttgatggcagggaaatggtatcttgagcgtgagcaggaaaaagagagtgggatagaaagaaaacccaagagcaaacggatcaaacataaggataaaaacggcagaaataagcccggtgcgcatacagggcagcagcgccggcgcagagaggtgcgccatcgttattatacggtgccacctcatgtggtaggccgatataagaacgaatgatattattgttcactaaggagtgagacggttggagaaaatccaaatgaagacccctttggtcgagatgaatggcgatgaaatgactcgcatcctttggaaaatgatcaaggatgagctgattttgccttatatcgatttaaagaccgaagcatatgacctggggctgccaaatcgtgatgagacggatgatcaggtaacggtagatgccgccaatgccattaaaaagtatggcgtaggcgtgaagtgtgccacgattacccccaatgcccagcgcaaagaggagtatgatttaaaacgcttgtataaaagccccaatgccaccatccgtgctttactggatggtacggttttccgtgctcccattgtggtagaaggcattgaccctattgtgaaatgctgggaaaagcccattacactagcacgccatgcctacggagatgtttataaggcggtagagatgcgcgttgatcatccgggtacggtcaagctggtgtatgaaggagaggatggcggacaggccgtgatccatacctttgaggggcctggcgtggtacagggcatgcacaataccgatcatagcattcaatcgtttgcccatgcctgctttaactatgctctgcaaacaaagcaggatctttggtttggcacaaaagataccatttccaaagtgtatgacggccaatttaaaaagatattccaagaggtttttgacagcgaatataaggagaaatttgagcaggctggcattgcctatgagtatacgctgatcgatgatgctgtggcgcgggtgatgcgcagcaagggcggatttatctgggcctgtaaaaactatgatggcgatgtgatgagcgatatggtcgctacggcctttggctctttggcgatgatgacaagcgtattggtttccccggacggtttatacgaatatgaagccgcgcatggcacagtgactaggcattattataggcacttaaagggagaaacaaccagcaccaacccgatggcaacgatttttgcatggacgggcgcattgaggacaagaggagagctggatgggatcgatgcgctcccggcctttgcagataaaatggaaaaggcttgcctggataccatagcaagcggaaaaatgacgggagatttggcggcaatgacatctctgaaacatgcacaaacgctggattctctatcttttatcaaagcgattcgagcaacatttgacgctatgtaagaggaggaaaaaacatgtctttatatagtgattggagaaattatctagaaaatttaacggatgaccaagcggagggctttcagcacgattattatgagcaggaagaaaagctgtatcagaagttgctggctcagtaccccgaaaagatagagggcacttttcaagagcttacggaaaagtatgagttcaaaccgatgatctttgccgggtttatggatggcatcaatgatagtctcaacaacccgtacaagctggaggacttaaaagaggatactaagatcgttttggatgtggattttgaaaagctgtatgccaacatgttggaagcaaaagcaccgtggctgtataatctggacgaatggaacaatgttttttcaaaggaaaagcgtcaagagatcacaaagcagtatcatttgagcaagcaggctgttagccataagattgacagaaatgcaccatgtccctgtggaagcgggaaaaaatataaaaaatgctgcggaaaaaacgcataataaaaagagcaaggcacattttgccttgctcttttgcataaattcttccatttcaagccaagctagggttaaaaccgaggaaaagagggatggaatgaaacgaaaagtttttgcttgcttgataagcttggcaatgctggtatcgctgtcagcctgtgggacggtggagaacagcccaatggaatctgccccgcagacaagtgcaacggccccggctgtggagccgacgggaggacagaaccaaacaacattgtcccccccaacagccgcaagcgacggctccaggtgacacaaccacaacgcatcaaccataaaaggcgtcaaaacgcctttttctttttgagaaatgtttgaaaatttatatattatacggtatactatcatggatgtgtaaatttgggggagtttgtccgcaatagaaagggaatgtgattggtatgagcaagggtttgaaaatagcgataggaatcattttggtcatcgcaattttagcttgtgcttactttttatatcagtccattttaggggattccaataaggcggcggagccttcgcagacgccattgcccattccgaccttggcgcccgcgcctgttgtaacgcctacgccaacagcagacgggatgacggcaacgacgccgccagccagtacgccgggaacgggaacggtcatcaatggccaatgatccatagtgtgaaaagcccctttatacgtgaaaggggcttttttattgaagggacaaggaggattttttttgcagcaaacgattcatggcaacatagcaggactcaataaggctacgatctcccagatagaaacgctttatagctttacgatggataaaagcgaatttgcttccttgacgctgttggagacaatggcacagctgacggcaaagacaaaccgagagatttctgttttgattgctcgtgatggcacggtgaaggacgtatccatcggccattacaacagagcagagatcccggagcttcgtacgatgcgcagcgttaccagactttgcggcgtacgttgcatccatacgcatcccaatgcatcaggcatgctttctgaagtcgatatgaatacgcttcagcagcttaggttagatagcatggcggccgttggcgtcaaagaggggatgccatatcagctatttgttgcctttttaacagggcagcagccccctgtacgcatgataggccccattcctccccaggcgatcgcattgccgcgatggatggaggaaatcgtgcaagcggatagagcggtaggcagatttgaagcctatgcaccgaaccagggaccgcccaaagcggtgttggttggtatggcagaggaaggtatggaggagctctctgagctggcaaaaacggccgggtatcaggtgatcggtaccgaggtgcagaacaaagcgcacccggatagcgctacttatgtgggacgtggaaaggtagcggaattggtatcgatgaaaggagaaaaaggtgcagaggtctttatttttgatgaagagctttccccgttgcagatacgaaaccttgaatatgagacaggggcgaaaatactggatcgcacagccctgatattggagatcttttccatgcgtgcaaaaagtagggaaggaaagcttcaggtggagctggcccgcttacaatatgagctgccaaggctgacaggacaggggcaatcgctcagccgacagggcggcggccggggcacacgcatggggggaggcgaagcaaagctggaaacggacaagcgccgcattcgcagacgcatctttgagctgaaagaggaaatacgccttttggcccagcaaaggcagacacagcggggaaaacgtatgacgggcggcatccctaccatcgctttggttggctataccaacgcagggaaaagcacactgctcaacacgctgtcaggtgcagatgcattggcagagaataagctgttcgctacgctggatcctctaacacgaagggcagagatcaatggccaagaggtgcttttgacggatacggttggatttgtgcaaaaactgccgcatgagctggtggatgcatttcggtccactttggaggaagctgtacatgcggatcttctcttgcatgttgtagacgcttcacataaggagaaagaacggcagatggaggtggtagacgaggtactacatcagctacatgcacataccattccgcgtattcttgtatacaacaaagcggacgtggctggttttgcagcgccaagggacgctgtggcgatcagcgcaaaaaccggacagggattggaacacttgtttgtatgcattcaggaacggctttcggaatcttggtggaagggcaatatattgatcccctatcataggggggatgtagccgcgcaggtgcgtgcgtttggaacgatcttaaaagaatcttatttggaggaaggcacagagataacgtgtaaattgccaaaaggccgctatcagcagattataaagcagctgcaataaaagaaaaccggaaccttggctaggattccggttttatgtttgcagaggaaatattatctgtacatgccgcgacggatcttttcattcatcttgcgaatgctgtgcgcagaatacaacgctaacacaatggtgacgcatacaccgatgattaaatataaaatatcataggtaatcaacgccgcaacgcacaaagctagtgaacagatccctgtcgccacataaggccaggcaaactccttggcaaacttgcttctgtttttaatgcgggcatccagctcaggggtcatttctccaagcatgaggaataccttttttacgccgatataatatgcgtaccaaaggctaaagactccatagataagatacatcacggtgatgatgataaagccgatacccagttcgtttccttgcaattcgcttcctccttcaatcaaaactcaagcttttctgccaggaaggccggcaattcatcctgatgtatgcgaatctgttccatggtatcacggtcacgtacggtaaccgtaccgttttccagtgtatcgaagtctactgtgatacagtatggcgttccgatctcatcctgcctgcgataccgtttcccaatgctgccggacaaatcgtattctacattgtaatgtgcagacaattttgcatacaaagcctcggctgctggcgccaactttttttgcagaggcaggatggcagctttgacaggcgcaatcaccggatggaaacgaagaacaacacgggtatccccgccttccagcgtttcttcatcatatgcatcgcacaaaagggccagtgttaagcgatccaccccgacgctgggctcaatgcagtagggaacaaccttttgaccggtggtaggatccatatactccagcgcttcgccggattccttagcgtgggcctttaagtcaaaatccgtgcggtccgcaatgccccaaagctccttgacgccaaatggataacgaaattcaatatccgttgtggcgttgctataatgggacagctcggctttgtcatgatcgcgcaaagaaatgctttccttttttaggccgatagagtatagaaaatttgtacagaattctttccaataggagaaccactccaaatcttcgccaggcatacagaagaattcaagctccatctgttcgaattcacgaatgcggaaaataaagttgccaggcgtgatttcattgcggaaggacttaccaatctgcccaatgccaaagggtagctttttgcgcgtggtgcgcagcacatttttgaaattgataaagatcccctgtgccgtttccgggcgaagatagatttcagaggtgctgtcctccgttaccccctggaaggttttgaacatcagattaaacttgcggataccggtaaacgaatggccaccgcattccggacagggaatttggtgctcttctatataggcttccagctctgcggccgtcataccatccaccttgacatccaagttgtttttcgcggcatattcctcgatcatctgatcggcacgaaaacgcgccttacaggagaggcaatccattaacggatcggaaaatccgcccacatggccagaggctacccacacctgaggattcatgagaatggcgctgtcaagccccacgttatacgggctttggcgcacgaattttttccaccaagcctgctttacgttgttcttcatttctacgcccagcggaccgtaatcccaagagttggcaaggccgccgtagatctcgcttccgggatagacgaagccccgatttttgcatagcgcaaccagcttttccattgtaaccgtcgacatagtgcaattcctccaaaataaacggatagactccgaaaaatattctactgcttatcatatcaaaaaaaagaaaaaaagcaaagggagaaactttctttgcaccttttgcccgcggccatcgtagtataaagcgaactgacaatcaagccggttcaaaagtatttttctcaaggaggaacattttatgggttgctttggtggaaatgacaattgcttactgtacattcttctgttgtgctgctgctgcggtggaaacggctgcggaaacgggttcggcggtttcggaaatggcaacagctgctgcgatctgatcatctggttgctgctcctgagctgcatctgcggcggaaactccggttgcggcgacgcaacgccttttggcggtaggggctgtggctgcggctgctaagcggtcttaacgctcctgaaaagggctgggaaaccggcccttttttcttgtaatcttgtaagtagaatactatttgctgtttcgcttatcataaactataacgaatccgaccaaaagggagtatgggcgtgaaagcaaatataaaacggaatatcatgtatgcggtatgggccgtagcctgggttgcggtcgcggcactgctatcctatctttggaatgatacacagagccaatggtatatgtcgctggtaaaaccagcctttcaaccgcctggttttgtgtttgccatagcctggagcattctgtatgcgctgattgccgccgatctgtttttattgtttcgggcaggaggatcagccaggattatctatcctttgatactaaccttatttttaggcgcgttgtggaattatgctttttttgccaaggaaaatgcctcggcgggcgtactgattttggcgcttgctgtggctagctgcatatatacggtatggcaggcctatagaaaaagaccgctgtatggctggctgcttttgccctggctgctgtggcaatcgtacgcgttggtgctcaactataccatctatatgataaattaaagagaagttagcagaggagaaacgggcgtaaaactgcgcccgttttattgttttatcccgacagacctggtataataaacgcaacttttgtctaattctgaaacgctgggacgaagttttcattggcccaatgcagtttataaggctggggcggggaaaaggaggcatctagtatgctgcttgctatggatgtaggcaactcaaatattaaagtagggttgtttgagggagaaaagctgatttccagctttcgtatcacgaccaatgcagaccgaagcagcgatgaatacggcctgttgatcattcactttctatcatatttgaaccgaacggcagatgaaatagagggcgttatcattgcaacggtacagccgcagctgcgctacaccctagatcgaatgacgcacacctttttccggtgccatccgatgttcgtttcctatcagctgaatctgggcatcaagctgcaatatgattcgctgccggccttgggggcggatcgcattgccaatgccgtggcagggtacgaattgtatggaggaaacggtgcgtgcattacggtggatttcggtacagccaccacctttggcgtcattagtgaggatggtgtatttttgggcggttccattgccccaggcatccgcagcgccagcgaagcgttgaccagccgggcggcccagctgagaagattcaactttgcaaagccggatcatgtattggctaccaacaccatagaggcgatgcaggcgggcgtgatgtatggctttgccgggctagcggacaacatcttggcaaagctgaaaatggaggttggccctgcgtttgtggtggcaacgggcgggctttcagacgtcatagcaggggatacgcaccacatcaatacagtggacaagcttttgacattaaaaggcttacaaattatatacaacaagaatcgttaagggaggtactcacaacaatgaaacacaaaattgcactcttgggattgggtacggtagggctgggtacctaccagttgattgaaaagaatgcggagattatccgtgaaaataccggggcagaggtagaggtaaaatatgcgctggttaaaaatgcggataaaaagcgcccggtaccgtcggaggtgctgaccacagactttgaaaagatcgtgaacgatccggagatcgagcttgtggctgaggccatgggtggcacggaccctgccttgtcctatgctttggcagtgctcaatgctggaaagggatatgtgacggccaataaggagctgatctccaagcattgggaagaattggagcaggcagcagaaaaaacgggggcggcgctgtactttgaagcaagcgtagcgggggcggtacccgtgatcaaagcggtaacggacagcttatctgccaaccatattacaggcgtaatgggcatcatcaacggtacgacaaactatattttaagcaagatgagcgaagagggtatggattatgcagatgcattgaagcaagcgcaagacctgggctatgctgagccggacccgaaaaatgacgtagagggatacgatgtacaattcaaattggcgatcttggcatcgctggccttcaacaagcgtgttaaggtagacaatattctacgtgaggggattaccaaggtatctgcggacgatatccgtactgctaaggaattgggctatggcatcaagatgctggccatcggaaagcaggtaggcgatgaggtagaggtacgtgtgcatccgacgatgattccgctggatcatccgctgaattccgtgagcgggccgttcaatgcagtgtatgccgataccgatgcagcgggccaattgatgttttatggccgcggtgccggtgatttcccgacggcgagcgcactgcttagcgatgtgttgacggcgctgacggaggataagcatcgccggtatggattcttgaaaaatgagcaagccaaggtaatggatgattttacaagtagctatttcatccatacagaagcaacagacaaacccaatgtattggcatctgcggccaagattttgggagaaaaaggcgtatccattgcagcggtgatgcagcgcggccaggaaaaggatgggcgtgtgccgctggtattcatcacacatcaaactacggaaaaggcgctaatgtcagccgtgaaggagatcgaagcgacagagtactttacgatccggaacatcatccgagtcgagagataaggaggcaaaatcatgattacatctaccaaaaccattgaagtagaagttcgcaaggagatgagaggcggccctggcgaagtgctgaaccaggctctggccaataaggcggatatgccgaagaattgccgtgtattttctattatgacgctgaagcctggctgtggcattgggtatcatgagcatcatggtgagatggagttttatcatatcctggaaggcgaaggcattgtggatgacaatggtacggaaaaaaagatccaggcaggtgacaccatgatgaccgtcaacggggaggggcattccattaccaacaatggagataaagatctaaagatgatcgcttgtgtgattatggactgatgagaataaaaaaagagaccagtgtgaggtctcttttttatttgattactctaaaacaattgccaagaacttggcaggctgatctgtattggactgtatgccgtgcggatacacggaatcgaaatagatgctatccccctcttcaaggataatttccttttcaccaattttgtatttaaggctgccttgaagcacatagtcaaattcgtgcccattgtgcttattcatttttgcaggctctttttcagggcttacggtaacgataaacggataacattttttatggaaaaactgatgtgccagagagacataatcatagccgggatagcgttctacctgcataccccttcccttgcggttgatggcatagacgctgagtttgggctcttctcccgttacaaggttggcaagagatacatcataggtattgcaaaagctggtgagcagcccgatgggaatatcctcccgtgcctgctcatagttgagatactgctcagaagagatatccagcgccttgcagacctcttcaacggatagacccaatgtctccctcacttgctttagatgggaagcgatcatttcaatcggatgattcatgacatgtgctcctttcaacctcccaatagggaggatttctatcattagtataggatagtttgtgattgttttcaagaaagccagcgtagagactcttgacgatatctggggattatggaggacgatttcttgccgactacagagagaatagggaagaaatgccgttgtaaaagatttttttgtatggcatactaaagcattgacaaaacataggagaacaagtaggataaaacgagaacattagttcttaaaatgtcgatttatgaacgcgtgaaaagaaattgtggagggaggcagcgctgtatgagcgatgtgggaacattcaaggtggtttccccgtttgaaccaaccggcgaccagccccaggcgattgaaaagctggcggatggcatcttacgaggagaaaaaaatcaggtgctgctgggtgttacgggcagtggaaagacctatacgatggcaaaggtcattgaaaaggtacaaaagcccacgcttgtcattgcgcataacaagacgctggctggccagctatgcagcgagtttaaggagttttttccagacagcgcggtagaatattttgtctcctactacgactattatcaaccggaagcgtacatcccctccagcgatgtatatattgagaagacaacagccatcaatgatgagattgataagatgcgccatagcgctaccagcgcgctgaacgagcgtagagatgtgatcatcgtcgcgtctgtatcctgcatttatgcgttgggcgatccggaggaatacctaaatttgtccatatctcttcgccccggtatgcagcgggatagagatgatatcattcgccatttggtagatatccaatatgagagaaacgacatcaatttcgtgcgtggcacgttccgagcccggggcgatgtactggaggtttttccggccagccatagcgagcgggccatacgcatcgaattttttggagacgagattgaacggatcagcgaaatcgatacgctgacgggcagccctgtgcgcattttggaccacactgttttgtttccggccacgcactatgcgacaagccaagcaaagctccatgccgcaatggagcggattgaagaggatatgaaaaagcaggcggaggcttttcgtaagcaagacaggctgttggaagcgcagcgtattgagcagcgtactacctttgatttggaaatgatgagagaaatcggcttttgcagcggcatagagaactactctcgatattttgatgggcgaaaaccaggacagccgccctatacgctcctggattactttccggacgattatctgctgatgatagacgaaagccatgtgaccatcccccagatcaaggccatgtataaaggagatttttcccgtaaggattccttggtacagtacggattccgtctgccaagcgcgtatgacaataggccgttgaaatttgaagagtttacacagcgggtcaatcaggcggtatacgtgtctgctacgccggccgagtatgaaacctccgtcagcacgcagacggttgagcagatcatccgcccgacggggctggtggatccagaagtgacagtgctgccggcagagggccaggtagatgatttgattggccagatccgtaaaaccacagagcaggggtatagaacactggttacaacgctgaccaaaaagatggcggagcgtttgacagaatacctagagcagctggatatgcgcgttcggtatatgcatgcggacacagagacaatggagcgtatggagctgattcgagatcttcggctgggtgaatatgacgttttggttggcatcaatctgctgcgtgaagggctggatattccggaagtaggattggtagcgattctggatgcggacaaggaaggatacctgagaagcacaacatcgctgatccagactataggacgcgcagcgcgtaacgtgcatagccgcgttatcatgtatggggataagattacagacagcatgcggcgcgctatggacgagacgatgcgcaggcgcgagatacagttggcctacaacgaagaacaccatattacgccgcacagcgtggaaaagagcatccgcaacgtattggagatttccagaagcgcacacaaggatcgcaaggacagcgtacagctgacgccgcagcagcgacagatgaagatacagttgatggagcaggagatgaagcaggcagccgccgagctggacttcgaacgtgcggcagtgctgcgtgatgagattctggcgctgagggatgggacggtgccggacagaaagaaacaaaagaagagcagcggctataaagggagaaaaaaaggaaaatgaatgaaacgatagaaattcgcggggcgaagcaaaacaatttgaagaacattgatttatcaattccaagagacagtctggtggtatttaccggactgtccggcagcggtaaaagcagcctggcattcgatacgatttatgccgaaggacaaaggcggtatgtagaatctttgtcctcatatgcgcgccaatttttggggcagatggaaaagccggatgtggaatcgattgaggggctttcgccggcaatttcaattgatcagaagacgacctcccgaaatcccagatcgacggtgggcacggttacggagatccatgactatcttcgtttgctgtatgctcgcatcggacagccgcattgccctaaatgcggcaagcctatcaaacagcaaagcattgaccagatggtggaaaacgtgcttgcgatgggggaaggaaagcgtattctgcttttggcgccggtggttcgggagagaaaaggcgaacatgtgaaagtgtttgaggatctgcgaaagagcggctttgccagagcgatggtggatggtgagattatagatctgtcggaagagcggcaaaagctggcaaaaacgaaaaagcacaccatttacgctgtggtggatcgtattgttgtgcgggaagatgcaaagagcaggcttaacgacagcctagaaacggcgctggcgctgtctcagggggttgtaacgatacaggatgctgatacaggagagcagaccgtaatgagttccaactatgcctgcccagattgcggcatcagcatggaggagctgacgcctcgtatgttttccttcaacagcccttttggagcttgccctacctgttcgggtttagggacgctgacaaaggtagatccggcgcttatcattccggataaaagcagatccatccggcagggcgcaatcagtatcccgggatgggatacctcgcaaccgggctcgatggcggaaatgtattttgcggccatggccaatcattatggcttctctttggatgtgccggtatcgaaactgcccaaagagatcattgatcttttcctgtatggctctaaggagaagatagaggtctcctacgataaggcatttggaagcggaaagttttacagcgaatttgaaggcctggtcaataatattgaacgccgatataaggaaacacaaagcgattatatgaaagaggaatatgagcagtttatggccaatgtgccttgcccggactgccatggcgctaggctaaagccggaggtgctgggcgtgacggtaggaggactttccatcgcagagctatccgatttgcctgtttcagagatcaagcatttcatcgatcatttggagctgacggagcgcgaagaaatgatagcgggccgtattctcaaagaaattaaatctagaattggttttttgaatgatgtaggcttggaatacatcacgctgtcaaggacggcatatacgttgtccggcggggaagcgcagcgtatccgcttggctacgcagatcggatcgaggctgacaggcgtgttgtatattttggatgaaccgagcattggcctgcatcagagagacaatgataagctgcttgctacgctgaagagccttcgtgatcttggcaatacgctgatcgttgtagagcacgatgaggatacaatgcgtacggcggatcagatcgtggacatcgggccgggcgcaggggaacatggcggcgagcttgtggcacagggcacagtgcaagaaatagaggcctgcgaggcttccattacgggccagtatttgtccggcaaaaaagaagttgcgataccagagaaaagaagaaaaccaacgggaaccctgcttgttaaggggtgccaggaaaacaacctaaaaaatattgatattaaagtgccgttgggagtgctgacctgcattaccggcgtttcgggcagcggaaagagtagctttgtcaatgagatattatataagtcactggcgcgagatctaaaccgtgcgcgcgttcgtccagggcattacgatagcatgataggtctagagcagctggataaggtaattgacatcgaccagtcgcccatcggccgcacgccgcgcagcaatccggctacctataccggtgtattcgatatgattcgcgatttgtttgcacagacgccggatgctaaaatgagaggttataaaaatgggcggtttagcttcaatgtaaaaggcggacgttgtgaagcatgcaaaggggacggtatcgtacggatcgagatgcatttcttaccggatatctatgtgccttgcgatgtatgcaagggaaagcgatataaccgggagacgctggaagtctattacaaaggaaaaaacattgcagatgtactggatatgacgattgaacaggcgcgcgacttcttttcgccaattcaaagaatccacaggaagctggatgtgctttgccaggtaggcttgggatatatgcgattggggcagccgagtaccacgctgtccggcggagaagcgcagcgtgtgaagcttgctactgagctgtcgaaaagaggaacgggacgtacgctgtatatcttagatgagcctactacagggctgcatattgccgatgtggatcggttggtaaagatcttgcatcagctggtagagggcgggaataccgtggtggtcatcgagcataatttggatgtgattaaaacagcggaccaaattatagacttggggccggaaggcggagataaaggcggcaccatcgttgccacaggaacgccagagcaggtagccaaggtaaaggaaagctatacgggacagtatctggcgccgatcctggaacgccacaggaaaagaagcattgcgaaaagtaaagatgacacttgattttttgtgccttgtacgctataatagcagggcacttgggactttagctcagttggtagagcacatcgttcacatcgatggggtcgctggttcgagtccagtaagtcccaccatatataaaaaacgcaagccatatactgcttgcgttttttttataaattggaaacgcgatattttacaaagaaaagggaaaaccctccgcttttggcggagggtttgtaagggggaggatttgcttgcaattgcttggttgcttgctacgcttttaatatagcgtttggttgtggcaacggtttgtcagcatttcaaccagttatggcgcatgcttttaattattttgtacaaactgtaagcaaggaggaaaaccatgcttacaatttttatgcgcgcattgatcctatatctggtcgtggtaatttttatgaggatgatggggaagcggcagattggccagatgcagccctatgaaattgttatcacgctgctggtggcagacgtagtggctgcaccgatgcaagatcccgccatttccttggtggagggaatcattcccatgattgcattgtttatttgccataatttcatctcttttttatgcattaagagcagaaagttgcgcaaggtattttgcggcaaaacaagcactttgatccgaaatggggtcatcaatgaaaaggagttaaaaaagctaagcctgagcgttgaggagctgatggaggcgcttcgcgcaaaggatgcgttttccctggacgatgtatactgcgctacgatggaaaccaatggacagcttagcgtgatgttccaaaataaaactcagccgcctacgatggaggatcttggcatggttgcaaaggaaaacgatatgccgctgggcattctcattgaaggggaatggcagcaggaaaacctaaaaaccctggggctcacaagccaaggagtagaaaagacactaaaaatatacaaggtggatcggcgaaatgtcttttttgcgatggggaatcgaaaaggagagttgaccgttcagatcaaaggcggcaatttggtgcggtataaagttggggcggtgaaatcatgaaaagactgatatacagcctaatcgcattggctgcgctggtaacggtttcgctggtttgggaagggggctttcaggcagatctagaccgactggaggatatgagccagcaagcacttgacctgctggcagcagaggattatgcacagtctggagagattgtaaggcaaatttcagacaggtttgaagtgttagaggagcgatggaccattgtaatcaaccacaacctgctggacgatatcagcaaccaaaccacagaggtccgtgcgctgttggagcaaaaagaatatgaacatgcagcagcgcagttagctgttgtgaaaacgctgtttcgcgatctttccgatcaatataaattttccttggggaacatcttttgatagaaagaaaaagcttgcaactataaaaatagaactgtactataataacagttcttttttttatgtaaaatcgcaggggttccctggaatggaaaggaatatttggatggtagaagtaagagaagcgaattcaacaaaggagaaaaaggcatttgtaaaattccctttggaattgtataaggactgccctcagtttgtgcctttcttgttatcggatgaattggataatttcaatccaaagaaaaatccagcgtttgatttttgcgaagccaaaatgtttttggcatatcgtgatggcagggttgttgggcgtatcggtgccattatcagccatgctgccaatcaaaagtggggcacaagcagaattcggtttacacgtgtggatttcattgatgattacgaggttagccaagcattattc

SEQ ID NO: 921 - DNA, 2676 bp, Unknown
  16S sequences of unknown bacteria
aaaggctctcaggagctggcaagttcagtgcttcagcctgcggagctgtggcaggaaagcggcagatgggacgcatacggtcctgaaatgtggagaattaaagacagaaacggcagagatttctgcctcggacctacagcagaggaagtgtttacagacataatcaaaagcgatgtaacatcacacagacagcttccgcagatgctgtatcagtttacggataaattcagagatgaggctcgtccgagattcggtatgatgagatcacgcgacttcataatgaaagacaactattcattcgacaaggaccctgcgggtatggatgaaagctatgatttaatgtttgatgcatacagcagagtgttcacacgctgcggactgaatttcaggcctgtagaggcggacaacggcgcaataggcggtaccggctcacacgaatttacggcgctctgtgaatacggagaatctgaaatcgtatactgcgaccactgtgatcttgcgacaacagtcgaaaaggcagagtgcaaggatgctcctgcgcagagcgatgaaatgcttcctctcgaaaaggtgcatactccgggaaccaagactattgacgaggttgcagacttcttaaagctggacaaagagcagactatcaaagcgctgctgtttgaaacatatgatgcagacggaaatgttgaagggtatgttgcggcgtttgtcagaggcgacagagaacttaatatgactaagcttgtaaacgctcttggaattcacgaatatgcaatcgcatttgcagacgaggaaaaaatgtcagcggcaacaggctgcgtaggcggctttacaggtcctgtaggcctgcacgactgcaaggttattgtagacagcgagcttgtgggactaaagaacctgtgcgcaggcgcatgcgaaacagaccaccacttcataaatgtaaactacggcagagattacgagggagatattgtaacagacctcaaggttctcaaagagggagatgcatgccctgtatgcggagcgcctgttaagcacgcaagaggcgttgaggtaggacagatattcaagctgggaactaaatattcagagcctatgggagcaacatacaaggacgaaaaccagaaagaccagcttatctggatgggctgctacggtataggtgtttcacgtacattccaggcgattatagatatgcctgaaaaccatgacgacaacggtatcatatggcctatgtcggttgcgccttaccacgcaattataactattgtaaagacaggcgatgcggcaatggaaaaggcagctgaggatatatatgagaagcttcagaatgccggcgttgaggtgctgcttgatgacagaaaggaaagaccgggagttaaattcaaggatgcggaccttatgggtattcctgttgcaatcacagcgggaagagctgcggcagacggcaaagttgagttcaagcttagaagagatgtcgagaaacaggagcttacaattgaagaggctgtagcaaagaccattgagattgtaaacagagaaaaagacggcagacacttctttaataaatagtgagcttgcacaaatcaaaaggaggttattatgtcaagacgaaatgacagctgggtatgccctaaatgcggcaacagaggagcagacgtcgatcagcttcaggcaacaggaggaaactttgccaagctgtttgatgtgcagaacaaaaagtttaatacagtaagctgtaccaagtgcggctatactgaattatatagaggagaaaccgatgaccttatgaatgttatcgatttcctgttcggataaggaggaaaaaatgaaatacgttgtaatagaaatggaaaacggcgatgttatgaaaggtgagctttatcccgaaatcgcgcctgaaacagtggcaaactttgaaaagcttgtaaatgaaggcttctatgacggacttacattccacagagtaattccgggatttatgatacagggcggctgccctctcggaaacggtacaggcggtccgggatacggtatcaagggagaattctcagccaacggatttgaaaacaatctgaagcacgatagaggagtgctttcaatggcaagagcaatggatcctaactcagcaggctcacagttcttcattatggttgaaaaagcgcctcaccttgacggctcatatgcagcattcggcaggattatagagggtatggaagcggctgatactatcgtaaaccagaagagaaacatgatggataagcctaatgtgcctcaggttatgaaaaccgttaaaatcgtggaagaataagaattgctaaaacccgcagtttggcctgcgggttttatagtacccgaaaacagcctgcgctccggcgcagcgtgagagggaaagctatggcccaatatgccgtattacacataaaccgtccgataaaatcagaagacctcattttatttagcggtttgcgttcaaaaaagcgattgaccgctgaataaaaaaatattaaacatttttcccctttgtcaagtcctgtataacagttgaaattccaactagcaaataaatttcacaaatggaattgactgtaaaaacaaggtgtgctaaaatggtagcatagaaaatttgtaaagacgcacagataagccgtttaggctgaattaagtttcagcttaagc

SEQ ID NO: 922 - DNA, 2809 bp, Unknown
  16S sequences of unknown bacteria
gtgtgccgtcagcacccaagtgtccatcgccttttcctccagcagaatagatagattttattatagcccttccccgcaatcctgtcaatttgcttatatttctgcttttccatgttttttcgccgcaaaaaaaagggatttcaaaaatttctgcgtatatataaaatagtatgaaaaaagagcgttgccccatatttttcacgccaaagcggaataaacggttttcttttgggcaaaatgttcacaaggaggggaaacatgtcaattccagccaattttttggatgaactgatcgcacgcagcgatattgtcgatgtgatatccgactatgttcatttgaccaaaaaaggcagcaaccttttcggcctgtgccctttccacagcgaaaagaccggttccttttccgtttccccggataagcagatttaccactgctttggctgcggcaaaggcggcggcgtgatcaacttcatcatggaagaggaaaacctctcttttccggacgccgtccgtttcctggccaaacgcgccggaatggaggtgcccgaagaagaccgccatggcgaaagcagccgcctgcgcacacgcgtactggcactgaataaagacgccgcccgcttctattataagctgctccagggaagcgaaggacgttccgtgcagcaatacctggaccgccgcagaatcacccgcaaaaccgccgtgcgctttggcatgggggcatccatcgaccagtgggacgcgctgatccaggccatgatcaaactgggctataccaaagccgagcttttagcggcaggattggccgtgaagggtaaaaacggcggcatctacgataaattccgcaaccgcctcatgctccccgtcattgatgtgcggggcgacgtgatcggcttcggcagccgcgtgctggacaagtccgagccaaaatacatgaatacctcggaaaccattacatatagtaagcgccgcgcactgtatgccatgaacctagccaaaaagtcgaagcgccccaatatcatcctgtgcgagggcaacctcgacgtcgtcacgcttcaccaggccgggttcgacaatgcggtggcttccatgggcactgcgctgacagtggagcagacaaggctcctgtcccgctacaccaaggaaattgtcatttgttatgacaacgacaatgccggaaaaatcgccaccgagcgcgcattgcagctgttgaacaattcggagttttccgtgcgcgttctgcagcttcccaatcgcattgtgaatgggaacagcatcaagcaggatgccgatgatttcatcaaattccagggtcgcgaggcttttgaacgcctgctcagcggcagcgaaaacggcgtggaataccgcatggccgtgattgcatcaaaatacaatctcagttcagacactcagaaggtggcgtactcccgcgacgtcagcacacttttgtccaccttggagaaccccgtggagcgcgaagtttacgccaaccgcgccgctgaaatatgcggcatcagtgcccaggcaatcttgtccgaggcccggcacgcattccgcacccggcagaagcaggaccgcgccaaacaacagcgcaaagatttaaatccggccctggaactccaacccaaagagcgcggcgcccggtatgacaatcttcgctctgcccgagccgaagaaggcattatccgccttctggttctggacagcgccctgttctttcctacggcgcccatcgctccgcaaaccttttcttctcctctgctggccaaaacctatgccgccctgctgcgttgcgcccaggaaggccgcagcaacggcattgccgttctgtcggaatgtttgactggcgaggagatgagccacatcactaatatcctgcagcagccggaatccgccgcatggcgggaacaggccctgcaggactacatatccattgttcaaagcgaggcggccaagcgcagccgcgctgcggcagaagatcccctgaccgcagccattgagaaaaataaagagaaaaaacagtatggaggaaaacggaatggctaatacaaagaaagcgcccggcaaggagcgcagtaccgcagaggtcgaggcagccgtgaaggaaatggaaacacaaagcgtcaaggacagcaccaaagaggctgccgccggagagaaagattctgcaaaaaagaatacagtcaaaaagggttccatgaaaaaagcggccgcctatgcagaagagacagaactgggtacaaatgcagccgataaagccgaagaaaacaccaccgaagtcaaaccgaagctgaccggcaaactggacgagaaaatgatcgcctccctgcctgcttccaccattatccaggccagcgaaaaactgcgcgacctgctcatcaaagggcgcaaaaaaggaaagctcgactctgccgagctttctgaagtgttggacgatatggatctggaaagcgaccagatggacagcatctacgataccctcgaactgctgggcatcgatacggccggcgacgattatctgcccgaacccattgacgacgcggatccgcccctggaggagatcacagaaatcgaagaggaagaactggtcgatcccaatacactggtggataacttcagcatcgacgatcccgtgcgcatgtatctgaaggaaattggcaaagtgccgctgctcagccccgatgaagagatcgatctggcccagaaaatggccgaaggcaacgaaactgccaaacagaagctggccgaagccaacctgcgtctggtggtatccatcgccaagcgctatgtgggccgcggcatgcaattc

SEQ ID NO: 923 - DNA, 4286 bp, Unknown
  16S sequences of unknown bacteria
attctccagccttatgtcggtatttttcttttctgtactacttatctgctcagtggtcatcacctgaccatacctttcctgtttacttctttatcgcgccgtaaagctccattatcctgtccgcgcactcattaacgccaagcgcgtcgagcggtaaatgcttcccgttctcccgcacgccggcaagatcaagctcatagagaagctccgccgtctgcggcacgtcgagccctatcatctgaagctcggaaacgtgcgtgaagacctcctccggcttcccgtcaagctgtatctgcccgtcgtttatcacgacgacccggtcgcacatcgccgcctcgttcatatagtgcgtgatatgcagtatcgtcagcccatgctcccggttcagcttctttatcgtctccatcacctcgcgccgtccgcgcgggtcgagcattgcggtcgactcgtcgaaaattatgcactccggcatcatcgcgattatcccggcgatagctatcctctgcttctgtccgccggacagctgatgcggagaatgccgcctgaactcgctcatcccgacggtcgccagcgcgtcgtccacccttttccttatctccgccggcggaacaccgagattctccggcccgaacgccacgtcttcctcgacaatcgtcgcgacgagctgattatccgggttctggaacaccatcccgacccgtctccggttctcgaacagctcgtcctcggtgagatcaggcgacgttatatcaagcccgtcaatcactatcctcccgctcttcggcgagataatcagattaagcagcttcgccagcgtcgatttccccgacccgttatgcccaagcaccgcgacgagcgaaccccgctcaatctcgagcgacaaatcatgcagaacctcattctccccgccgtcgtcggtcgggtacgcgtagctcacattctctattttaatgaaaggatctttcactgtttctcccgctttcacttatcgttctcatactcatggtaattccccatgaacctgaactccgccaactcgtcgttcagcgcgcagacaaggtcgaacaccgcctcatcccgcatagaaccgacaaaatcaatataaaacagataattaaaaggcttcgacggtatcggtctgctctcgagcttagtaaggttcagccccagcgccgcgaaatacccgagtatccgcgcgagcgtcccctgccggtgctcaagcgaaaaccgtatcgatatcttatccgcaccggaaggaatcgacaacctgttggatatcgacacaaaccgcgtagtattatgcggctcatcctgaatccccttctcgattatctgaagcccgtaattctccgcgcagtcaacccgcgcgatagccgcgagctcccgtctcccggatttcgcgaccttctccgccgcgacagccgtattagccgccgcagtctcagtaaacccatgcgccgaaatatatcccgcgcactgcccgagcgcctgcggatgcgacgtcacctcacgtatctcatcgaccgtaacccccggaagcccgagcaggcaatgctccacccgcagtctgtccgacgccgcgatataagcgtcattatcaataatcagccggtaaacatcagtaaccgacccataagtcgaattctcaaccggcaaaaccccgaagtcaatatccccccgtttaagagcctcaaatatcccggcgaaatccggataaaactcaatatgcgcctccggataaagcttcctcgccgacatctccgaataagcccccggcaccccctgaacgccgacataaagataagccgtcccgcgctcccgcaccggcttcaaagcgtccgaaaaaaacttccttgacggcgacgacttactcttaagccgatactgatgcaatttcgacatattcataatcccgtcaaacgtcccggtaatctccgcccgcacgtcctccggacaccgtgccgccacatcctcaagcacagccctctcgcgcccctcgtcaaacaccttcatgtcattctcaatcttataccgcgcgacactctcagccacccggatgcgccgctcaagaagctcaagaagacgactgtctatctcgtctatttccttcctgcattctgaaagatctttcaccttcgtatgcgggggaaggaaaaccctttgaaaagggttttccctcccccgcccccctctctttctcaaactttatacatttttttattaagtcacttcgccgaccaacgcgaactcgaaccgcacggaagcacagcgcccgtcgacgaaaccggcaaacctatctcgtccgaatccactcgaccattatagcgcgccatagcaagatgaagcaaataccccatacaactcggcgacaaccctgtagtatacgaattcacaaggaaaaacaacggctcctcactcagaacgccggtagtcagccgtatcagcgggtcaatcgactcctcaagcttccaaacctcgcccgaaggtccgcgcccgtacgacggtggatccattatcaccgcgtcatacttattcccgcgccgtatctcccgctccacaaacttcttacaatcatcgacaatataccgtatcggagcctcggcaagcccggacagcgccgcgttctccttagcctgcgccaccataccctttgccgcgtcaacgtggcacacactcgcccccgccttcgccgcagcgacagtagcgccgccagtataaccgaacagattcagcacctttatcggtctaccagccttcttaataagctcggaaaaccactcccagttcaccgcctgctccgggaacagcccagtatgcttgaaccccatcggctttatgacaaaccgcagtcccaaaggctcatacactatattccactccgcgggaagccgattctcgctccacgcgccgccgcccttagacgaacgcttatacgacgcgtccgcgcgcgcccacatcttcgacgatttagcgtcgcgccagatcacctgcgggtccggacgcacaagcgtatattttccccatctctctagcctctcgccgtccgacgtgtcgataagctcataatcctgccaattaccggctgtccacataaataatcctgtccttccatgttctcagccgtccggctgtttatcgcgttcagtcctgatctttcagatctttcttagcgtccgggtcgagcgactgcgaaaaaatatcgagctgacccgaaaccctcttatcctgctgcttcggcgcctcatacggcagattcagatgctcatacgcgagcctcgtcacgcaccgtcccctcggcgtcctcgaaagaaaccctatctgcatgagatacggctcatagacatcctcgagcgttatcgactcctcgccgatagtcgccgccagcgtctcaagtccgaccggccccccgccgtaaaacgaaattatcgtctcgagcatccgcctgtcgatattatcaagccccagctcatctatctccatcatcgcgagcgccgccgcggctgtcttctggtcgatatgcccgttcccgcgcacctgagcgtagtcgcggacacgcttcagcagtctgttcgcgatacgcggagtcccgcgcgagcgcgacgctatctcaagcgacccgtcaaggtcaatatctatcttaagtatctcagccgaccgtctgacgataatcccaagctcctcgaccgtataaagctccagtctcatcggtatcccgaacctgtcgcggagcggcgtcgaaacctgtcccgcgcgcgtagtcgcgccgacaagcgtaaacttcttaagcggcagatgcacgctctgcgcactcggccccttaccgatgattatatcgaccgcgaaatcctccatcgccgggtaaagtatctcctcgaccgtccgcggcagacgatgtatctcgtcgatgaacagcacgtcgttcttctcgagattcgtaagcagcgccacaagatcccccgccttctcaatcgccggtccgctcgtcatccggatattcaccccgagctcatgcgcgatgatattagaaagcgtagtcttaccaagtcccggagggccgtaaagcaaaacatgatcaagcgactcctcgcgcatcttcgccgcgtcaatcgcgatcttcagcgtctccttagccttctcctgaccgatatactcagacagcctctgaggtctcagcgacccctcgtccgcgtcgtcccccggctcatactccggcgacgatatcctgtcctcataatcataatcaaactcctcgtcccgcatctgtcacacctccgatcatcttaaca

SEQ ID NO: 924 - DNA, 16912 bp, Unknown
  16S sequences of unknown bacteria
gagcgcgcctgacctctatgtcacgcgcgaaaactcgctcggagcgctgaacggcgaccacgttcaggtgaagccgatcggcccgcggacaacaggtcgtcactatgacgtcaaatacgagccgcgcggaaaagcgaagcaccggaaaaaccgcgctgcggacaagcttctgtcggttcctgaaccggaacaaacagaagaagccgtcgtcacacgcgttctcgagcgcgccgtaaccgaagtcatcggaaaattctgcgaaattatcgagcgtccgccgctgccgaaggggcgccgccgcacgaaaaagggcgcgaaactgccaagaccgaccgcgcattcgttatttatcgtccatccagacgacccgaagctgacttttcggatccggatcgcgccgtcaatgcgcggtgcggcgaaggatggcgacaaagtactcgtcagattgaccaaatacccgctcccgtcgaagctcaaccatcacactgccgaaggcgacgccgccggaaaagtgctccgggtattcggagacagcgagtcgcgcggcgcgaattatcaggcaattctgtacgaaaacggggtgcgaacggtctttgatgaggatgttttgtctgaagcggagcgcgtcgcggcggaaaaaatcgttccggatgggcggctcgatctcagggatgagacaattttcacaatcgacggtccggacgcgaaggatttcgatgatgcgatttcactaaagcgcgacggcggcaggtaccttctcggtgtgcatatcgccgatgtttcgcattatgtaaagccaggcggagcgcttgaccgcgaggcgtttgagcgcgggacctcgatttatttcgcggaccgcgtcgtgccgatgctgcccgaaaagctgtcggacggtgtctgctcgctcaaccgcgacaccgacaaatacacgctcagcgcgctgatttcgcttgacgctgatgcaagaattatatctgtagagttgcatgaagcaatcatttcgtcgaaggtcaggggagtttatcccgagatcaacgacgttctcgaaaagcgggaagggtcggaattctggagcaaatacgcatttttgttcccggatacgctgccgcttatggttgaattgtacgaaaaactcgcgaaaaggtcggcggagcgcggagctctcgaaatggagacggcggaggcaggattcgtcctcgatgcaagcgggatgccggtcgacgtcatctgccgctcgcgcggcgtctcggaaaaaatgatcgagcagttcatgctcgccgcgaacgaagccgtcgcgggatggctgaactcgctcggaatgccgtgcgtctaccgcgtgcacgacgcgccgaacgccgaaaaagtgcagaatttcgcggtcttcgcgcacggtctcggactcgacatccgcccgctcaggcgaaagaatctcgacgcgcgcgcgttccgcgaggtctacgacgaggcgagagagaaggggctcgacggggttctttccgtcattttgctgagatcgctgatgaaagcgaaatattcctcggtcgccgcgccgcacttcgggctcggatgcgagctttactgtcacttcacgtcgccgatacgccgctatccggaccttgccgtgcacagaatcgtccgcgccgtgcttcgtggggacataaatacgacaaattttggtgattttgccgagaaggcagctgtgaaatcgagcgaaaatgaactccgggcgctcaatgccgaacgggaaatcgaagatctctacaaagttctctatatgtcggacaagatcggcgaggagtttgagggcgtaatatcgtctgtgaactcgttcggatttttcgtcgaattgcctaatacggttgagggacttgtcccgatcgtgtcgctcgacggatatttcgactacgacgagcgggcgatgacgctcacctgcggaaagatcgtctaccggctcggcgacaccgttcggatcagggtcgtcaggtgcgacaccgttacgagacgcatcgactttgaaatctgttgatttcaatattattatcgtcatttttgtcgttattgttgtgcactatcgagcatccacgcgaggatcgcgcatcgcatcgtgtccgccgtcgcgtgaagcttcggctttcggtccgatgaaagcagcagcacggtcagcggcgcgccggtcccgcggctcaggctgagcattctgcgacaaaattcaaattttgccagctcgtccggctcgccctccgcgtggtccgcgaggagaaccagctcatcgccgccaaaatcctcaccgagcagcaggcgcagcgtcaccggatccgcgtagccgagctccgggagcgaattcgcgcggcgataattattcagcgaattgcacaaatcgttcgtcattatgccgaagctgtcgcgttcatacctgtagagaccgaggcggtggagctcttccgctatgttttcgacgagggggttcttctcgcccggcaggattattcccgtcattttgaccaaattcgattccggctgcgtgttcataaattttccttccttattatatgtggtttcaggattagtctgcgcgggcggcggcgcgggatactttgaaatccgatgcaaattgacagaaaattaacatataatccttgaattgtcggcgccgcggtggtataattagtatgttggcaaatgtgtcgaaaatacgatcatcatatctcaccacgtacctgtttgcgacaggtaactgtgcgttatttatatatttacatgattaaaaagaacgtttctattaaaattgaatcatctcacgatcagatcgcggtcactgaggaagcgcgcggcagccggattgtcgacgagaccgaactcgaaaccgactccgaaaagttcgaaatgacgaccgagggcatcctccgcgtcgtcgacgggcggatcgagatcgaatatttcgagaccgaaatcaccgggatggctggcgcgtgtacctgtctttcctttgaatacaaaaatccgggcgttgtgtcactgctccggaccggcgtcgtcgagtcggcgctcgtcttcgaggagggcgtccggcacgtctgcgtctacacgacgcctgagctcgctttcgaagtctgcgtgaataccgctaaagttgtgaacaatatcacgacgaacggcggcgagcttttcctcaattacacgatcgagttccgcggggcggagaaggaaagcacattcattcacattgcaatcacgcaaatagacgttcctgttaaaaagtcggacatagatacagttgaagagctcattagctccgtctttttgaacaacggcgaaaacggggatcatggcggcgtcgatccgtcgtcggttgtgttcgatgccgacgagccggaggacgagtgacatggcggagcagcggaaaaccggcgtccgtcaaaatgacggacggcagggcggtctgcggcagaaaattaccggtgggcagttccggaccgagatgcggcaggcgcgcgcgggagcttttctcttcttcggggacgaaaatttcctgaaaaggcgcgagctcgagtcgcttcgggacaaaatctgcgccgacgagaatgccgcggcgttcaatcacttcatttttacaaatgacaactacgagccgtccgccgtccggaacgcaattctggcgcccgcgatgatggcggacctcaaactcgtcgagatttacgcgctgccgttcggcgattttcgcaaaaaagacgacctcgagggcatcgaaaactggctcgaagccgcgaaggacagcgtcgacacgttgactgttgtttatactacagttgaaacattcgacagcggggacgccaaatcgcccagcgctatatataaactcatttcaaaatacgcgattcctgttgaatttgcacatgaaccgacgcagaaactcgtcatgtgggtgtcaaaacacttttccgccgacaagattatcgcggaaccgtcagaatgcacatatctcatcgacaccgtcgggcacgacatgactacgctcgcgaacgaaattgacaagctctgcgcgttccttcattttaagaacgtcgaacggctcgagaaatcgcacattgacctcgtctgtccgcacaacaaggagatcggcgcgttcgagttcgcggacgcggtgcttgagaacaatctcgacaaggcgttcaatattctcggcgatatgaagaaaagaggagaatctgtacaggttattttgggcggtattgccaagatttacacagatctgatgctactcaagacattttccgacgccggggtcgggtctgacgaggcggcgaagcggctcgggctgcatccttttgtcgcgaagctgcggatgacgaaggcgaaactgtgcgacgagcgcgcgctctcagcggtcatccggctctgcgcggacaccgacgcggcgctcaagagcggttccgcggacgattatctgatgctcgaacggttgataatacaggcgggactgctgcggaacaggcgggtgtggaactgatggacgggcaaaatagcactaaactgcgagttgacattccgattgcggttgaggggaaatacgacaaaatcaaactttgttcaataattgacgctaatattgtaacaaccgacgggttcggaatcttctcgagcgccgagaaaacagcactcattcgtcgaattgccgaacctcgtgggatcatcgttctgaccgacagcgacggcgccgggcttgtcatccgcaactatttcaggtcgattctgccgaaggacaagctcatccacctctacacacccgaaatcgtcgggaaggaacggcggaaaagggctccgtcgaaagccggttttctcggtgtcgaggggatggaggcggaaatgctgcggaagctcttcgagccgttcgcggttaattccgataatagttacaataaatttacaaataagcagcagatcacgaaggcggacttcttcgcggatggactttccggcggggaaggcagcgtggaacggcggaacaggctcgccgcggcgctcggacttccttccgggctgtcggctaacgcgctgctcgccgccgtcaatatgctatgtggtcgtgacgaatactcgaggattgtaaataatgattgctaaattaaagaatttatttcataaatattatgaaataataagctatgtgttcttcggtggactgactactgtcgtcagctggatattctactacctgccgctgtttctcggcgtcgactacagaatatcgaaagccatctcgtggatcgccgccgtcgtcttcgcgttcttcgtcaacaagcactgggtcttcctcgacaaggactactcggtgaaggcgctgctgcggcagggcggggaattcttcgccagccggatcgcgaccggcgtcgtcgagttcggactcaccgtttttctcgtcgaagtcgtgaaaatcagcgacaaaatcgtgccgattccggtcgcggtcatcacgataatcctgaattacgtactctcaaagctgctggttttccgcaaaaaatgaaagccagcctgacacaacttgcaaaatcactgccggaaaccaaggaggcatattaccggtgaaagttaagttttctgtcgaaggaatgagctgcgcggcttgttccgcttcggtcgaacgcgtctcgaaacgcgtcgaaggagtcacgaacgcggaggtaaatctgctcgcgaagacactcgtagtggagtgcgaaaaggacactccggagctcaggcaaaagataattacggctgtagagaaagcgggattcaccgccgcgccagccgatcagaaggcggaagaagccgctattattaatgaagacaagaaaaaggagaagagcgaagccgagaatatgaagcgtcggctcatcgcctcggtcgcgattttagcggttcttatgtacctcacgatggggcacatggtcggactcccgacgccgcatattttccacggtactgaaaatcttgtcgtatttgcctttactcagcttcttctgacacttcctattgtatatcttaaccgaaagttctacatcgtcgggttcaaggcgctctggaacaggtcgcccaacatggactcgctcgtcgccgtcggttccgccgccgcgctcatctacggcgtgttcgcgatctacatgatcgggtacgggctcgggcatggcgatcttgaactcgcgaaaacctacggttccaatctgtatttcgagtccgccgcgatgatcctcaccctcgtatcggtcggaaagttcctcgaggaacgctcgaaaaacaagaccggcgccgccgtcgagcacctgatgaagctcgcgcccgacaccgccatagtcgaaaaaaacggcgtccaggtcgaagtcaaaacctccgcgcttcaggtcggtgacatcataattgtgaagcccggacagtcgcttcctgcagacggcagcatcgtcgagggcagctcgtcaattgacgaatctgcgctcaccggcgagtcgattccggtcgaaaagacggtcggcagccgcgtcatgaccgcgtcgatcaacaagaccggctccttcaaattccgcgccgaaaaggtcggcggggaaaccgctctcgcgaaaatcatcgacctcgtacgggacgcgggcgcgaccaaggcgcctatcgcgaagctcgccgacaaggtcagcggcatcttcgtcccggtcgtcatgtcgatcgcggcggtcacgctcatcgtctggctcatcctcgggcgtagcttcgatttcgccctgtcgcgcggcatctcggtgctcgtcatctcctgcccctgcgcgctcgggctcgctacgcctgtcgcggtcaccgtctcggtcgggcggctcgctgaacgcggaattcttgtcaaatccgctgaggctttggaaattctgcatgaaacaaaaactgtcgcgcttgacaaaaccggcactattaccgaaggtcatccgtccgtcaccgacgttatttcggaaaacgaggacgagcttctgactgtcgcggcggctctcgaggcttcgagcgagcacccgctcgccgaggcgatccgcgcttacaccgacgaaaagggcttcgctccggcgaaaatcgacgatttctcggctgtccccggacgcggcgtcaaagccgtgatgaatggcaaaaacgttgccgcgggcaacatcgcgttcatgaaggaaatcggcgctgtgcaaaatgacgaatacgcctccactctcgacgagctcgcgaagaagggaagcaccccgatgctcttcgccgtcgccgggaagctcgccggcgtcatcgccgtcgcggacaggatcaagccgacgagcgccgacgccatctcgaagctccactcgatgaatgtaaaaacaatgatgctgaccggcgacaaccggctcaccgccgaagctatcgcgaaagaagccggcgtcgacgacgtcaccgctgaagttctgccgcaggacaaggaacgcgtcgttgacggactgcggaagaatggcatcgtgacatttgtcggagacggcatcaacgactcgcccgcgctcacccgcgccgacgtcggaatcgccattggctccggcgccgacatcgcgatcgactccgccgacatcgtcctgatgaaaaacgacctcggcgacgtgccgaccgcgatcgacttctcgcgccgcaccatccgcaacatcaagcagaacctcttctgggcgttcttctacaacacgctcggaattccggtcgccgccggagtgctcgcgccgctcggcgtcacgctcagcccgatgctcggcgccgccgcgatgagcttatcgtcgctgtttgtcgtcacaaacgcgctcaggctctacaaaatcaaaatgctctgataatctggaaaatctgcccgccgacggctgaaaaacgtcggcggcggacaaattccttccttattatatatacaaacccaaaaggagattttaccatgaaaaagatcactatcgtcggaatgcactgctccggatgtacctcacgcgtcgagaaggcgctgaaggctttcggttctaccaaggtagacctcaaaggcgggtacgccgaagtcgacacgaccgccgctgacaacgacctcaagaacgccgtcgaggatctcggcttcgacgtcacgaagatcgagaccgtctgatgcgctcggaaaactcagcgcggaacagtctcgccgccatcgccggacagaccatctcggtcatctttgggtttattaccagatactggttcataagggtgctcggggaaggctatctcggcgtcaacggcgtcttctgctcggtgctgtcactgctcagtctgaccgagctcggactgggcagcgccatcacatacgcgctgtaccgccctctcgccgaccacgacgacgaggcggcggggcgaatcatgaatctctacgcgaaggcttatcgggtcgtcgcgctcgttgtgacgctcctcgggctgtgtctcgtgccgtttctcgggtttatcacgagagacgtgccggaagtcagacacgtcacgctcatttatctgctcttcctcgcgaactcggcggggtcctatctgttctcctaccgtcgcgcgctcgtcaccgcgtctgagcgcgactcgagatcgacgctcaatctcgcggtcttctcggtgttgcagaatttagctcagctggtaatcattatcgttacagggaattatatcctgtatcttgccgcgcagatcgtctgcactctcgcctccaatattgaaatatcactcgcggcgaagaaaatgttcccgttcctcgggaaaactaaaggtctgccggacgaagaaaccaaaaagagcatcgccgacaacgtgaaaagcgccttcatcagccgcttcgggagcgtcgccgtcaccgggaccgacaatctgctcatcgcttcgataaatgtggtgctcgtcgggctctactcgaactacctgctgatcctccagaccatccagaccatcctctcgcaggtcatgaacgccgtcaccgccagcgtcggcaacctcatcgcggaggtcgccggggaaaggcggcgggaaatctatttcgacataaccttcgccgtcgcgtggatgtacgggttttcggcgatcgcgctcgactgcctgatgacgccgttcatacgggtcgcgttcggcgcggggcttgatattccggagaccgccgtgcatcttatggcgctcaacttctacctcgcggggatccggcagccgaacctcatctatatcaacgccgccgggcttttcagaccggtcaggtacaagggcttcgttgaggcggcggtcaatctcggcgtgtccgtgctgtttctccggctcgggatggggcttgacggggttctgctcgggacgacgatttctcacatcgcgacgagcgtctggtgggagccgctcgcggtcgaccggaactgtctgaatgggtcgatgaaaaaatggatgacaaataatctcatcttcggcggtgtcgtcgcgctcgcggggtggggaacgttcgccgtctgcgatctcctgccgggcggaatcagcggattcgcgctcaggatgctcgcggtcgtcctccttccgaacgccgttttcctcgcgctgtccttcaggcggggggaattcagattcttcaccggcgttgtgaagcgcttcgccgggaagattctcaggcggacgaaataacggtacacaaacttcagccccgaaaaacatcagaatatacaaatcccggcttgacaaacacgccgggatatgttataattatttgaaaaccaccaacaggaaggtctgaaaatgaagctcgctgtcattatgccgccggtctacacaatgccgccggtctcgggcggcggtatcgaacgcctcgccgacacattctgccgtcagaacgaaagcgcggcggatccgctcgatatcaccgtcttctcccgcggggacgaaaaggacgcgccggaaaacccatatattcacacaaaatttacatatataaacgtcacccgctcggagccgccgtctaaccggttcgatcagatccttcacggagacaaaaacgggacgagattcgactacctgaaggaaattcaaaagcggcttaaggcggagaatttcgacagaatcctgctcgaggactgctttgagttcgcgcggtatatagacggggagaaaattctccacgcgcaccaccgcttcttcgacctcgaaaagagcgcgtccgaccgcggcgcggacaaagcgatcgggttcagaaaacggttcgacaaggtaaacaaattcatatttccgagcgaattcatgaaaaaacaggcggtatctctcggcgtgccggatgggaagtgctccatcgtccatgacgcggtcgacctctcggtcttcgacccggagagattttccgatgtcagggcggagaagcgcgcgaaatatcgtctcggggacgacgacattctcggcgtcttcgtcggcaggctcacgccggagcgcggcgcggtcgagatcgtcaaagccgtcgcgtcgagcgagtatcaggcgtccgcgatgaagctgctcatcgttggctcgagcgagtacggcgccgacatccgcgacgagtaccgcgaacagctcgagtccgccgcgcccgccgtcgatttccagaacccggacgaacagttcgccgggaaagtcatattcatcggcagcgtcaaggcgaggtcgaccgcgagattcctctcccgcgccgatttcgccgtcgtgccgtcggtcgcggacgaggcgggcgggctgccggtgctcgaggctatggcgtgcggactgccgctcgtcatctcggactcgggcgcgctcgccgaatatgtcggggaactcgccgggacagacaactgtatagttgtaaaacgcgggctcgggtacgccgaaaacctcagacgggcgatagataagctctcggacgacctgcacgaacaccccgaaaagcggggaaccatcgccaaaaacgcgagagagcacgccgccgggttctccggggataaattttatgcggaaatgcgtgatgttatcgggtaaaaaaagagaagccttttcgacttctctttgaatggattccgaggctttcgccgcagcgaaagcttcctcgcctcccattttgcggctggttttgcgaagcaaaatcgatgtcgtaagacagcgaaagccgtaaaatgtctggcttgaaagatttatctttcaagctttatcctattgcttcagttgttttcttaatcgcgttcccgagggtggacttgctcgacgctatcacgctcgcgagctccttgccgttcgtcatcgcgtccttcatggtgtccatcatgccgctccactggtagaggtcgcagttatcgaggacgaaattgttcagcactatgtcgagcatctcggacgactcgtcgtctctgagcaccttgccgttcagaaccgtgtcataatacggcgcggacaggtaattcttcgactcctccgcgatcgcctcgattatgaaaccggtgcgctccgggtttgacgcgttcaccggcacaaccaccgggctcaggcaccagccgtcgacgtactgaatgtactcctcctgcgcctcgtcgtacttcgggaccggaaggatgccgaacgtcacgtcgtacgggcgcagcctcttcgccgcgtcgagaacttcggtcaggaacagcgaatgcccgtcgtagaacgcctggagaatatccgcgtcctcgccctgatagtacaccttcttgtccgaaatcatgtcgcggatcttgccgtaaacctcagttgagcgcgcgccgccgaccgcaacctgcgggtgattctcggaatccatcgtcgtcacaaactcgccggagccgtaatagaaaattacgccgccgatatatttctgccaagccatgccccactggtcgtcgagtgtcatctgcgtgtcgccgttcaggtcctgagccgcgccggtcgccatctcgttgaaggcgtcgatcgtccactttccgtttctgaccatctcatacggatccgcgaggttgctctttccggcgatcgttttgttgaacatgaacaaacggatcgagtcgtagccgttcgtcgttatcgcgccggtcgcgtaaaagagctttccgccgtaattcagcgtgtccgagaacatactgttccagcagtcgttgtcaaggtcaagcctgggaagcgtgtaaagatcgtacagcagaccgtcggtcgccgccgagcccgcctgtctcgcggacgggaaatacgcgtcgaacgcgtcgtcgccggacaggatgtacgtatttatctcgctgcacgacgaatcggcggaataggacgtctttatcgtgaagccgcacttatcctcgaggtacatattccggcggtaaaccgcgtcgttcatcgtgtcgccggtctcggcgtccgccgacatatcgaagaccgcccagtatgagtcgaccgagcgcgtcatcacgttgaactcatagccgtcaagccccagcgacaccttttccgcgtcggtcagcttctgcacaacgccggtcttttcgggctcagttgatatgtcgccgccatctccgccggacgtcgttccgtcggtcggctgaccgctccccgtgctcccgcaggataccatgccggagagcatcgcaagcacaagcataaatgttatttttttcatcgtttcttccttctttactctgaaatttccggaactttgctttacaattatatcagaaaacgtcaggcattaatagcatttattttcgcaaaaacaggattatttttaccatgatgaaaaacgcaaactttatagggaccgaccgcacactcctctacgaaaacgtcaacatcttcgacggtccggaaatcgaattctgctacgaagacaccctcgaaaaaagcgaagtcctccacttccacgatttcagcgagctctacgtctatgtctccggcgacgtcgggtacttcattgacgggcggtactacgacctcgagcgcggcgacctcgtcatcatccgtccgaacgagctccaccactcgctcattcacaaggaatgccactacgagcggtactttttcaaattcccgaagggctgtttcccggcgccggcgagcggtatgtcgtcgcccatcgccttcatcgagtcgcccatccccggcaggctcgtcagactgccggtcgaggaacgcagcgaagtcctgcgcgccgtcgccgaaatccgcgacctcacgatgaacaaaccggagaactacatgactctcgcctacgcgaagaccctcggcatcctggcgagagtcggcagggcgctgaccggcgaaaacgtcccggtcgtcaccgaaagtatgctcccgaagctcgtcgaaaacatcgtgaactccctctcggttgatctctcgtccccgccgaccgccgagtcgaccgcgaaaaaattcggaatctcctgctcctacctctcgcgcgtcttcaaaaaatacatgggcatgaactacaccgactacctcacggcgctcaggatctcccgcgcgaaaaacctgctcaacgccggggcgacggttaccgaggcgtgctatgagtgcgggttctcggactgctcgcatttcatcgcggtgttcaaggcgcaggtcggggtcacgccgctgaagtataagagcgggggcggcggttgaacgagcaagcctgacattcaaaagcccgtcggaacagtcttccgacgggctttgctgtttatttggttacttttcgacgcactatgtctgatgtggcacagccttcatccgaccgggaccgaaaaattgactatgccaccggcggctcgccggttacttcgcgggggacagcagaccatagtccccgtccttgcggcggtacaccacgctcgtctcgccgctcgacgcgtcggtgaagacgaagaaatcgtgaccgagcaggttcatctggagaaccgcctcatccggcgtcatcgggtgcaggtcgaacgtcttccggcggattatcgcctcttcgtcctccttctccggctccggagtgtagaggtccgctatcgcgccctctctcaggcgcttctcgagccgagtcttattcttccttatctggcgctcaatcgcgccggtcgcactatcgaacgcgttccggaaggtctcgtcagtctcctcgccgcggtacagcacccccgccgatgagatcgtaatctcaacacgctcccgtccgcgcaccctcgacagcttcaccgtcgccgacgcgtcgtcacggaagaacttatcgtacttcgcaagcttcgtctcaaaaatctcctgaagatccttcggcactccgccctccatctgtctcgttacgatagttgttctcatgttcatccatcctttcgtgtccgatgtatatttttatttccgcgggtcgtctcaccctatgccgtttttcctttccgcatatatattataccacatatcgcagcaaaagtcaacatgcgaacacgattttacaccccgttcatttgttaataatcaacatacaaaagcagtgacatttcagctttcgttaatacgtcgggcacgtccggggaaagccgcaataattctgtaatattgtcaatttacaaatcgcggaatttgtggtataatgttaaaaatctatgggtctggtcaaaatacctcacctgaaaaatggaggaaaaaatgaacatcctttcaaagctcaacaatcttctgttcccgggctcgaaggactacccgaaaaacggcgcgctcaagacctttactttaggtttacagcacgccttcgctatgtcctgcgccaccatcctcgtcccgctcctcaccgggctcgacgtcggcgtcgccctctgcatggcgggcgtcggaactataattttccacctctgcaccagaggcaaaatgccgaccttcctcggcagctccttcgccttcatcgccgctctccaggcagtcgtcggcaacccggatttcggcgcgaccaaggatgagcagaccgccgcggcaatgggcggtatcatcatcgccggcgcgatctacatcgtcgtcgcgctcctcatcaggctcttcggctcgaagttcatcgacaagctcttcccaccggtcgtccgcggcgtcggcatcgcgataatcggactcaacctcgcgtccgccgccatcaacaacatccagtcgaacaacggctttgatatgttctcggcaggctactactggagctggatcctcgccgcgatcacccttctcaccgcaatcatcctctcgagctacggcaagggaatggtcaaaatgtcctccatcgtcatcgccctcggcaccggctacgtcctctcgctcatcctcaccctcgccggagtccttccggagggcatcatgaacctcggcaaagtcgctgagcacggctggttcgaagtcccgcacttcgtcttcccgcgctttgacatgagagcaatcggcatcatcgcgccgatctccatcgtcacctgcgtcgagcacgtcggcgacgtctacgccaacggcgccgtcgtcggcaaagacttcaccaaagatcctggtcttcacagaaccatgctcggcgatggtctcgccaccctcgtagcaggtctcttcggcggccccgccaacaccacctactccgaaaacaccgccgtcctcgccgctaccggcaactacaaccccgtaaccctcagagtcgcagccctcatagcaatcgtcatctccttcctcggcaaagcaatcggcgttgtcgaaaccgtcccgaactgcgtcctcggcggcgcctgcatcgtcctctacggaatgatctcctcggtcggtctccgcaccctcgtcgaagaacacgtcgacttcaccaagaaccgcaacctctgcctcgcggcagtcatgctcgtcttagcgatgggcggagcggtcataggcggccccgacttctccttctccggtatcggtctcggtatcatcgtcggtatcctcctcaaccttgttcttcctgagaagaaaaatgatcccgacggaaaaggtctcgtcgcgcacgtcgttccggaaaacgaaatcattaaagaacttgataaataattaagcagggggagaggagaggacttttgaaaaagtcctctcctctccccctgcaccccctctctgttcccaaaacttttatacatttcaggaaaggaaggcactacgtggaaccctcgcatgagaacaaaaccgtcgcggaagaaccaaacgccgacacaattgaaaccattgaaaaggcggaaaacggaatcgatatctacggtccgttcgacagcgtcgaagaaatgatggaagccctcaactccgatatgccgaccgaatcaaattaaaacagcacagacctcacgcctgtgctgttattttcgatttatactctatacttgtaggggcgaccattggtcgcccgcttgaagcgttggataatccgtatggaatgaattcactccccgaaaaaccccgcgatgtccgcgaaaacctcgtcctttccgcactcgttcattatctcatgccgcattcccgggtacaccttctcgctgaggtcggaaaagccgcttgctctaaggatgcgctttgatgactcccgacccttcccgccgcccgtacacggatcctccgcaccggacaggagcagaatcggcaagtccgtcttcaccctctccgcgcgcgaagtatcacccatcatccgcaccagacggaacaaatcccccagcgccgacacagtaaacccgaacccgcacagcggatcctcctcgaacgcccgcacaacctccgggtcggagcatatccaatcatgctcagtcgccggattctcaatcgccttattgaacactcccgtactcagcctctgcatgaaccccgacctgtgatccgcgccgaacatcgcgctctgcacgtccgcgaggaaaatgccgaagccgacgcccttacgagtgcacgggaaacccgtcagaac

SEQ ID NO: 925 - DNA, 21106 bp, Unknown
  16S sequences of unknown bacteria
actcgttcgtcttgagcgcctgaccaaacagcccgcgaatcaacgctaccatctcgcgatagtaaccgtggtgaaacgccttgtccagcggcacgtcgtattcgtcgatgagcaatacggttttctggccatagtgctgatagagcaggaacgaaagcgtcttgaggctgttctggatatcgtccttcgtatcctcttcctttagaattcttttgagcggtttcttgtcgtcctcggagatccgctcgctaccgagcagcatctgcaggcgcgaaacctccgcacggatgattcgccgcagcatgccataggcgtcctcaaacgtcagcccatccacgcccttgagcgagatgaaaatcaccggaaatttcccctggtattcttcgcacagcgccgtctcctgcgagatcaaaagcccgtcaaacaacgtcttatccgcgccgacctcgaagaagctcttgagcatgctcatattcagcgtcttgccgaaccgccgcgggcgcgtgaacaggttcaccttgccccaattgttcagcaggtcgcggatcaatcccgttttatcaatataataaaatccctctctccggatctcctcaaagctctcgatgcccaccggcagttttagtctttccatcgcgcaaccccgctttcttccggtcgctactgctgttcattccgagacataactctctacttctattttacctcaaaaccccctttatagcaagccgctggcccaaagataacgaaaaaccctttccgatatgcctaaataccataccgcaaagggccttcatgttgcaggcaaataagaaatcagcttctcctcttcatcggcgctaacgcagacatacgctgccacccgcttctttgcgggaagcgccaattttttattcttcccgtaccagaccgggattgcgcagaagcaccgttttgaggtaaatggcatccaccagcgtttctgccagctttccctcaaaagaaaactgcacgccgcgcacgttggttagctccgtgagcgtgttcacaatggcgtacaccaaatcccgttcggcggaaaaatccataccctggcaaagccggtaaaaattcgcgctcaagttcacatgcgccacaccgtcggcgatgcgcacgcccaaaatatcgtcgccactgcacccatccgggaaagcgctgatccatccattttgatcctgcatcagttggagcagcaaaagccggggcgaccgcgctacgatcggcgataccacgcgctccacagcacgcaggcctccctcttccgcccgaaaatacaaccggacgacgtcgccaatttcatcggcgaaatcgctgcgcaaaatcacgccctcctcaaaggaatgcacggcgccaccagcggaaatttcgcggaacaagctgccttccacggaaatctgcacgccgtcgatttccggaataaagctcgtcatcgtgagggcaagcatgcccacaaattcatacgccgacacgcccgcctcttccatcagcgaacgaatctcctcggtgaaatccagccgcaaaaaacgaaatccttcttccgtaaccagcaccgaaggcgtagaagcgagcgcgttcaccgcattgagaaccggctgcgcgttcacttcttgcgcgggctgcgaaagcgcggctagcagcgtagtggcataattgccatccacaaaggtcagttcccgggcttccgccacaaaccattccccttcgctggcagggaaatacaacagcgccacgcgatccatgctggaaacttcgctcacctgagcgcgctgcgcatccgcctgttgctgcgcccatagggcggcaagatcgccatccgattgcgtcattacccccattggcaaggaaagaatcgcttcctggcggccattgatcaaaatgttcacgccatcgacatcgtccaactctgtgagcgtgttggcaatcgccgcgtagagccacaaaagttgctggtcgctctgcgcgccgcgcgcctccagcgaaaggttcactgtagcaatgtttcccgtcacctcaacgcccagcagccgcgtgccttccggcgcaaccgccgtcatatcatccggcgtttcgcccaaaagccggttgaggatggtgaccgcctggtcttccgctggcgttagaagataagaaatttcgctgcgcgtgagctgctgcgcgtcttcattcacataatataggcccgtccgctccagataatccgcctggctatcgccccaaggcgcgacatactcttccccagacacatccggcaattccacattccgcacgctttgcgcctcgaacagcatcaaattggaacagccgctaagcagcaccgccgcggccagcatcaggcacaggattccccgctttccccgcatgtgcatccctcctacagcggcagttcgattgtgaacgtgctgcccttgcccacttcgctgttgaccgaaatggtgccattgtgcaacatcacaatttgcttcacgatggaaaggcccaggccggtgccgcccgtttcgcgcgagcgcgccttatccacgcggtagaagcgatcgaaaatgtgcttttgatcctcttcgggaatgccaatgcccgtgtccgatatgcggatgaccgcccgtttgcccgcgcgcgccatatccacatgcacgctgcccgcgcgcggcgtatatttgatggcgttatcgatcacattgtataccacctgcatgagcttgctcttatccgccgtgatctccactgcgtcgcgcacggtttcttccagttcaatgccccgttcgcgcgccagcggtgccagcttgcgcgcacaatcgcgcaccatgtcgtccaggcgaaatttctcgcgctttaagcgcatttcgccgctatcgatgctcaccagcgaaagcaggtcggaaatgatgccattgagccggtcgatctcgctgttgatgttgcccaaaaattccttggtcatccccggatccattggatcctgataaatcagcgtttcgatcaagatcttgatcgtgctcaacggcgttttcaattcgtgcgaagcgttggaaacaaactggttgcgcgagcgatccaagctttccagccgctcgctcatcatgttgaacgcgcggcccacctgtgcgaactcgttgttgccgcggatgttcacgcggctggaaaaatcgcccttggtcatgcgcaaaatgccctggttgagcgcctcgatgggcttggtaaaaaagcgggaaatgaacaggctcatcaccaccacgcacagcgcgaccaccaccagccagatcacaatgcggttttgaatttcgcgcatggaagtgtaaacctcctgcgcgtcggaaacgtaggcgagcatgccaatggggcccgcggaagaataaatcgcggccgtatacaggcccgtggtgccatcgccgccaaagagcgaattgcccgcctgcgaatccacataaaagccatatgcgctttcggcgccgtcgatgatctccgccacctcgcgccgctcaagccgctgcccattgagctgggattgcgaatccacctgcaccacgccgtgcatatccaaaaccaaaatccggctctcatacccttccgaaaggctcaccgcgtccgcatacatcgcctccgcatccgacaaaagcaggctttccgccatgtgctgcgaaagctccagcgtgatgcgctgctcatcgcgcacgcgctgcgtaaacagatattcgcctaccaactgcaccagcatcaccgcaaccacaaagaaggcaacgcaaatgatcagcaggtaggcgagcacgatcttccaacggatagagtacagtacggccctaatccttgtctgtgaaatagtagcccactccccatttggtgtagatgaattccggctgcgcgggattcttctctattttttcccgcaggcggcgaatatgcacgtccaccgtgcgcaaatcgcccagataatcgtatttccaaatggcttccaacaggttttcacggctgaagaccttgccccggttggaaacgaacaattgcaaaagatcgaattccttggccgtaaggttcacttccttgccgccgattttcacagagcggttgttcaggttgatctgcatatcgcgcaccgtgagaatccgctgggaattttccttttgcgccatggtggtgcggcgcaggatggttttcaccctggcctttacttccaggatgttgaagggcttggtcatgtaatcgtccgccccgtattccaggccgaggatcttatccatatcttcgcccttggccgtgagcatgatgatgggcacgttgctcttttcgcggatgcgctggcaaacctcaatcccatcgactttgggcagcatcacgtccagcaggatcaagtcgaacggctcggccgcaaacttggcaagcgcctcttcgccatcctgcgcggaatccgtttcgtacccatcctgctcgaggctgtattttaatcccttaatgatcaacggttcatcgtctacaatcaaaatttttctaggcattcttccttctccttattcgccgcgtggccgtcctcatatacctctttattatataccaaaatcccccgctttgcaagcgtgggatttttattgttaggattttacaaatgactgtacaagcgcgcagaattgcgctataataaaggcattatcaaaatggacggtgcacagaatgaaattccggatgctcactctcatcgcaatggctttgctcctggcgcttctgcccgtgggcaatgcatttgcggatccttacgatcccaacgcgccttttgctttaatgcccgaagacctgtatgcccaggccgccgtggtgatggacgcgaatagcgggcgggttctcttcgataagaacgctaccgaacaagtgtatcccgcgagcacgaccaaaattatgaccttgctgctggcctgcgaatacggtcacttggacgaaacgatcaccatccccgaagaagccgccgatatttcgagcgattcttccgtcgtgccggtcacgcccggagaaaccatgcgctttatcgacctgctctatgggctggaaatgcactcgggcaacgacgcggcgaacgccgtggccgtgatcgtggctggttccatccccaattttgtggccatgatgaaccagcgcgcccagagcctgggcatggaaggcacgcactacgccaacgcccatggcctgcacgacgccatgcattacaccacagcccaggatctcgccacactcaccgccgaagccctgaagaacgatacgttccggcagatcgtttccacgctttcctacgaaatgcctgccacggaagagcgcggcccgctgtggctctcctgctcttacgacgtgatgaacccggacaacgaattgtactacgaaggctgcatcggcgtgaaatcgggcttcacttccaacgcgggccagagcttcgtgggcgcggcggagcgcgatggtcttacgctgatctccgtggccatgaattgcgcttccaccaatgacgacgaggccaaacgcaccaaatttgtggacaccgtgcgcctattggattttggctttagccaatacgacgcctacgatttcaccacgctcttcgatttggcgaccgagggcacactggtgacaatggtgcaagaagcccaccaggacgatccctatgccggccaactgacgcttaacgcttcgcagatcagcggcaattggcagaacaaaatggtgtatggcgacgaggcggcccgcacccaggcggtgcaggagttccgtcagtacctcaccgtgaccattcagccggaggttatggcgcccgtcattggcggtcaaacgctgggttccatctcgtatagcgatcccgagggcaacaccatgtccggcgtgctcgtggcttcgcgcggcgtggaagccatgaccttctggtacaagctttcgcacaacacaatcttccgcgtgtgcgtggcggtgctcgcagtgatcctggtgctcttcatcctgctgcgcatccgcgtcaccatcgtgcgcaaccgccggcgcaagcagatgatggcgcgcaagcggcgcgaactggagcgctaccagcgcgaacagcgcatgcgcggcaagtggtaatttccgccattggcgcggctgtagttttgtctatagccgcgctttttcctgccgaaaattttgaaaaggagggttccggatggaagagcgcttccccatcccagccggactaagcgactgcctacaaaccgaatatggctttgtcctgcgcgatattgcgcccgcggagcggggcttttacggcgaaacatggaaaatccgcacccatgccggagcgtatttcgcaaagctcgaccgctggccttgccacaaagaaagctaccgcgccagcctgcccatcgtgcaatacatagcggatggcggtattgcctttgtgccaagggtcatcgctacccggcgcgggcagttgtgctgcgcgttccagggcggtatacttgccgtcttcgcctttgcgccgggcgcgttgctggaagaatatgccgtggaagagttgtatggctgcctttcgcaagtttacgcgctgcgaacggacggtctcgcgctggaagccgaagatttcggctgcgcaatcccgcaaacttgcgcgcgcctggcgcaagcgcccgaattgcccgatgccgcgcgagcggcgctggagaagcgccaaagcgccattgcgcgctacgccaaccgcttggcgcgcttctccgccatttgccaaaaagaccgctcggattttcacatcacccatggcgacgcgggcggaaacttcctgtccgatggcaaacaatttttcctcgtggattgggattcggtgaaattggcgcccattgagcgggacgcctgggtctttatgagcaatccagcgcagctttgcgccatccagcgcaccataaaccaaaatggtatcgcctattccctgcgttgggagcgcctgtgctattatagctacttttactttttttcttacctggaaggatacctatcgtcaattctcagcgcggcgcaggaaaggcgcggcgcacaaatcgccgcagacatggccgcatacctcgccgatagttggatttatgcacggctagacgccgcggacgcaagcgtgacagaaaattcgcttgcagcttctttcgcccaagccgaaaaaacgccttgcaaatcggcaggttctacgctacaatgaaagcgatataccgttgaacaccgcacagcaaacgggaggaggatggccaaaatggaacataccaaacggcatctggcatatgccgattactacgacaaagtatacggttgctttctcggcaaatgcatcggcggaaccgcgggcggcccggccgaagggcggaaggagttgctcgatttcccgctaaatgaggagcttttgcacaaatgcctgcccaacgacgacctggatttgcaaattctctggctggaactgattgaaaccaagggatttgacatcaccgcgcgggatatggccgatgaattctatcaaaaggtaccctacggcccgggcgaatatgcgtattttcaaaagaattatgcccggggcattttcccgccgctttcgggccgcttcaacaaccgctattacaaaaacggcatgggttgcccgatccgcgcggaaatctgggcttgtatttttcccggagcggacgccattcgccagcgctatgtagaaatggatggctccctcgaccatgaacgcgattccatcgacgcggaaatttttctcgccacgctggaaagcgaattgttcttctcccatgatcttcgccgcgccatcgagaccgcgctcgacggcgttccggagaaaaccaagctgcgcggcgctgtgcgcgacacgctccagtggtatgacgcgggccacgattggaagctgacccgcggcctgattctgcggaattatggccacgccgattgcacgaatctttaccaaaacatcggtttcgtgctcctcgcgctgctctacggcggcgaggatttccgcgaaacgatccggctgggccttgcctgcggatatgacaccgactgcatctgcgcgacggccgcctcggtgctcggcatcatccgcggcgccaagcgcctgctgggcgaagacggcatgagcgacagcggcctggcaatcggcgttggcacaaaccgcaagagcggttccatcgccactctcgcgcgggatgtgtgcgcggtaggcatcagcgcgggaaactggtttgccggagaagccgcagaaattgccggccatccggaatatcggccggtgcccgccatcagccgcacccctgccgtagcggtggaagccgtatatcagggcgacccggttcttcgcccagacgcgcccacggaactttcgctggcgttcacaaaccattccaccaccagcatcgctctggcggtggaagtgcgcgcgcccgagggcgtcctcttcaccccgggcgagattcaactcaccctccaaccgcacgagcgctatctgctgccttgccgcgcggaactcttgcccagcgccaaaatcctttgccagcaaaacctgttccaggtccatatgcgcggcgctttcggcgagctttgcgaccgctttgggctcgtgggctgcgatgtctggtatcgctttgggcctttcctggaaaacatccgggacattacctccttgccgccgcacgaggcgtacggcagccacctggccctgcggcccggcgaaaacgcgtatgacataacgcgcgaataccaccttggcggcatcgccaacatcgacaaggaattcgtttccgaagccgagcccttcctctccatccccatggatggacgcgcggaatgcattcccgagcgaatcgccctcggcgaagaccttttcgacaccgccaaaatccaaaaatacgagggcgcgcatgtggattacctggtgcgcacgctggtttcaccggaggaacgcagcctggaaatcgccgtggggcacaccgcgccattcaagctctggctgaatggcaagctcttgggcgagagcaagcaaaccaaatggtggacgctggaaaacatgcatttttcggcgacgctggccaggggcgaaaataccctcattctcaaatgcgcccagcaatccgaccacgcgaagtattccatcgtttggcgcgacgcgagttggcggcaatatgcggattttgcctccgtgctgctcgaccgctagcagaccctgttatcgttctatctataccgcaacaatggattgtggatttcttgctttgcacgcttgacaagcgctgcattttcaacgataatagaccttgatatacgaagggggcgtttgcatgcatagcatccacaaactggtagaatttggcatccagcacggcctggtggaaaaaatcgatcgggcctatgtcaccaatcgcattttggacattatgggtctggacgcgccgccggaaatggaagcggcggaaaccttgccgccgacgattacgcccatgctcacggaactgacggaagaagcggtttcccgcgggctggtggaggacacgctaaccaaccgggaattgttcgccaaccgcctggcgggcgcgattacgccgccgcccgaggtggtgcgcgccaagtttcgcgcgctgtacaaggcggaagggccgcgcgctgccacggaatggttttatgaaatgtgccgcgcgtgcgattacattcgcgtagacgccatcgccaaaaacgcgcgttttttcgcgccgtccccggcgggcgagttggaaatcaccatcaacctttccaagccggaaaaagacccgcgcgacatcgccgccgcccgcgccatgaagcagacgggctatcccaagtgcatgctctgcgcggaaaacccgggctatgcgggacggctggatttccccgcgcgcaacaaccatcgcatcattccgctttcgctggatggcggcgtgtggtatctgcaatactccccctatctgtattacaacgagcacgcgatcgtgctcaacgaaaagcacgtgcccatgcgcatttgccgcgccacattcgagcggttgtttgattttgtggagcagttcccgcactatttcctcggttcgaacgcggacctgcccatcgtgggcggctccatcctctcgcacgaccacttccagggcgggaattacaccttccccatggaccgcgcgggcgcggaaatcgacctgcccgaccccgcgccgggcgtgaaggcctgcgtggtcaactggccgatgacgtgcatccgcctcaccggttccgaccgcaaggccatgatcgatctagcggacgccatgctgcgcgcctggcgcgcttattcggatgagacgttgcaaatcttcgccgaaacctacgcgccgcacaacacgatcacgcccatccttcgtcggctggattcgggcgattacaagctggatctcgtgctgcgcaacaacttaactacgccggagcaccccctgggcttgtaccatccgcacgaggacctgcaccatatcaagaaggagaacatcggtctgatcgaggtgatgggcctattcatcctgcccggacgcctgctgaaggagcttgtgcccatccgcgcgtatttgctgggcaacggttccatctacgcggtggaagaaatgcaccgcccgtgggtgcatgcgctggaacagaaatcgtttgacgatgtggacgcgttcctgcacgaagagctggcggccaagtgcgcgcgcgtgctggcggacgcgggcgtgtataagcagacgaaaaaagggcgcgagggtctcatgcgctttattgatgcatggaaagaagaggttcgccatggtagttagcgccatttccattgtggccgtaatcctttgcatcatcgcgctgggcatactgctggcgcgcctcggttggctgggcgaaaaggagagcgcgttgctcgccaaactaaccacaaaggtcgccctgccgctgatggtcgtgagcaatatgtacaagtatttcacacacgattcgctggtgcagaatgcctccggcatcgcggtatccatgctctccatcgcgggtttgattctgctgggcctgcccgtggcgcggctggcgcgcgtgcctgccaaccgccgcggcgtgttcatcagcatgttcgcgttttccaattcggtgttcatcggcgtgccggtttccacggcgctgtttggcgaagaagccgttggattcgcgctgctgtactacattgcgaacacctccatcttctggtcggtggccaacagcatgatcatttcggacgcgaagggcaaattcgacgtgatcgccaccatccgcacgcagccgcgcgccttttttgcgcgcgtgctgccgctgccgctgatcgcctttttggtatgcgcggttttgatctatctgcgcattccgctgccggagtttgtgctggatgccgctggctatgtgggaaacatggtcacgccgctttcgctgatttacacgggcgcggtgctcatgcgcatgatccgcatgggccgctttcagtggcattgggactatatcgtggtggtgctgggccggtttttcctagcgccagcggccattttgggcatttcgctgctgttccccaccattcccacgctcatgcgcagtgcgctgatcgtgcaggcttccatgcccgtgatggcaaacattgccattgtggcgggcagcgaaggcgcggatagcggctatgcggcgggcggcatggttttgaccacaattctcacagcggccttcctgccgctactcatgatggccatggaagcgggttggttctgatgatcgagcgcgcgacggtatttgtggcaaaggggcataatccgcaccgcaacctggcgctggaagcgctcctcaccgaatccatgcccgcgggcgaggcagggctgatgctgtggcagaatgacaacgctgtgatcatcggcgcggggcaaaatgcctggcgcgaatgcgacatcgccgctatggaacgcgaccacgttgcgttggcgcgccgtccttccggcggcggagcggtgttccacgatttgggcaacctgaatttttccttttttctgccgcgcggagaatacgatgtacagcggcaattgcgcgtggtgctttctgccgtgcgcgcctttggcgtggaggcggagatgaccgggcgcaacgatttgaccgcggacgggcgcaaattttccggcaacgcgtttcgctttgttcacgaccgcgcgctgcaccacggcaccctactggtgtgcgccgacatggcgcgaggggaaaaatatctgagtgtgtcgccggagaagctcaaaagcaaaggcgtcgcttcggtgcgcgcccgcgtagtcaacctcgcggagttggccgatgtcaatgtcgcccggctggcagagacgctggccgaggcgtttgcggcggaatatggcccggcgcgccgcgtagaagcggaagcgttagacctgcccggcctggaagagcgcgcggcacgctatgcttcttgggaatggaatttcgcccgttcgccgcggggggaattcgagcgcgaacatcgctttgcctggggcggcgtgcagattttgttttccgtgttgggcgggaacatcgtagatgttttcgcctataccgacgcaatggatgaaaatttggcggggaaaattgcctccgcgctggagggatgccccttccagcccgcggcggtggaagagcggctttttgccgtgaacgcagaattggcggcgtggttggccgccgtgctgtgaaaaatccaaatggaggattctatgttaaagacctatcgggaagaaatgatcatccgcagccgggattgcgacagcgaaggcacgctgcgcccgagcacgctgctggccgcgctacaagatgtggcggacgtacacgcgcgcctgctcggctgcggccgggaagtgctgattgagcaaaacctcgtgtgggtgctctcgcgcagcgaagtacacatggaacgctatccgcaaaaggacgagcacatttatcttacgacattccccatggtgaaccggcgctggtttttcccgcgctatttccttgtagaggacgaaagtgggcgcacgatcggcaaagccgccacactgtggctgctgctggacatcaacacgcgccacatggccccgccggacgcggcggccaggtgcatcccggacaactcggatctcacgccgccgctgggcctgcccgggaacgtgctggcgctgccggacgcgcaggagaccgttctctcgcgctggccggtgtattcggatatcgacgtgaaccagcatgtgaacaacgcccgctatgccgattgggcctgcgacgcgctgggcttttccaccatgcgggaatattgcctgaaaaccatgtgcattcagtacgccgcggaaatccggcctggccaggagatcagcctgcacgccgcgcagagcgaagggcgctatcgcgtggccgggtatcacgagggcaaaatgcactttgaaatcggcggagagctgatgcctcgccagcgctagtggggaggaaaaaccgtggagctttccctttcgctgggatatttgctatcgatatatggcagcgaccgattgcgcagcctggaagatgccgcgtgcctgtgcaagggggccgggtttgattttgtggactattcccccatctgccagggcgacgcgtgggaagcggacgtttgccgggaacgggagattcttgagcgggcgggccttgccgtggagcagacgcatgcgcccttcaaccgctatggcttttactcggcggaagagtttcccgagcgcttccggcggctgttcgtggcttcgcgcatcttgggcgcgaaggccgtcgtcgtgcatgccgacgaataccgccccattggccggtacgacgtgagggaagccctggccttcacctatgagttcctcgcgccctacgtcgagtatgccgcgaagcacggtctgatcgtagcggtggaaaatctgtgcgaggatttttatccggcctatccgcaaatcgacggcaaatcccgcttcacttcgcgtctggaggaattgctgggcgtgatcgagcgctttcattcgcccgcggtgggctgctgctgggattttgggcatgccaacctggctttcggccgggagggcatgggcgcggcgcttgcgcaggcgctgccctatgtatgttgcacgcatgtgcatgacaactatcagggccgcgatttgcacctgccgccgttttttggcgaaatcgactgggcgcgccaaatggcgctactcaagcagggcggttacgctggcaagctctcttttgaaatggtctatggcgtttttccagaaacgctgctgcccatgtggctgcaaaacttgtgcgccacgggcgaagcgctcaaggccatgtttgcaggcgcataaattttatgtggccccacaagagcaaatccaaacgaacgcggggtatggagaatggcgaatacaaaggagatttaccggcaccgcggctgacctgtccggggcgaaggatgagacctctggctctggaaatcctttgcgcgccccatttcgcgcatttacagaaaagatcgaacactaccacaaggccgccccgcttggttctacacgaaccaagcggggcggcccaaaattgcatttacttgcgaatttccggcaggctggcggccgcaatagactgccccacgcggcggctgctttcatccggaatgtgcagctcgatgtgcagttctgggaattcgcccgcgagcacttccttggcgcgttccagcaaaattgcgccgccctcaccggaagtcacgcggcccataatgagcacatgcgcaatttcatagaacatggcgtagtacgcgatggcgtagccgaaatacacgccgatggtctcatagatcttccgggcgcgcggatcgccatcctccatcaatttttgcacggccttcagacgatgcgccagcggctgggtcgcgtccagctcaatgcccgcggcgggcgcgagcttgatcaccgcgtcctgcgagaagtatttcacgccgcagccatagtcgccagaccattcgtccaccatggcgttgggattcgcatccaccgggacaaaggcgagctcgttgagccaaccggtgatgttcccattcttatccacatatccgcccgcttcgctggtgcccatcgcgatgcccatcaccgcgttctcattgagatccatggcgccggccaacgcggtaacgtcgccgtcgttggccacttccagcggaatgtccgggccgatttcccgcgccacatcaatgtacatgtttttcacgtacttatcaaagtcttccggagaaaccttgatgaacaaagaagccgcgcggatcttgttgttgatgtacacgcccgcggagctcacgccgatcgcgtccacgcgcggcatatggctggcggcggtcttcatggcctcaagaataccgtcatattgatattgcggattgctattttccttcgggaaccagagcacctcttcggaataaacggtttcgccatcgatcacagcgctgaccttgcggtcgctaccgcccgcgtcgaacccgatgcggcagccgtccagatggcggccaattgcgctagcgccttcgcgcgcagcaggcattttgcaggggcaatccacgatgatcacttcaaacgggctttcataaatgccactcataaaggcgcggtcgaattcgcgcaggccattgacagcgtaggctgccttcagcttttcgcagagggccttggggccgcacagcgtgattttgtaaccgccgcgcatccacaaaagggacttcaccacgcgctccgccaagtgaaaattcttttcatcgtccacgccgtcgggcagcacgcgcatatcataacgcgcgacaaagccctgatcgcgctcaatggcaatcagcaaatcctccccgcccgctttttccacttgcgcggcgaaatcgcgcaattcaatgctcagcggcgcgaagccgggatccagttccgccagatatttaaccgccatgggaaacgcctccttctgaaaatgcaatgtgcaaattatgccgtgtaaacggtcttgccgccaataatggtggaaaggacttcgaacgcatcgttcaggatggcgatatccgcatcctttccgggttcgaggctgcccttgcaatcgtccacatggatggctctcgcgggcgtaaggctcgccgcgttcacggcttcccaaatcgggcaaccggtcgcgcgcagataattgcgcaccgcatggttgagctttaacacgctgcccgcgatggtgccgtctgccaggcggcattccacgcccttcacgaagatcggctggccgcccagcgtgtattcgccgtcctccaagccgcccgcgcgcgtgcagtccgtgatcagcaccagcttatcgcccttcattttgcgcaccagcgggaagacagccgggttaatgtggaaattgtcgcagatcatttccgtggtcacatcatcgttttgcagcgccgcgcccacaacgcccggatcgcggtgcgcgagaggcgtctgcgcgttaaacaggtgcgtaacgtgccgcgcgcccgcttccatgccggcctttgcttcttcataggtggcgttcgtatggccaatggaggcttccacattcgttttctcgcgcacggtacggatgcattccagcgcacccggcatttcgggagcgagcgtaaagatgcggatcacatccgcgttatccacgatcaggctggcatccggcggaagaatgttggtttccgcctgagcgccctttttcttggggttgataaacgggccttcggcattcacgcccagcgcgcgcgcgcccttgaaatccggggatttgcccagttccatcaatttgcgaacggcgtcgagcgcggcatggatttccgccagcgaaaccgtcattgtggtggggagccaactcgtcacgccatttttggcaatgccttcggccatggtcacgagaccttctaccttgccatcgctggtatcttcgccaagataaccatggatgtgcatatccaccaacccgggaatcacataggctccctttgcatcaatccattccacatcgctctgggcacggatcgcgtccgcatccacaaggccaatgatcttttcatcaaacaagagtgccgcgttctccaccacgcccatgggcatgacgatgcggccatttccaattgcgcgcatatggacacctccaatgattttccttataaaatattatagcagatatcggaattttgcgcaagcacatcccgataatcttctatggcgagatcgcacattttttgcgcttccgcccaccgttcccgccacacaaattccgaaatggcggcgactttcatgccgcacgctttggcggcgcacatcacagcgggcatgtcttcatagacgacgatttgcgccgggtcttgccccagcttttgcgcgagtgccaggaaaaatgcgggatcgtttttgctgatgccttctatatcgggcgtggtgacccattcgaaacaatccagcatgccatgcgctcgcagcgcgtgcagggccatgggcagcggcgtgtaagtggctacaaccatgcgcacgccggcggccttcagcgccttcaagtaggcggatgcacccgatttttcgcgcaaaacctcatattgctgatccatgtagcgattgttctccgcaatgatctcatccacactcaaggaaagggaaaacttttcaatcagcaattgcgcgctatcgtgcatggagcgctggcgcaattcttccacgaaggaaggaggcgcggataagttgtgccgagtcagaaagctggcattcaaagagcgccaggttggcatggaatcgatcagagttccatccatgtcaaaaatggctgttggcaatcccaggttcagcatgcgtcgtttcgtctccttgctttggtttatacttgaatgttgtgccattttccgctgttaaaccggcgcagcacgcagctcatgcgcacgatcatatccaccaggctggcacaccaagcgcccatcagggctacaattggaatctgatttgtccagtggtcgaaaatggtcaggctggatagcgccgtggacggcagttcgctgaccagcggcgtgaaaaagtgggtgataacgtatacggccaggaagctgagcacgggccggatccccgtcacgcatacaagcatgaccttcgccacatatttggtatcgcccgcgccgcgcagcgcgccgctcataacgaccgaagaagtttggaacggctggaacagcgcgaggatcaacatgatggacgccgtagcgttcaccacggattgctgcgatacgaaaagggaaaccaagggatagcggaaggacaggatgagcagcgccagcacaatggcggtagtcatggcaatgcgctgggcgatgttgccatacatttgcgccaaatcaggccgcttgcgcccgagcatttgcccgaccagcgatgtgcccgccacgccaatgccatcgccaaacgtgaaggacaggttcaaaaactgcatgccaatctggtgcgcggcaaaagcgagcgttcccaactcggccacgatgcgagcatacaggaaaaagccaatgcgcagcgctacctgttccagcatggcgtttccgcccactttaaggatggaacgaatggtgttgcggttcaggcgccaatcgtcgcgccaatgcaattgtaaataggtgccatgccgcctactgaaaaccgtgtacagcgcaaacagcatacccacgctgaaaccagtcaccgtggcaatcgcagcgcccttgacctctaggcgcgggaaaaaaccaatgccgttgatcaaaaagtaattgaaaatgacgttcaccacgttgctggtgatgttgacatacatagtcgtgcgcgtattgcccacgccgcgcagagcggcgcaaatgcccatggaaagcgcattgaccggcaggaaatacataaggatgcgaaaataggtttccgcgtcggcaatggtatcggctttggcgcccgccatcagcatcaactggcgggaaaagagcagcccgagggtcatcatcacgatggatacggctaggattagcacaatggcgttgcgcaacgtgcggttggcttcatcttgccggccttcccctttgcgccgggcaaccactgccgtaacgccgatgttcatggcaaacaagatgcacagcatcagcatgcgcggctggccaaccaggccgaccgccgctatggcggaggggcctatggtgccgaccatgatcgtgtccatagagccaatcagagacatcaaaaccatttctagcacggagggcaaggcaatgcggagcagttcccggtatgcgtcgcgcgtggcagggacttcgcccagcacgccacttttgggcaaaagacgctctatgccgtaaatccggtttaacaaatttcccatggtgcacaacccccagacattcttgcaatattataccatatttatgctttgttgcgggcacaaacagacgtaaaatttttgcttgatgtgaagaggcgcttgaaaccaccaaaggcaggccatgcgaagcgcgcaaagcctgcctgaaaccacaattgcgatagaatgccgcttattcatccagcacatacatgccggtgccgttctctcccttgcgtgcggtaatccaccttccatcggtgaaatccggcacaggaaccggcatgccgcccatagcgatggattgttcggaaagcgcggtaatgcacatccagctcgcggtatcgtatacatcgatgggcggattttctcccttttgcacgctttccacaaaggcgcgcagcaccagataatccatgccaccgtggccgccgcgcaggccgaattcctcataagcagtccacaggggatgctcgtattccttcatataggcctcgtcgctctcccagcggtgcgtccaatacgtaggatcgacaggcgtgcggccatcgatataaatcgagcgattgtcctccatccagatgcccttggtgccctggatttggccgccgcgggaataaggacggggcagtgtgcaatcgtgcgtgagcaaaatggtttcgccattggcgcaacggatcatggtggtcaccacgtcgccctcgttcacctgcgcacgcgttacatcgtcgtccggccggtgctccttgagccaggcattcagcccagcggacttggaggccatggcgcacaggcttaccatgcgattgccgcggttgatattcaggtatttggcgatggggccgagttcgtgcgtggggtacagttcgccattgcggtgcagaaaatggcgctgacggtaatggcggttgatatcgcccatgcccacttcatcgcgcaggtcgtgcgcataagcgccgcggcaatgcaccacctcgccaaatacgccctggcgcaccatattcaaaagggtcatttcttctttgccatagcagcagttttccagcaacatcacaggaaggcctgccttttcgctggcgcgcacgagttgccagcattcgtcaatggaagacgcgccgcccacttccatcgcgggacgcagaccatgggccagcgcttccacggcaatggcgatatgcgtctcccaactggtgaaaatcatcacagcgtccaaatcgccgcgttccaaaaccttatgaaaatccgtaacagcgtccggcgcgtatccgcgcgcttcgcgcacgatttcgcgccccttttcggcccgatccgcatatacgtcgcacacagcaggaatttcaacatctggcatgctcagcagcgttttcatttggccacagccacgaccgcccaaaccgatcacgcccaagcgcacggtggagccggcatcgcccatcttcatggcatttccctcctgttttggattggattctggttgtattatagcatgcatcggcagaagtgaacatataaaatcggtcgaaatccattcgatattcgtcgcgaatcgcgcaaaacagaccgctttacagagatagcggttccgccctctaaaaagcccaagagcgccatcgcttgcggcaacgatgctcaaaatattgacaaagcctcgaaaaaagaggctctaatcagaaatgacggcgtgtacgtcatttctggtatttttcgggagcaaatgcttgca

SEQ ID NO: 926 - DNA, 9064 bp, Unknown
  16S sequences of unknown bacteria
agtacggatggagcgacagcgtttccaacctgtccgcaaaattacagcgggaaagcatccgatacaaggaagtattggagcttgccgatgtgctgggatgcgacattgtatggcagcaaagacgggagaagtgatgcccccggcaacagcccctcgcatcttccgtccccataggcacaccgcagtgctgcctatggatggcagtgaaagacgctgccaacgtctgcaagaaacgttccgcagaacagcttcatgcagacgggctgaccatgggaaaagttgcagacattttgccttggtcagcagaggtcaccgcagtgaccgcacaccccctcgggagagcccacggcactttgcagccagaatggatgaaagtgttatagtgggttattacacttccgcagaagtgcatccccgcagccccgcccgtctgctactctcgaaagaaaggaaaaaacctatggcaagaaacgatggaattgaccgtacctttgcccgtaaccaggacttgcccaccctcgacgatgtggcgaaagttcaggagcataacgagcgagaaaaagacagctactccaatcaagatattgataccacccagacccaccgcaatgtccacttcaagaaacctaccgacagctatgccgccatgttcgatcagatgattgcagatggtgttatctccacccgtggtctgaaagccgatgcggtgaaatatggggagctgctgtttgatgtaaactctgcctacttccacaaccacggcggctatgaatatgccaaacagttctatgccgatgcctacaaagccgccgtggagattgtgggcggcgagcagtatatcctctccgctgtgatgcacgccgatgagcgcaaccgggcaatgtccgaagccctgggcgaggatgtgtatcactaccacctccatgtggtttatatcccggtggtggaaaagcaaatcctgtggtcgaagcggtgcaaggatgaattcctccggggaacggtaaaagaaacgatcacacaggtcagccgcagtaagaaatgggaatccaaacccgttctcaatgaagatggcaatccgatgttgaacgcaaaagggaaaaagattttgaagtcgtcctacagtgtgctgcaggatgacttttttaatttcatgcgagccgccggatataccgatgtggagcgtggagagcgtggcagtaccgaggaacatctgacggtgacacagttcaagttacaggccgaacagcaccgcctggaaactgtgaccggacaggtggaacaggccgagcagagtttggcggatgccaaggctgctacggagaagcagaaaaagaaactggaagctctgcaaaaggaaaccaaggcagcaaagaccattgcgctgacggtgcaggatattgaggaaatgggcaagaaaaatgccctcaccggaaatgtctcgctcacgccggatcagtgcgatacactcaaacgctatgcggtcaacggcattattgccaatgctgacaataagcgtttgaaagagaaactggcttctgctgaaaaaacaatttccatctggaaacagcggtatgaagcagtaaacgaaaaatatatggaactgaaacagaaagcccagcctttcttggatgcgatagagattgcgtctgaaagggtttgggcttttgttcatgccattctcgccagaggaaaggaaacacaggaacataagcaccctgcccgtaagcgtaggcaggatatggaaatttaagaaaggaactatttgcctatgaataaaaccgtagaggaaattaacaagatgattatggaagatgccccgatggaagaaatcaatgatgccatcggctatattgatatttactcctgcttcgacccgatttttgagccgcccattgattttttggaagaatgccgcaagcattgggaaacagcgcagtcttctttccgcaaaaccattgagcgtaagatcgggaacacatggtatgtgattgaaacagaatgtgacgggaatgagccgcttgccgacaaggtaaaacggctcattttttctgacaagggggtgatttgttaatgactgcgacacaaaagcatgatataattccaatatgcacaacggtactgtcggctgaccaaccaccgaaggaggatattatgttggatcagcagaaaattaccattctctattgccgtctgagcaacgaggatgcccaggaaggcgagagtaacagtatcgcaaatcagagagagtatttaacccgatatgcccgtgaccacgggtatacaaacctgaaaattctggtggatgacggttatacggggacgaacttcaatcgtcccggtgtgcaggaaggctttgagcttgtcaagcaggggcttgtgggctgctggctggtcaaagacctcagccgctttggtcgtgactatctgactgttggacaatatacggatattatctttccgagttatgatgtccgctttatcgctataaatgatggcgtagacagcaaccggggagacagcgagggcttcgccgcaatccgtaatctgttcaacgagtggtatccccgtgataccagcaagaaagtccgtgtcagtttgcggcagagaggaaccagtgggaagcacatgggcaaaccgccctacggataccgctgtgacccggaggacaaggatcactggattctggatgaagaagcggctccggtagtcaagctcatcttcgacctttgcattgacggcaaaggcccggagcagattgcaaggattctggaagaaaagcagattctgaccgcaaaggcactctatgccaagcgaaagaaaaagccgatgccggaaagaccgtaccactggggcaaccagtccattgcagggattttggaacggcaggagtacacaggctgtacctgcaacttcaagacttattccaagtcctacaagctgaaaaagcggattcccaatgagccggagaatatgttttatctgccggacacacaggaagcgattgtatctcaggcacagtttgacagggtgcaggaactgaggaaaaacaaacgccgccccgcaaaagcggaacggcagggattgttctcagggcttctgttttgtgccgattgcggcggcaagctccactttgccacaagcaaaagctttgagggcaagcaggatcactacgtctgcaacaactacaagagcaaccgtggtacttgtactgcccactatatccgggaagatgtgcttcgtgaaatcgttctggaacgcatccgggcagtcaatgagtatatccgaagcgatgtggacggttttcaggaggaatggctgcaatgccgcaggactgaccaggagcgcagcatccgggatgacaaaaagaagctggaacaggcaaagaaacgccttgccgatctggatgtcatcatctcccggctgtacgaggactatgttcttggaaatctcaatcaggacagatacagaaagatgtctgcggactatgaagccgaacaggaacggttaaagctcgaaattgaagttatcgaagaatgggtggaacagcgggaagaaatgaatgacggtctggatgcctttatcgccctgacacagaaatatgtggatgtggaggaactgacacagaccatcgtgaacgagtatatcaagaagatcgttgtctatgccccggacaagtccagcggcaagcgcaagcagaaagtgaagatttttttcaactttgtggacgatgtggatattcccgttatttccgagcctatcatcacgcaaacaacctatgaacacagaaaaacggcgtgaccttcgggtcacaccgttctctgcgacaaaatagttacttgtcactattaagccttgcgtttattgcctttttcatccaccaggtaggtattttccagcgtaccggtcaaacttttgcggatcgcctctaggtattcctgccgcagagccgcctgctcttttttttcttcttcattcaaaccaatcgtccgttctttccgggacagatggctgatccgttccattttttccttttccatatgctctctcctttttcatctatcggcgttccaatcaggaatacggtcaatgagtcgggcaccgtagctttccagcaatttgatccccgcctggcgcagactgtcatcctccagcgcgccgggagaatgggcatctaccccgatgatcacatcacagccttctgctgcggcaatctgccaaaacaggtggtgcggataatgctcctcgcctgttcggctgtcctccagggcgccgcacaggttatactccagcgcaaagcccatctgttttgcggcgcggcacaaacggacgctggctttttcacagtaccggtcaaaggcaggatatccgcgcataaacaaatccgggtgggccaaataagcgtacaacccggtggccataccttccagggcactgttcacatagcgttccagcgtcgcctcatccaccacgcggcggccaaaataaaagcccgtctcctcgctgtattcaaaatgatttcccaaaataatatagtcgagccgttctttccggatcagttggcgcagccaatccatatacggcgggaaatattcgcactccaaaccgatgcggatatcaatctgatctcgatatttccggcgcagggtccggatgctttgcagataatcctgaaactgctcccgtggattcatgcgcatatgcgaacggtaggagctggaaaactgccacggactatggtcggcaaagcccagaatctgatagccgccgcgaatggcgctttggacatattcctcgtcccgaccggacgcatggccgcagcgggctgtatgggtatgaaaattggtcttcatggtaaaatcttcgtcctccattcaatgggtaactgtctggcgcagaacaaccatatcgacacactgttcctccccctcccaaatcggttcggggtaaaaatccgtaaaaaaatgaggaatggtatggtcatacgaaaagccgcatttctcataaaaagtcagattcccggaagaagtccaggctgtaccgaccaaaagaaccgtaccggcaggcaggcggtctttgacctgctgcaccagtgcccggcccactcctctgccctgccacgcctcttccaccgccagatttttaatttcccacgctccgccggccaccggacaataagcaatcaaaccaaccgttttacccttttccatcgccgtgagaactatgctttgcggcaaataccgatcaatcatgggttcgtaagggtccgccagcagcaaaagctccaaatgctgtttgggatcgtgacaaacgaaaaaatccatcagactcccctctctttttacatgatttggattcttggatattgtaccataaaaacgggcgaaaaaaaagcgatgaaatatgccatttcactaattcgctttaaagcataaaatttttctttacttttacactttcccgtggtatactgttgacaaattcagaaaggagaaccgttatggaccgttttaccatgacagcggcatattattattacggctttgcttatgcttatggcaaggcttacttcgctgtcgctgcaaaacggaaactgccgtaaggtctttctttcaaaagacgcaggatacggtcccgcagcatgacagctgcgggatcttttttcttgcgaaaacttgatgaaatggggaaaaattatggtaatcgtactcaaacagaatcccgacggcaacaaagtagaacaactgatgaagcgtctgcgcggcatggggctggacattcaccaaagccagggaaaaagttccaccattctggggctggtgggagacacctcctctgtggacatcgacgctttgaacgcgctggaaatcgtggaaacggtcaaacggattcaagagccgtataaaagcgccaatcggaaattccatccggaggacagcgtgatcgaagtaggcggcgctaaaattggcggtgggaattttgcagtcatcgcgggaccctgctcggtggaatcccgcgagcagctgtgctgtgtggcagccgacgtaaaagccgccggcgcgactttgctgcgcggcggcgcatttaagccccgcacctccccttacgctttccaggggctgcgcggagagggaatccgccttttgctggaggcaaaaaaagaaaccggactgcctatcgttacggaaatcatggatctgtctcaactgtatctgttcgacgaagtggatgtgattcaggtaggtgcacggaatatgcagaacttcgagatgctcaaggaactggggcacctgcacaagccaatcttactcaagcggggcctgtccagcacattgcaggagttgttgatgagcgccgaatacatcatggccggcggcaaccagcaggtcattctatgcgaacggggcatccgcacctttgaaacggtcacccgcaacaccctggatctttccgctgttccggcgctgcgcgccatgacccatctgccgattattgtagaccccagccacgctactggtcacgcttctatggttaagcccatggccattgcggcagctgcggcgggagcggacggtctgatgatcgaagtacacaacgacccggccaacgcgctgtgtgacgggcagcagtccttaaccccggcacagtttgcagataccatgcaggcggttcaggcggttctgccgtttgcctgccgctaagccagaaaggagcgattcgccatgcagatcggaatagtggggcttggtcttatcggcggttctctggccaaagcagccaaggaacggacggattacacggttctcggctttgaccggaatgaggccgttctgcagcaggccctgcagcagggtgccatcgacggcgtattagagcctgaccagctgaaaaactgccggatcgtgctggtagcgctgtatccgcaggcggcggtggattacatcctttctcaccgggctgccttcggtaaccgcaccattgtagtcgattgctgcggtgtaaaagaggtggtctgcacgccctgtgaatccgcggcccgggaggcgggctttgtctttctcggcgggcaccctatggcgggaatcgagcggtccggctttgccttttccaaaggggatttgtttgagggcgcgtcaatggtgctgacgccgcctgccgacaccgatcggactgcggtggacacagtgtccggtttctgtatgcagctgggatttggccgcatccgtctttccacccctcaagagcatgaccgaatgatcgctttgacctcccaactagctcatgtgttgtccagcgcctatgtcaaaagtccagccgctttgtcccacgcgggcttttctgccggcagctttaaggatatgacccgggttgcacgtctgaacgaggacatgtggaccgagctgttttttgacaacaagccggctcttttggatgaaatcgaagggctgattgaccggctggaggcatatgccgaagcgctgcggcaaaacgatcgggaaaaaatgcatattttattgaaggaggggcgggaacgaaaagaaatcgtaggttagaatatcgcctttcccttgacaatatggatggaatagactaaaataaggaagcagttttccatccgtgccgctgtggcggaattggcagacgcaagggacttaaaatccctcggttgaataaaccgtaccggttcgatcccggtcagcggcaccatgattcgtgaacggtttagatgccatcggtgaaaaagccgatggcatcgccgtttttcggcacttttgccccctcaaaatacaaaggttgaacaggagatgccaaccggctttttcgagcgactgtctggactcgaacctgtgcacagcaagattcattctccatgtcaaaaatcagcgatagctcatctgtcatttttcagcagatggctatcgcttttttattacccaaatgaagaactaatataaaacataatcaacgctatcactacggcgccgatattctgcaatttgcagagtgtcggcgcttttttgcgttctgaaaggagtaaaaatcaatgacaaaatatttcatgcggaataccccgtattattcggccgaggtaatgatgatgactgttcctgggttcaagcccagaggaagggagtttgtaatgtgcagccttatagttcatctgcacctgaaccgacatcggtgatctcttatcctgccgccttttctcttttaccattcacagctctgccggggagccgggccagtattgtaaaactctgcgtaccacggcatcaccggttgaaaagcgcagcggcgggtatggatacacaaatggcatactggccgctttgcggttattataccatattgggccttttgaaaatgtaaagaagacgccttttagcattaagattatataaaggcagactcatcttaatctatttctaatatctgcaccattcccctaacaccatctttttaccgctcgtgctatactgacatcagcaaatggttcctgagagaggtgctgaaaatcatgaccaaacaattatacgctaccaacccaatccaccatgataccagacgatattgggaaaaaggcatagaaatgatccgcttacaatatagaaaaatccacaaacaaaccgctttaagaaaaaaggcagccacttattttgaaaaatatccgctggcattctggtttaccgcttttatcacgatgccgatggcaattctgctggcggtcggcgccataacagcaatgtgcggattgctttttctctgggttctatcctaaagctgattgcaggtggaagcccgttctgcaactttattcccgccgcattcgaaaaagctttattcctttctgaaaagcccggctgaatgctgggtgtccgtaatacaggaaacaacaaactttcaatgattatggcatctggcagtcgaggttagcaaaaaacataatgagcgatacttggtttgaatgaccaagtatcgctcatttgcgtatgcgacaaacttctgtacgacagctgcggcttcttcatcgacgatccatttctttttgtcctccgggcttttcata

SEQ ID NO: 927 - DNA, 12394 bp, Unknown
  16S sequences of unknown bacteria
ttttacttcttttaattcgtcgtgtatgaacgacaggctcatttgtttgttcatgaatttattataccacctttttcacgatttttcaagacccttggttttgtgcggtgttgccttaactgtatcccttgagttttgtcgattgaatatgtatataaattctcagctttattataagcatgtcaaacgtttcaaccgtttcagttacctgaaagtcctttgagaaaattcttgaagcttgatcattcgtttcatttcattgcattcttatgcctctttaatgattatatttattatagcatattttcgggcatttgtcaagaaaaacagcctcgcaaccacggaaatcaattttcctctgtacaaacgcctcaaaatatgttataataaaagcatggaaagaaaaacactaacagagtacttcgaagaagtggaaacaaccgaggaatacaacggatatttttgcagtatagcggaggcgatcagcatagtagtgcttggaagcctttgcggactcaaaaatgtgagccaaatccatcaatgggcaggcagcgagcgagtaaaggaatttttgaatgagaaattccagataaatcacgtcccctgctactattggctgctggtactgctgaaaatggtaaagactgacacgttgaatgaatgcctgatgaaatgggcggctcaactgctgccgaaaccggaagaccgtggtcagacaaccatctcacttgacggaaagacgatacgctccacaaccggaatgaagaatatgagcagtccgcttcatatcatcagtgcacagatatgcgagctgggcataactcttgcgtccgagaccgtagcagataaaagcaaattgagccatcgtcagaaatcgtgggtcaagtccgccgaggcagtatgggtttaacagcagagcaggacatcatgaccatggaaatgagattatcagtattgcgaaaaccatatgcccttctgatgatcagcttgatcttgttgttagtagcttcaatgcgtgcgttcgaaagcttatgcttggctcccgattttgcatgataattcatttattcttggttggctgggttatgtactttttcgtgcgctttttatgtaagttttacttgacaaatacagatgagaccgatcgtcattcttatgcttcttttgttgatctcagactttctgtcttcaagtatatctccggattctacaactcattaagacctcactctcataataacggtctttctcctatccaagccgaggggattacttgattttttgtctacttttttgggggtgatccatcgggtaagcgttaccaccttcacctcatatatctgctgcatttacaccttgaaattcgggcagtacaggacttcgttttgttcaggaaactcgtccatttcaagtatgccttatatgcagtttctgttcgtcagaccgaggctttgcttcgggcttccttcagactccgcctcacgacggaagcccttgccctctgctaacagttcctgctgccatgcctgcagcggactttcaccgcctagttgtaactcgtgccgagcgcactgaatatgataagaatagctcatgagatattcctatcatcaacaaatgggcgaaacagcgaaggctgtttctttaccggagttcatggagaaatcctcttcgcgtacagccgttattccagcgcggtaacctctgatgacgccgcctgcgacatcacgctcatccgctcgttcgacaacggcgagagctggtcggaatacgagataatcgcgcacgcgtcggatttcggcgtgaagaacatcatgtgcgcgtcggctctcccgctctctgacggatgattctgcgtctacttcataaaggaaaacgacggtacgagctcgatcggactgacaatcttgtctgacggcgtgaatttcgtcctggagcgctgccggtgcgatttcccgaaggcatattatgtaatcgagaacgaccgcttcgtgagactgtcggacggtcgggtcgcgaccgtcgcggcaagacatcttgaacgcgacatcggcgagattatgccgctcgtctcggacgacgatggcgcaagcttccatcacaccggagcgtatctgaagctatcgggaactttcggcgtcagtcgcggacttgaggaacccgggcttgtagagcttgaccgcggactcatctggctttacgcgcgcacgaatctgatgtatcagtatcagagctattcgattgacggaatgcggagtctcacgccacccgagccgtcggtctttacatcgccgtgcagtcccatgactgtgatacgtatttctgacggttcgcttctggcggcatacaatccggtgccgaattacaacggacgcgcgaagcttaccggcgatatgaatatggacactaattggtctgaaagaactccgcttgtactacgttgttcgaaagataacggtcgaacatggggtaaaccgattacaatagagactgagaaaaagttggatttttgctatccgtcgctatatgaaacatcggatggagcagtcctttgctcatatatgtgtataaaaggctctttcgaaaaaatctctttgaggataacaaaaataacggaacagctttgatatagaggaaggcaaatgatcaaccttaacttcaacactgtcgagaagctcggtattacgaatcctaagatcacctgtaatcgtgatctccgtttctacaacgtgaagcaggaaccgttcaccattcacgggctttatgacccgcttgggaagtctccataccaccgcatgcccgagtcggtcgccgaagcgaccaatgatcgtgtgaaaatcacaaacttccaaacggcaagcggacgcgtccgtttcgtaacagattctgactatatttctctccggatgatttctggcggttctgcgcatatgtcgaatatgtgccttatgggttcatcggcgtttgacatttatgtttcgcgtaacgatactgataggttcgccggtgtcttcgatttgccgctcacaggatacacagatggatatgacgatattataggtcaaccctggctggcttccgaaggggcgcaaggagatcacgatcaactttccgctttactccggtgtgaccgaactctggataggtcttaactggaactcgacgctcgaaaagagagcggattacaagatcgggcgacctgtattgtattacggctcgtcgataactcagggcggctgcgcgtcgcgtcccggcatggcgtatgagacgataatctcccgccgcctcgacgccgacttcatcaacctcggctcaaacggctccgcccgcgccgagcagccgatagcggattatctggcgtcgctcgacccggtagtgttcgtcatggattacgactacaacgccccggatccggaatacctcgcgaaaactcatgagaatctttacagaacattccgcgtcgctcatccggatactcccgtcataatggtaggcaagcccgacttctggctgtgcaacgaaagcaacatggagcgccgcgacgtgatctacagaacttacaacaacgcgcgccttcgcggagaaaaggtgatctttatcgatgaccactccctcttcccggcaaatatgcgcgaggaatgcacggtagacaactgccacccgatttattttacaatgtgcctttttctttttcattctcaaattcataacggtacctgctcggtgaaaccgagtatttttccctgaaaacccttgaaaagtattcctgtgacgagaatccgcaacggtcggctatctcttttatcgacatatcagtggtcttcaggaagagaaccgcatgattcaggcgcagcctctgtatgtactccccgaagtgcataccgatgtgcttttcaaaatatgttccgatatagttctccgacagtccgacaaccttggcgaggcttgcttttgttatcttctctccgtagtgccgctcgatatagtcggtgatgacattcagatatttcgtatccggccgctcgccgccgtcacagcctcggtcgagcgcggagatcaaggtaataagtatccgttcaacgatattcttcgacatcagcctgctgatctcatcctccgcgccctgtatctcaccgagccgccttacctcattcacgcagatctccgcgtcctcttctgtgagaaatcctgaatacggcgcgctgaacctgttcagtgcatcgattatcactccgtccggcagttccgggcggaattttatattgtagatctcgaactgaatcaatggatcaagcgcgtatttatggtactcgcccggtttcataatgaagaaatacctccggtcgaccttgtacgggaccgaatcgatataatgcagtccggagccgttcatgaaaatctctatctcaaagaagtcatgataacaatatgtatccgagttcgggtaatcgtcattcggaaaccattttgaaaaatcgcatgacacactcctcccattaagatacgcgacgctggtttggaacaacttcatgcggatacctccatgccttttgattgattattgcagaaattgattgttttgtgcagagcgccgatattgaatcgggaattttgatatggtataattagtatagcaacaataagtgtcagacaattgcttattattttaattatcagtaaattataaattactgaaaagttatataataagcaatatatcgattattaatatcaattccgaaagggaaaacaaataccatggaaaactcaatacgcgtcgcgtatgaaaactggatatcgggcgagcggttcgacgagctgctcgggatgctcggaaaacaccggtgcggcataacaatgatcgcgctgttcacatcggcggttcactctcccctgaccctcgatgagctgagtcgccgcgcggagataatgcgggagcggatgatgtccgcgagagccgccggattctccgccgggataaacattctcgcgacaatcggacatcactctgaggatctcgctcactcccctctcggtctcggataccgcaacatgaccggtatggacggaagcgtctgcgaaggctgctactgcatgaacgacggaaaatacatctcgggatacatagacccggcgtatcagacgctcgtcgcggcagaaccggatttcatctggatcgacgacgacgtgaggttcggtcacatgggaagtggatatggctgcttctgcgacggctgtgttgacctgttcaaccgtgagaacggcaccttattcgaccgcgagagcctgaaaaaggaactcgacggtcggaatatggacatcaggcgacgctggattaaacacaacagcgactcgatggtaagactcgtcggacacatcgcgcgtacggtgagatcgctgaatccgggaattcagctcgggcatatgatcggtgacaactatatggagggcataaacgtttacgctctgaacgacgcgctctctgaaaacggaaaatatgagatattcttcagacccggaggcggcgcttactcggacgccaactatcaggatattctctacaaggcgtgggaaatcgccggtcaggtctcgctgctgccgccttacgtgaagctcatacactcggaagtcgagaacttcccgtaccagcttctcaagaaaaccccgctctcgaccgcctgcgagggacttatgtacatccagagcggctgctccggcgcggcgttcaatatgctgccgtccgagaccggcgagccaataacgaatattctgccccacctcaaagaaatcgacaggcatatcccgatttacaacgcgcttgaggagcacacgcgcggactcagcgtacacggcatccactcatcgtggagaccggacaatttcctgtatactccggctggcgactggggaaatatgcgcggatggcacagcacaaagttctgccagtacggccgtgagcttctttcggcgggtcttcccgagtgcttcagaccagactgcgccgaggtgttcctgctgaccgaaaactccgccgaggggtatacggatgacgaattgaagaaaatcctgtccggcggggtgtatgtcggcgcttccgccgccgcgtacctgaccgggcgcgggttcgggaagtatctcggctttgacaccgggagagacattccggtcgacgcgagagaggaatatgtcaatcatgagatgaaccgcggcatcacaggctgccggcgcaactgccgtcaggcgttcaaccatggagagagtcatgagctcataccgcttgacgataagtgcgaaattctgagtcggcttgtcgattatcacgacagggtgctcgccggggcgtgcaccggactttatgagaacgagctcggcgggcgcgtgtgcgtctcgacatattacccatttgactgggtttccgactatcctaaaacagtgcagctgaaacgcatattcagatatctctcacgcgacacactgcccgcttatgtcgacagttatacaaaattgcggtgcatagtcttcaccgacggaaagcgcgtcgttccgacaatctgcaacacgacaaacgacgcagagacagacgtccgtgtcgcgatccgaacggaatctgacacagcggtgttctatggtaccgacggaagtccggtgacgcaccggagcgtttacgccgacggggcgtacagaatgttcgacatcgacaggatagacccgttcgagacggtttttctggagtgtgagtgatgtcagataaactggatatggagcagctgctttcacatcatgacctcgttttcgcgtcaccggtgtgcgacccgacatacggactgccgctcggcgacggcgacgcgggagcgctcgtgtggtttctcgaggatcggctcgtgatcgagctcggaaagaccaatctctgggacaacgcgtcggagtgctccggatcggtgataaccgagtctggcgaggatctcacgacctgccgtgggggtgtcaggctgacgcttgacctcggttgtccggctttcgggagtatatatcaggatgactttgaggcgagactgagacttcacgacgcgattgcgagcataaggagcaggacaccgttctgcggcactgacatgaagatcttctcatccagagaaaaccgtgtgactgtggtcgaggcggatatctcgtataacgaggatatcccggcggcgataaagctcgagcgttggggcagcaggacgttttcatactggtattcgcggttctgctccggaacgtcgaccgggctcaccggaaccggcactgatatcagggacggatgcgcgctcgtcacgcagagaatgaacggcggatgtttcacggcggcgttactgcccgtgtgcggtgcggaacatatattgtccgtcaggggttcacacgctgtcggctgtgatttttccgccgcttcccggctgagactcacactgtacatgactgtcacggtcggtaaggacgcggatgagagcgaaaacgccgcggtcagacgactttccgacgctgcggcgaagggtttcggagcgatatatgatgagcacgcggaagagtggcgcggcttctgggagaaatcatacgtcagcctgccggaggatcaggattatattgagaatttgtggtatcttaatctttactacgccaactgctcgatgaggggaacgtatccggcacacttctgcaacgggatatggagcttttaccacgattttgtcccgtggaacagctattttcattacaatatgcagcttgcgacatttcctcttgacgtggcgaatcacacggaactcctgaacacatactgtgatttcaggtctcgtcagcttccggtcgtgaaggagtacgcggaaaagcacaaacacacccgcggagcgttctacaccgacgtctgcgaccgcttcggacggaactcagataacacgagggacaactgcacctgcgggtcgcagatcgcgatgatgctacacagacactatcagttcacaggtgacgaagaatttctccgcaaaaaagctctgcccgtcatgcgtgagacggcgttcttctacctcgataaattcgtgaaggaggaggacggaaagtatcatatccacggaacacagtgctacgagggctcgccgctgtttgacgacagcataaccgaccacgctatgctgcgcgcgctcttcacggcgctcggggaattcatggaagaggaagaataccgccctttccgtgagatgctcgacaatatcgcgccttatatggtgacggatatgtatgacgatgagacaaaagacggcgtcttcacacgcggaatcggaaaaggactgcctgcgcgtgggaacaaggtgctctcggtcggtctgaaggacggcgtgaaattccgcagaaccttcggaaacccggcgaacgactactacggttttccggacacggagatggctccgctgtttccttccgggaatgtcggcataaaggacagcggcagcgatgtcttcgatatgatatacaacagtctctgtcttcatcacccggtcatcccgccggacaggagtgacggatgggataatccggacggcatctgcatgggctggtgtatgctcccgatatatctcgcgcggatggggatgagcggtcttctgaagacagtgctcgacgacacggcgtcaacgtggatcgtctacccgaacggcttcgggaactacggtccatatgaggacgtcgggaccggcgtcataggcatacgctcgagatgggcgaagaacaccctgacaaatctcgcgacaggcgagaagagcgaggcgttccagtggaatttcaggcacttcgactacgagacgctcccgataatcgcgacggcagtcaatgaaatgctcgtacagagccatgacggcacggtgcggctcttccccgcggtgcgacgggaggaaagatataatttctcgctcgccgcggcgggaggattcatgattgacgctgaatattcggatggctcatgcgacgtcagaatacgagccacacgcggcgggtgtctcaggctcgcgattgacaacgtggactccgttccggaattcacgcttaacggatgtccagtccgggtaaggcataacggcgaactgttcattactgatatgagcgccggagacgagcttggcgtgaaaaacgaaaatgggaatttttcaggtttacgcgcctatacccggaacgacgggctgaaaaaaatcggtgactcggtactcggcacaggaaaagagtatcgataaccataaaaaatgaaaggtatggtgaaaaatgaaaacaagaaaaacaatcctgtcgatggcacttatcaccgcgctgtcaatggccattgccgcgtgcggaaatggttccgcgccgataaatccggacggcacctcgtccgatgacggctccgtgacgaccgcgccggcggatggactctcgttcattccggaaggaacgaactacaacggcgaagaggtaaagatcatgtacgcccacgtgctgatgagcgattcggagaacgaggtcacgtacactccggacgagctcgacggcgacatcatctcggacgctgtatataaacgcacgactatggcggaggaaaagctcggcgttaaaatcacgagcgagcaccttaaggattacggaacccttccgaaagtcatcgaacagagcatcatggcggacgacaatcgcttcgacgctgtagtcggcagacttcaggtcatggtaacagcgtcctctaacggtcatctcttgaacctgaagaacataaaaacgctcgacctctcgaaccaatggtgggatccaaatgtaaacgactgtatggatttcggcggcgtgcagaatatcgcttccggtgacataaattactgcgacgactattcgatcaatgtcatcttcttcaacaagaagctatttgaggcgtatggcatagaggaaccctaccagctcgtcagggacggaacgtggacgttcgacaagctgctcgaaatgcagaataacgcggctgtggacctgaacggcgacggaaagtatgatgaaaatgatgagtacggcatggtctcctccaatctttatgttgtccagatgctcgtcggtttcggaaacaaggtcgttatccgcgataatgatgaagtggtcatgaacaggtcgcagaagatcatcgagcaggctattgaggttgttgacaaagccgcaaaaagggataacaactcggtaattatcgaggaaagaaagatgggctatgaaaaaggcgacgcgcttttcccgaacggtcagacaagaatgtacctcgcgcctatgggacagatgcttaaatatcgtcagacaatggaagacccgttcggggtgcttccgatacctaaatatgatgaagctcaggataattactactcggcggtaaaccaatactgggcgtcctgtgtgagcgttccgctgaactgcaaggatacagacagaatcggatatgtgctcgaaactatggggtattattctccggaaacggtaaccaaagcggtcattgagaagtcgatcatcggcaaggcgacacgcgatgaggagaccggagaaatgcttgagctgatattcaagagcaaggtctttgatccgggactcgtctatgaatggggcgccaacagattctggtatgatatcggtgacgccggaaagagcgatatcatcatgtcgcgccttgaaaagaagtatgataatatcaacgccaggatcagcgaatccatcgccggcataaagggttaacggtaatcgaggagactacccatttattgagtagcccccttctcgatttcaccaagaaatcgcggattacagaaaatttgaacacaacttaagaaaagcagtgtcacgaacatatcggcgtgacactgcttttgagttttatatcgaaacacagttaatcatattctgataaggctcaacgttaaaattcgtgggtaaaaaataggaaaagggcttgcgcaaactggaaaaatcgtttagaatatagttaccacacttcaatctgaacggagataaaccagatgcacataaaagccctaatccaaaccctgacaggaacatcatatatcgtatgcgagagcatagaaactgacgctgccggaaccataaatttatagcatatccggatagaaaaagtcaataccgctgcggaatttgcggaaaaaaatctcctcgctatgacaacgggggcggaacacgcaagtggcgctgccttgatacaggcgaagccaaagcatatgtcgtcgccgaagctccgcgtgtatgctgcaaggaacacggcgtagtcaccgctttcgttccgtgggcacgccataaatcgaggttctgttcctcatttgaggacactgtagcctggctcgctttgaacagcaccaagaaatgcgtagctgagctcatgcgaattgaatggcacaccgtaggcgagatactcagcagagtctataaagagcttgagaaaaagccttcgaaacgctttgataaccttgtcaatatcggaattgacgagacaagctacaagaaggggcacaagtatatgacagtcgttgttaaccacgacactaattctgttatctggtgttccatcggccataaaaaggaggttcttcaaaagttctttgatggtctcacaccggaacaacgtgaatcaatccgctgtgtcagtgccgacggagcaaggtggatcgctgactgcgtgaaggagtactgtccgaacgccgcgctgtgcattgacccgttccatgtggtgtcatgggcaaccgacgcgctggacgaagtccggagaagagcctggtctgaggcgaatcgtgcagccaaagaagtgcagaaacgtcatgtcggacgtccgaaaaaaggagaaaccgaatctcatgaaaagaagcttgctgaagatattaaagctacgagatacgcgctgctgaagaatcctcaggatctcaccgaacatcaagaggagcaattgaagtttctcacgacagcgaatccaaggttgtaccgtgcttatctgctgaaggaagatctccgtctcgcgttgaaagcgggatatgagagtgtcggcgagcttatgcgcaaatggatgtcctgggcacaacgatgccggattccagagtttcgtgaactcaggaaaaagataaagcggaatatgacaggtattctcgccacagccaagcataagctttcgaacgcacgcattgaagcgagcctattaacctttttctgtaaatccccctgaatctgtggtataatagaataaaaaacacaggagaaccaaaatgggaagaccaagaaaatcgccgtcgatgacagacggcaagcgagagatcatctcgagattgatcgaggaatatgacataaagaccgcggaggatatacaggatgctct

SEQ ID NO: 928 - DNA, 7232 bp, Unknown
  16S sequences of unknown bacteria
taatttaaagctcacccacacggtctgaaaaaagcggcgcagatgctggactgctcaagacagaacattgatgacctgtattttgtgtgctatatgattgagcgggtagcaagacagctgaaacaaagaaacagatatgtcgtaaattcaattggaagaaccggattatatcacctcataagctgtgctgaaactctacactgtgaaaatcctgataaggtggctgatgactggattagggactacaatctgacagagggtaattttgatattaccgcagttgaccctgaacttgcagatgttattccaacagcgcttgatatgggtgaggtgtatcagcggctgattgtggatacacttggtgcaaatgaggactatatagacggcattttgagagtgtacaataacccgatttgtgatgttatagataactacaactgtagtgcattctatgagccttcatatgtgatagcacgtgcatatcaaaatggcggcttttaattaataaacatatatggactaaaaaagggcgaagctgattaatcacagctccgtcctgattcttttctggccttgcgggcctcttttttcatattctttctgcttctgatatgaggaaatgcaataggctttaacagcttgttgtgccgcagcctcctgtaagggaatatgatttttcctattcctctgttgtatattttgaagcccagaattcctatccagtgctccttgcgctttccctttttggtctgctcacgctctatgccgtaggctctgattggaacgcggttttttactgcttcaatcaggtcattgttgccgcgtatatctgcatcaatttcagtgcaggccataccaaggtaatcacagacgtgagcgtcggaaccggcaaagccgggcagcttgtactcatctgcaagtatttttgccctgctgtttgaaacagcggactcacaggtattaaaagtttcgataaaatcaaatttgcgtatcagccgcatatccatctgcttgaaccccatcgcgctggagcttgcaactccaaacgggtgggcaggtcctaaaattccgccgaagatgtgaacaatctttatcagcttgctgcagcgcataccgcgtattttgagtatgggcatatacaggtcgtcgggcattataacgaggatatgacccgcatccttggtgtcatattctattccccgtataacgtgaaaatctctgtatctcggatctgttttgagtttgtcccacgccttgcagcccttgtagctgttgtggtctgaaatcataaatccgtcatagcccagcgtcataaatttatatacatattcctgaacggaaaccttagagtccagtgagccttctttggtgtggcagtgtaaatcaaatttcaatattctcgcctctaatcatttaaatattgctcttaatattatattattcctaaaatagtattatttcaataacaaaaaaacaaatttatttatcaagaagaaattccctaagcttccttgcggctatgctttcgggcaggtcctttcgttccagcagatatatgtgcctttcggggagactgtcagacagagatatccggaatatgtcctctgcgctgcctgccagcttttcgggataaaatccaagccccagattatgctgcaccataggcagaatctggtccattgtagccacctctatatcggcgtgaagctgtactcctttttcgagaaaaaagctgttgtaaagctgtcttgtgccggtcttttccgaaagaaagataaagggcagcttagacagagcctccaaggaatgaagattctttgcaagatgagaataccggtttccgcatataaggcactctctgaatgtcataagagtatgacttctgattgaagcaggtatactggcagggcttgttattacagctatatcggcaagtccgctttttatttcatctgttgcctgcggtgaggtctgatttgaaattttaagctgcacattggggtactcgctgtggaaagcctccagtctgtctaggagaaacagacgcagcgcgctgccgctggcggctatggttactatgcctctgtcaagtccctgatcttcttttaattcagcttctccgagactaagctgcgtatatgcggctgaaacccgcgaataaagcttctcgccctcgggagtcagggctattcctctgtttgagcggacaaaaagcctgcagcccagctgtgcttcaaggttgttgatgcaccttgtaatattgggctgattgttattaagcgctgccgcagcttttgtaaagcttttgtatgtggctgcaaaatagaatatacggtaatagtcaaagcttatcacagcaaacctccatataagtattatatagttaatatattaaatatactctttacatatcatttctacaaaagtataatacagatgaggtgaaaaagcaatgggcggtgaaaaaaagaaaagacagatgtcggaagcttttgtaacgagtatttttcttgctttgtcgggagggcttcaggacgcatacacatattgtatcagagacggtgtgtttgccaatgcgcagacgggaaatgtcgtgctgatgagtcagtatctgatgcagggaaatttcagtatggcggggcattatgccgtgccgcttttgagctttgcctttggcgtttttgttgcagaaaagcttcaggcgcgttttaaatatgcctcaaagcttcactggaggcaagggcttttagtgcttgaaatcgtattgctggtttttgtagggttcctgcccgaaaccctgaatgttacagcctcctctattgtatcatttgtctgtgcaatgcaggttcaggcctttcgtaaggtaaacggatactcctacgccagcaccatgtgcataggcaatatgagaagcggagtcgccgcattatcggcctttcacagggatcgcaaaaaagaacagctcagagaagcccgccactattttggcgtaataggatttttcgcagcaggcgcagcaataggaagtatgctggtaccgatagcaggtattgcgacaatatttgtttctgctgtttttctgtctgtaagcttcgttattatgtttttagactaaaaaaacggtactgcattttcgcaataccgatttttatttgcttaattctcatgcgggtcagttgctattaccgcctgcattaccttgtttgccacagcgcctgcgacaacacttccgtagccgccgttttcgacaagcacgatgaaagcgtaaggataaccctcgttctttataaatcctgtaaaccacgagtttggagccttgccgccgccaacctccgcagtaccggattttgcatagatgtcaagccccgggaagttgctctcgccataggtcttttcaacgttgtttttcatcatggactgcatttcaagtgcagtatcctcttcgatcagagttcccgtattctttgtcttgtatattcctgcgggaagtcctatcttgtatttgactgtagatattattctcggctctgccgcgctgccgccgcctgcgatagctcccacaaatctaagataggagcatgggtttattaggtcttcgtactggcctatgccggcccatgcgagaaatacgttgttgtcttcgggaaaactgaaactgccggcggctgtctgtataccatttacatctacagatttgtttagcttgtatttatcaatatattcctgaagtgtttcggcacctacatcctgggcaagctgtgcaaatgctccgttgcaggagtttgccagtgcgtcatagaaattctgatgtccatgtaccatagggcaggtgatggtgtcagagccgtaaacagctttgccggtgcaggtatattcccaactgtccagattgcttctgttttcgattacggcagaggcggttaccagcttgaatatagagccgggcactattgccgaggaaaagaatctgttcatatacagccccgatgtatcatcgctgcttacagcaggaggattttcggggtcgaaattaggcgagcttacgaggcagagtatatctccggtttcatagttatatacgcctacggtaccgcttctgccggcaagagcctcattggcagccttgcatatgtcggcgtctatagtcagataaagatcgcggtttcccgaatcatagacccccgtaattatattgtatcccaccagcttgctctgaaatgcgctttcggcagagctgctgatgcttctgtttcggtcgcctaccgtatgcaccgtagcgcgccttatggcagcatcgtcattgtagttaatgccgtctttggtgttttcggcaagctttgtgccgtttacatcatatatcgtacctgtcgtcaggttcccgtccttatatatatgctgattggcaggatatgaggcccatgtactgcctttgactgcaaattcagctataaatatgcctagtccgatgacaagaacagcagcacacagcaggcatagtatcgctcttttttccagttttttcatctcaataaccccctaaaacaaatcgttccagtctttgacttcctgaacttcaggctctttgtatacctcatcactatcaagaggcgcagctttgtatatgtctatatcctctgcaggctgaaattcgttctttttggtaagccgcaccgcaaagcttgaattctgtcttgtgtccgccgccttgagaaatgccagaagtccccatgaaaccagcatgctggagcctccgtttgaaacaaacgggaatgtaactcctgtaagcggcagcaggtcaaccgaaccgaaaacgtttaagattgtctgcatcagaagcattgtcattgcagagcaggccgcaatcgtatagaatgtggaacgccccgccattatggactgtaccgcaaacaccgaaagcgttactatggagagtacggcaagtgaggatattatgagtccccattcctctgtaagcactccgaaaacaaggtcggtgtcggatgcaaatacctgattgagccagccgcctcccgcgccgactcccacaagacctccgctggcggaggcaaccatggttcttgtctgctggaagcccgctgcatctgcatattcccatacgtgtccccacgcggaaaatctgtctgctatgtatggcttgaatttaagcataagcagaacgcctgttgcggctaccgccacgatgagtataagttttgaaaagtcgcccgaacgtaggaatgatatgacaaggaaggtcacaaaaaagattgcggcggttccgaagtcactcataagcgccagcgcgcccagacagaatattgaaagccctataaacagggtcaggttttttcttgtaaaaagctcattaagcgttgcagctccggcatagataaatgctatcttcacaaactccgagggctgtattgacgtaaatccgagattaatccagttctgcgctccgtattcggacgtaccgaacaccagatttacaagcagcagcagtacggctgcgcctatcataaatatgcgtatgccctttgccctgtttaaatcccgcagataccagcacaatgccagaaatacaatcagtcccagcagtatggcgataagctgcttgagtactgattcgggagctgcggaggctgtaaccgcaagactgagtgttgaaaggaaaaatgcaataagttccatttcaaagcctatcctgcgaagcgagcgcataaacaggaaatatgcccacataacaacacatagtcccagcatacacagcggaagtgccgaagggcagtcctcacccagtgaaatgacaagctgcagcgcggtcagtatctgaaaaatgctcagtgccgcaagacacgtccatggtgaaaggggctttgatttttccattctgtagttggtgttgtttctctgctcctcaagacttatagggaacagtgtaagctgctcctcgcctatggagataatgtcgcctatatttacaatggcagatttgcggcgcattcgctcgccgtttatataggagccgtttttggaggccatatccgtataggtccagctgccgtcattgtttcttatcagcgtggcgtgatttcttgaaacgctcatgctgtcaagcaccacatcgcagcttgaggctctgcctattacgttttcccagtggctcagcggcgtggaattgccggtttcgtcctgaacataggcccatatttcagacggatttttggatctcaaaagtgaaatgattgcgtgaagcagcacataaaccgctatggcaacaaagacccatctgaatattgtggtaagcaggtgcgctgcggcaggaattttgtcaaaaaatcctgctatggctccggccactgcgcctgatttctctgtcgatacttctaaaaaactcattctctgttctccctttacctgagccttatggatacctctcccgttgtcagcgcttcccttgtgccgtcagggtatcttactataagggctccgttgctatcaatatcctccgcaaaagcagcgacaggctctctgcccgtctttataacattgatatttttacctataaccattgaactctgtctgtattcatctataaagtctctagcctcaatgtttgaggcgatatccagaagctgatttacaacctctgcggcaagagcgtttttggaatagctgccgggtatgccgcctgcaatttcctgtatttcatcggggaaatcctcgcaggagcagttgatgcctattcctacaactatatttgtaatctgtccgctttcaaagtctgtgatggcctctgtgagtatgccgcatatttttttgccgtcaagataaaggtcgttaacccattttatctgagggcgaacgcagcatatggtctgtatcgctctgcttaccgcaaccgaggctgcggcggtgataagcactgcctttgatatatcaaaatcgggctttagtatcaccgagagatatatcccctgtctttcaggtgagtaaaagcttctgccgagtctgcctctgccggcggtctgatgtccggcaactgcgcaggtaccgtggcaggctccctccagtgcaagggctgcggctcttttgttggtggaatccgtactctggaaaaaatacagcggagtgccgcttttgagatacagctcgatgccctcctttgaaagcatactgctgtcctcgcggagcatatatcccttgttggtaacggcgtcaatgctgtagcc

SEQ ID NO: 929 - DNA, 2910 bp, Unknown
  16S sequences of unknown bacteria
aagtatatacttttttgacgacgtcttcgtcatatccggctgcggcggggcgctcacgattgagggctgccgtttccacggacttcaggatgatccggtcaatattcacagcgtcggcgtccggcttgacaggataaatgaagacggaacgctcaccggcagcttcgcaagacccggaatcagcaatttccggcattgggcaaaaacaggacacgcactcaggttcatagatcgccggagcatgaaatacatcggcgaggcaaaggtcggtgagttcactctccttgaccgagacacgttcaggataaccccggacggcgacatcccggaagcgctcgcggcgatgccggacgggagcgtcgcgatagagaacttcagcgatttcccgtcggtcacgatcagaaactgctgtttcggcagcggccgcgcgcgcgggatcgtcgtgatgaccccgatgccggtcaggattgaggacaacgtcttcgagtctcccggagccgcgatagccatagcgggcgacacgaatttctggttcgcgcccggagcctgccggaatgtgactatccggcacaacacctttaccgacagctgctttgtgacgccgtatgagtacagcgaagcggtgataacgatattcccggatatcccgcgcccgtcgaagagccttccgtatcacagcggaatatcgataacagacaacgcttttctgacctccggtgtaccggtattgttcgcgttctctgtctccggtctggacttcaccggcaacaggctgttcggaaccgagcgcggcgatatctgtggaaacggcgcggctcttcttcggctcatcaattgtgtcggagcggatatttccggaaatgtcctgaacggtgtctccgcgtccgggtttgtgcgtaccgagagcggtacgcacacgcgaagatggagacagtgacaagcatttcagtcaacagcgatattcctttttaccagacaaaaaaatatattaattttggaggaagcacaaatgaaaagaagattatccctgatactcgcgctccttatggcggcgtccgccgtgtcctgcggaagcaccggctccggcggagaaaccacgagcggttccggcggagagaccggcacagcctcagaaacggaggctgaaacgaccgacatcgtcaccggtctgacgcccgagctgcgcgaacagctcggtcttgacggctatgagttcaacgtaatgctgacacagcagggcaccgactggtcaatacacgacctcgtcgcggaggaggagaccggagatatcctgaacgacgctgtctattcacgcaacctgtatcttgaggacaagtgcggattcaaaataaaagcgggctacagcgcggacttctacggttccgagatgacgacgttcatcatggcgggcgacaccacctatgacgcgtatttcccgatggcgaggtccgcgggcggcgcggcgtcgcaggggcttctgtacgacctaaaccagcttcgatacctcgacctcgacaatgactgctggaacaagctgttcagcgacacgctttcgatcggaggaaagctctattacgctgcgggcgacatttcgacaaactccttctccgcgataagcgtcatgtttttcaataagacaattcacgagaacctgaagcttgacaatccctatgatctcgtaagaagcggaaaatggacagtcgacgccctcaactcgatggcagtcgcaggctcggctgacctcaatggaaacgcgaagatggacgatgaggatcagtggggaatgatgctccccgcgtcggtcggcggactgttcttctactatggcttcaacgagaagataacatctaaggacagcgacgatatgcctgtaatagaggtcggttccgagacctcgatacgcgcgtatgaccggatagttcagctgctgtcagacaagaacacctataatcagatgcaggatcaggcgaagatgatgaaggatttcgcggacggaaaggctcttttctactatgaggtgctcgacgtcgcgaaccgcgtgcgtccttacgagatagatttcggcattctccccgcgccgaagtatgacgaggcacaggaaaactatctctgcaacgcgaacggctggtgcgtcagcccgatcgtcgttccaaagatagtcgagaacccggaccgtaccggcttcataatcgaggcgatcgccgagacctcgaagcagtacatagttccggtcttctatgacaaggtccttaccggcaaggctctgcgcgacgacgactcggcggatatgctcgaccttattgtctacagcttcgtgctcgacaacgctgacatctaccagtggggcaacctcgacacccagatgcgtgacggcatgaccaaaggcactgatctgtcctcgataatcgcgaagaaccgctccgcgtttgagaaagctattgagaagacagtcgcaggaatggcagggtaatgacaccattcggaaccatataaaaaagtccctgcttccatgcgctaaaacactcatggaaacagggattccgtttttgctgtcttattccgaaatgatcttgaacggtgcctcaacaccgtccacaagcacttttccgccgattgttccgaacgctccctgactgtcgcggtatgtcagaaccccggtgcagactccgctgaaccttctgccgccggacataaaatcaaaagccgtctcctcgccgtccgatattccgccggcagtcaccatcgagaagctcccgtcacggagaacacagccatccgatatccctgaccttacgcatccgagtctgtccaaaaggcttatatcaaaactgtcctcccgcgggatatcaaaaaacatcttcccgccgtcaaagtatctgtccgccgttccgaccgccgcgacagaaaccc

SEQ ID NO: 930 - DNA, 32759 bp, Unknown
  16S sequences of unknown bacteria
tctgtatgaactcttttatttccctaaagtgttgcacttaatagtataattcaccgcaaacaaaaaagccgctttctcttttcagagaaagcggcttgaagccaactatttacgggcaccacccataaaacaggtatattccccattacccaggaatacatacttcctctgacaatatggctggtttcctggcttatgacttacggctttgccggaaaaggccgccttctcaggatacgatcatcccaatggcatataacccttttcatcgtcaattacagtgatggctgtcacgtcggattttcaccgatgcttcccaattctcctatatctccataggcaccatattgcgcatattcagttttaacgactaacattttaccaccaaaaagcaaaaatacaatagaaaaatcatttagttttttggaatatattttctgcttttctcttcacgggtcgaaaagaacctcgtttttattttacgcagccagcttcatttgcccctgaaggctccgtacacggagttcttcagattgcatttgcagcatggcataatcactgttgagagcattgagcttttgtttcagaatctcttcgtaggtgtttttcttttcctgaagcgccttgagcttcagcagccatcgactgataaccgtcggcgaggtgcagccgttatcaatgaaatgctgaatacgctctttgtactgttcgatatcgcgcttgtagttgatataaaactcctccgtcattttttgacgttggcgatcatcatccaccacaaacatactattgctcatcaccagaccaccaccaaggttatactggctgatggcgtcgatataatcttccagcatattcagcttctgcaaatacggattggggataaaatacaggttgccgtgaatgctgattttgttcgcctgcagccggtcgagctgatcctgaatcaccgagtccacatggtcgagggtgtagcaggtacaataccgttcatagagagtgagggcctgctggctatacacggctacatccacatccgggtcatagctctcgtcctcgctaaacatggtttcggttttcttgtcaaagacgatattggcgagctttttgtactcgttggtacggacgttcagggtttccttcaccagttcccgatagatatgcgcagcgtcctcctttttgttgtcccgacagtagatccggtatatccgggtgccggcgctgtccttcacttcgatccgctccttaagagcggttgtcgcgtttcgataggcgccggccttcgactcctttgcgggcttaaacttcggcagaccgaaatccatgccgacgcggatgaactgttccttggggatcaggatattagccagggagtagtagaagaattttccgatgattccaccggtgttctccgggactaccatgagattttccatgcttttcattgctatttttcctttcgttctcattatcatggacgcttttttagtggcagaataagcatttgcagacgtgccgacatatcctgaaacatcgtccagcggccggggtcaaactgtcggtaatactcccggcacttgcaagcccggtagaggcattcctgtacccgccaggccgcttcaaactgtttggaattgaggtcaaataagcgaagatcataaaggccgggaaaaggctgatagtctttgtgcttgcgttcaggctgcatgagtgaagtcctttccttgtgttactaacgggcgcctcgggttgtcaccaaagtcagcgcctctcctccgacatcattctgggcctcctgctgcttttccaggtgctttttgcatttggggtaggacttgtcgaggccgataacatcggccagccggtcgctgatctgcatggtgcgttttgcaagctcatccttgttgtgctttgcccagaaattctggggcgggttcttctccatatgttccctcaaaagccaagaatagtcgtccaacacgtccacaatgatttgcagatcccgataggacatattgaccatatggattttatagtcccgccagtcggcataggagagagtataggtggaaaaaggggtgtttttcatataggcatatcctccagtattcgctcatgctgcccggtagagatgttcttgcttgagcttttcaaataaaagaaagtcatcgatgcccttctgctccaccggccagataaaggcccggtaatcctcgcaaagcggcatacagatggagcggatcttgctctgtgcccgctgtacctgtggattggtgcgcacgtccatatcgatgcactctaatatgcgtttgggcttgagctgtgccaccacgtccgccagataccggacattctgtacaccggtcagaccgatgaacagctcaccgccggataaatagctggcgatgtcggccttcagcggcccttcggtaatgtgcagcgtgtcgctgtggggatcgccgaccacatggatgtagctggagatccccgtgccgttctcgaaaattttctgtccgctgcgcatccccccggtggaaaaccagcggaagcggttgccctttttttctacccggcttccgtccgggagcgtcaccgttttggacggcggctcgtccagccggatttgcagcccctggatctgattgttcctgtcgcaaacggggagcagtatgccgttgtaccggccgccggccattttccagcggaagtcctcggtgtaaaagccgggcataccagacaggtcatattgtgccgccagccgttccgtcacctgccgcctcatcttccagtcggtggggatactgcgatacatatttccgcggatcatgtcatccgacagaccgcggcgccgcaggttctcatagtgccggggttccagttcaagcagggacagcatttgcagatagatttggctgcgttcgtgcagaggacggatcgggtcgggctgcggctccggccgcatgtaaagcggttcaccgtgccgcacctgcggttcgttcatcaattcccggaacgcctctctcgttgtcagccgccgtccgccggggttgaaatcggcgtacagcgtgacggcgttacccccgacgccgcagttgtgacaccagaaggttgcgttgtcgggccgatgacagaggtacatccggtagcgatagtcctggcagtaagggcaccgagcctgtacttcctcattgccgagggtagagggcttgatgtccagcccgcacaggatggcggtgtccaccatgtcgatatacacatacggtttgtcctccatagatcagctcgctttcttgagttgctgcggctgtgcatggttttgagcctgcacggtcagcggccggcccttggtaaagcgcagcagcagggtttgggagggcatgggcaccgcattgaaagtgccgatgctttcggtgttgtcgatacagatgggacagtcaatgccggtgatccgccgcatcatggccgccacctcaatcccggccaggatcttctccgacagggatagcgtccggtaatcgcgctgtttgtatgtgaaccggaacacgtccaccacctcgcccgtcgtgcgcaccacgtcatagagctggatatgcacattgggcatctggagatccttcacggccagttcggtgcgtttggcggcatattcggccagggcggtcagaatgttccgatattgcagcagttgttcgttttcttccctttgccgggcagtcagttctttgagccgcttctcgtcagtcatttcttccaccgcctgaatctgtgcctcaatgccggtcacttccgcctgtaatgcctgtaaattcgaccattcggcttcgctgagggttccatgccgctgctgttcttcaatctgctcaatctgtcggcggatttcggcggcgctggggccggcggcccgctgcttttccgcttcgtccaactgttccgtcagttttttcatatcttcgctgcggaactgctcaaaggccgcctcgcttttgccgtccagctcgtccagtccctttttctgttccaccagctcctgacctttggccgcgatgctttgcagttcggccatcatgccgctgcgcacatcgggcaggttttgggcggtgatgcgcatcaggcaggtggggcactgggtaccggcctgcagggccttgatccgatcccccagagccttgtactgcccggacagggctttgatctgggcctggagctccgttttggcctgcgtatatttggattgataggtcttctgccgggtgtgctcaatcttcgcgcgcaattccagaatggcggcgtcggtatcacgcgatccctccgtcagcttttgcatgagcacatccttttgcagcgccaggtcatccagatcgatccctgcaaactgcttgtctgacaatgcgttcgccttttgcttcgcatccagcttttccctgtacaggccatccagcctttgactggcggttcgcatggcctcctgcaccgactgcaaatggccgtcgaggatggtgagctggcgctcgctgtgacggagcatctcccggtagttttttgtcatctcttccacggaacactgggccatgtccagcttatccagataccctctgagggtctccggcatttgcttcagcacctcatcagggggcacgggcttcaagtgcttgagcatcagcccgcgccccttttctccgagttcgatcagataggaagggttgaacatggaaaggaaggtatccttgtcgcagaaaatccggtcgatgtcggcctgacggacggtgtaggaatccagaagcagggaggtcttgtcccgtttcctggtacgaatcagcgtgtgggggttgccggcctgatcggtgaaatcgagacgcacctgcgtcccttcggcaccctggctcatcaggcgttcaatcgcctgctcaccgaagaaggataccccgtacaacgcataggcgaccccgtgggccatggtagttttcccggccccgttatccccggtgatgtaggtgatgtctccgaaggcgtagccctctggccccatgtggttgcgaaaacagttgaaagacagggcagtaattttcatggcggtaattcgttccatatggatcgctcatcctttcaagccgtgcaggttcattcccacaaaagttgtttactcaggtcgagttcctccagttccttgggtgcgtgggttccggccgccaggcacagtatttccttatgggactgggtatccggccgcagaaggctgtatgcccagagctggccgccaatctcccccaccagcagccaccggctgaatgcagacaccttcagttcggtgcgcatgacgccaaacaggacatacccctcggcgatggtgtacgggaagctgctgcggaatttttcgagggtttcgcatttccggcggagctgttccagttcggaaagcgcatcctcttttcgggcggccgccaggaccttctgcttcagctccacgaattcctcctgctgttccttcagcttttcttcccgcactgccacagcctttgacttatctttcagttctgtttccctttcggccactgccttttcctgatcggcaatttctttccgcgccgccgcgtcatcctttcgctggatgagttgttcctgcatggtaaacagcacgacgatgaccgcggcctcgatggcaagcagcaaaaccgtgaagctgtatttggtgttgggtgtaaagctgtcgcttgtcatgacaagaataccgcagaacacggccagggcgctgactgccagaatggaaaccaagagagcgattttgttcttggggattttcataacggtacgtcctttctcgatatatgttccggcaggccggcgcccacaaaggacgccggcttggccgctgttagggaaatacgtcaggctgccgcctcatagctttcgatgatgttgtattttccagccactggatcgtccttagcaacaattttcaggctgtgaaggttctggccgacctgtaaggaaggctggcccttgatgaaaccggtcaccttttcgccagccgggctttgtaggacaaccagcgtgttggggtgagttccctgtgtccggttgagctgagcgatccggtaggtgtccggctgcgctgcggaaccctggaagcggccgaccgcaggcggggtggcagcggagagggcggaaatggagggagaagtcgtctgtacggaatccctcttctgttccgctgcttgctgagctttcaggtattggttgacaaactggttgtagtgtttggtgagttttggcttttccgaagggtcgatgtacttgccgtccttcagcgccacccaaaggcccggcagctcgtacagatatcggccgatattccatatggaagccgcccgcttgaaggcgttggacagccctcccttgatgggctctatgtctgtactgccggctccgtcacttttggtgatccattcctgccggtcgggatagtagatgctgatttcgcagatgtgtgccgttgtgctgttggagttgcccggcatggtgatgaaatggtttttccagttctcgcggcccagcacgtcgtccagccgcttttggatggcccgggaatcgatgtatgcggcgacctgccctttgcttttatcctttgtggtgagcaggacgcgccattcgatctcgtcggccgtgaagggatacgccagcagtttcgcttgcttctcggtcatttctcatacctccgatataaagtttttcagcgtgacccccggcatgggaaccagcacatggtcgtaatagtacgttctgtccttatcccgcagatgctccagcagatcccgatgtccaagccccagccggttatactgttcatggaaataatcgtcgttatccggcagggatacgataaaacccggaagattttgcaggctttgcagcactggaatacgcgggaggctgttggcgcccgtacacagcaaaaagcggttgacattggagaagggataggcgaacatgggtgttttttcggtcagctttcccagcgccggaacccccaggttgaccgcggagatccggccgctgctttccagacgaaatccaaacagcaggcgcggtagaggaaaatgctcataagtcgtggacatataggtaatatccgcgtattcgtcgggaaattccactaccgcataacggctgtcatcacggattgtcaggctgataatgttgctcggcaggatgccggtctgaatttgaatgccgcccatactgtcggtcaggcagtccagcagcgcgtcgatatcaatgagttttgtgcgcacgacgcctttctcccggatctccaccaggatggtcttatcctcgcgaatatgcagcaccagttcgtccttcattatgccgctctcctttcgggtacagccggaagcagaagcggcgccggtgtatcttcgggtttcgagccatgcaattccagacgcagctttttctccgcctcgatgtaaaactcccggatttcgcacaggctttccaccagctctaccggctgatagaattccataccggtatacacaaccagctcgcagcgctttttcggatattcctttttgggggtgcacagccgccagtttacatcgtaatcgtcgatgttctccatatgctcatttactgcttggacagcggctctgacatagggattgcgcttgaagctgacccggtgacgccggctgtgttcccggcagaggtcatagaacgaccgcatggaggggaaaacgatatggaagatgttcattgcccagtcgtcgttatatccacactccacatcctgggcaatttccgcgatggcttggtacatacattcatacagataatcttcatcgattggtgttcccatgaccgcccccaaatggtcgtgcaggagcttttcgatagacaaaacgccgagagtgtaatccgggttaataactacttcttcaaacataggccacctcttacagaaaagcaatggatgcattcttcggcgggatgtcgctcagaacttggtagaacttccgcagcatttttggagctggaaacagggcgttcggttcatctccgcagagatcataaagggcctggatatccctcaaagtaaaccgctgcatatcgagctgcgtggaatgaacctcccggccgtccattaacggggaaagcaggctgataaacagatagcttacgccgtcccccgcatcggccaaacaggcaggcagtctggcagactgtgccgactgatcctccgtgtcccgcagattacggatgaggagggaagcattgagcgttggtttcatggtatgtcctccagtactattctcgtttgcttttctgtcatatcggtttcgattcggatataacggttgtcctgacaggcataccgggaacagattatcccttccccggactgagcggccatattgttgtaccaccagtcgctgggtgggaggtcaccccagtcaccgtattgatgacgcgccaggaacaccgtacggtcaaaggcggtcagcacctgttcagcctgcggagagatgtgggtttctcctgtttcgagccggatacgaaggatcgggcagttgcttttattccgcaggcggagcagccgtttacactcaacggccattttttcccgctttgtggccagggagaggaactgcctgtaacgcctgtccagcagttgagtggtgtcgtggctgtcctgaactgcggctgtcagacggtctttggctgccagagcccgttgtcctgccagacggagccggattctgacgaacagatagcgaattcgaaccataaagctgataaccctttctgtcgttggattaggctgcctgtagagccggcgccttctggattttttcctggatttgcgccagatgttcgcccagttccctggcggtgatgccgagcgcctggatgatctcccttccgggatatccctcgtacagcagacgaatgatttccctgtcgcttctttcaaagccttttagagtatcctccagcgcaagtgattggatagcttcttccgccgtgtccttcgcatcggcaatggtttcctccagccggtacccactgcccgcgtgtgcttgcagactgagtaccgtggcttttcgtttgggacgatgtttggaacgaacataattggcaaagcaggtgtccatcgcccgccaggccagcgtggcaaacgcataatcctgcagatcctcccgccggaagtgcttgcgcactccattcaggtatccgaagaccaccacatcgtaaaactcctcttccggcagatggttttggttcagataggtgtagataagctggtgatgttccgcggcaaaagtagattcttcagccgttaaatggggttgttgatacataatggcatcctctcttctgttcatagttatccgagcgaatgataaccggtgggcgtcaatacgttgaagatcagcttgttggacgtgacctgccgtatttccgctgtcccggactcgtccggaataccgatatgggttttcttttctttgacgatgcgccctttgataacgtgtggggtatcacagtccaccaacccgttcatgagaccgctggcgccgatcagcccgatttgagacaggttcatcggcagaagcggccgccgttcccgattgtcgagagtacggttttcaaacaggcagtcgagggttttggattgcttgagctgttcggccagttcggcgacattgaattgatcgcctttgaactgttccaccggcttagccgccggcggaatgacataggcgctttccggaagctgatccagctccggtatgttttgcggggagagcaggtaggtgaacaggcgttctgccattccgaaggcttcccggcggggaattttggttccgaggaacaccacctggcggaattgccagaactcctgccccataaagcgatgtacccgcagatcattgaggttttcgcacagcacccggcagatgtcgggcgacgcccgataataggggatgatgtagacgagcaggccgccattttgcagcagccgcagcccgtcggcaagaaagctcttttctagacgccggttgccgtattcggttcgaaccgacaggtacggcgggttgagaaaaagcccctgaaatgcgccggaacttacccgggagaaaaagaagctgccgaagccgacgcggtgcaggcgtttctgcgcctgttttccgcgcagctcgtcgatttcgatgccgtaggtcacggcgccagtgccgtccgcaaagtgggcgagcgcctcgccttccccgcagcagggatcgagcaggttagtcggttccgccggaaatgtcaccgcccggcgcagcagatccacatgggccgggtcggtgggctggtatcccatgcgcacccggttcatgagtctgcccaaagcagccgcattgatgttccggcctggcgtggggagcatctgctcgaaggcttccagcgcccggcagagtggtgtcaaatccgcagtgccgagatagtcgaagcgcttgagaacttcatacagtctcctggcggtcttcagcaattcagcgtcgccgtattcgcataggtgttgaaacagtcttggaaattccttccagagccttttcaccgatgcctgcatatctgtcagcgcctcgatttccttcggatgtccgcttccctggtgccgcctgtactgggcatggttggcggggagctgttcacggatcgcattcaggactttcacggactccgccagttcttccaggcagtaatagtgtacttccggctcactcatcggcgtcctccagcggatggctcagcacttccagcgtaaccgcccccgcggttttaccgttcggctggctgtatgtcactttggttccgatcagacggttgtttccctgctggaaatcgggaagttctgctgcggtcagcaacagttccgatgggatacccgcagacgccggatggaccggcgtgatgtggatattgtgcaaaccgttggcatacgctgccatgacctgctgttcctgacggtaataccggatgtcatcgatggccttgtcggccactgtccccggatctgcgtgcaggtgcagagaaaacgcatacttctgcggttccagcttcaccgtatagagatgggttaccaggatatgcggcagattctcattgagcacattgccgatccgtttctctttctggtttcggtagctgatatccggattgagcagcacatcgccgtccgtgttgagatatacgatgtctccgcactccatgtggaagcctttaagggaatactcgtagagccacctctggtccggcaaagccgtgagtcccaggccgttttcttttgctcggccttcggacaggatttcgtttggcgcaagcgtcctgcgttcgttcaccggcttataaaacggaaggcggctgtactgttccaccgccttcggatcagccggttcatgaaactggtcgaagctgatggacagggtgcattggtctttctggatgcaatagcggtacagcttttccagggcctctgtaaacgcaggggaatacgccttgccgttggtagcgcagaagaaatgcccgatggtgcagccccagcgtttggctaaatggacgatccactcaatctgctccgggacaagggccggttctccgccggttagtcccagatgctcgatatggcgcacctctcggaacaggcgttccaaaatgccggtgcctatggttttgtcctccggttcgccgcgcatacagtgtgcgcagcgcatattgcattggcgggtgagttccaggatcagccgtttgaacgttatcagcatacaattcctccgtctcgattcatcccaccgctttggcgtgctgggagttaattcttttgagaatatggcccgggtacatctcggccaaggccgtccgcagcagggtaacgtaacgcgggaaaatctgcttgatttcctccgggttccggcagtcctctggaataatgacaaacacggcgacgtattcgtcgtcatcctcggcgatgatttccacttcctcgtttttcaggatgacaaagcggtttcggccagcttgcttgtttgtccatgcgcatcgcttctgaaaggatgattcatagttggtgagcttttgacaaagcccgtccagcaattggttccagccgctgtccatatttgcctgatagacggtttcgctgtcgatatagaacccggcataggccgccagatgtttggcgcggggcggcagccagtaaccgcgctccattaagccgcccccttttctctgcgatgctgcgccggttggcaggagagcttatgaaaaaagtgacacacatccggttcgaggtcgtttgcctgaagccggatatcctgatagataagccgttcccttccgtcggggaggtgttcggaaacctggaaaacagagaggcaggccggtttgcccttcaaatgagagggctgtctgttccatgaaaaggtcagtcgtttttcatacatggcggtttcctttccgttcaatcagttgttcgttggttgagcattacgcctccgcgctggaagcatttttgaatagaacgatgagcagccatatggatcgttttctcccttctgttatgcagctttcgccgtagttttcttcggccgttgtctgacaacctcagccctcatgctgatgagcctcgaggagaaggtcacgtaccgggttttcaggtcgccggcgatcagcagatcgtagaggaaggacaccaccgcggtggcggccgtcagattggccgtaaccgactgcggggcggataccgcccgttcggcgcaggacagctccgatggaaatttgtcctcatcctccagcagatccgggtacagcgagcataccggcttgtagagcgtccggccgttctgccggacgccgcaaaccacctgcccggtatgctccccgttgcctgcgtcgatgtagatgaggttccgcttctgctcgaaaacccggtggcaaagctgccgggacttgttgttgtccacacagcccagcaggatcacccgctgcggctccatagggtaaggtactcggtcaggctctgtcagggtgtacagttcctcctgcgtttcaatgaattccggccggtactcacactcgataccgaaagcggcagcataccgctcggccagcacctgcgctttgttccgtccgatgtcctgctccacgaagttctgccgtatgaggtttttttgttccgtcacgtcgccgtcgcagacgatgatccgggtgggatgctccgaagcatagcccaggcgatacagatgcgggataacataaccgccggtcccgccggcacccagcaccacgattttgacaggggcctttttagaatatttcatccggattcctccatgggcggcgccgacgcaccgttacgcgagatgcgcgggacggcagagccggcagcggctccggttcggggagggtgagctgctcttcccagatcggcggatacgggtaggctttgaagtcggattcaaaaacctcttccggccgcagggggatgaaccgcccgccgcagctggcccggacggcaatctccgggaacacctgatcgaagcggccggccacggcatacagccgcgtcgccttttcgtcacggtcgtctgtgtctgagaacttggccggcatggtgttatgggagtggatgtccatcacgtggatcagatagtccgggtagtcctcctccataacggaatcgacactgacggccgttagttcctgcttgggcacccgcagggtgtatttcctgtgtatggtgtcatacaggatgtgtaccagcgcctcaacctcataccgctcggacagccgcttgaaaaagttaagaacgaacataaggatgtgcatcgggattttggggagtgccggttggaaccccgcttcaacgatggggagctccggcagatgagctgccggagccgtaaaaagccccacaggggttttacgcctttcatagagcctgccgtcccgggcagggaggatgacgatcggtttatcacaggccgccgcttcctcctcggtggagcagtaggctttgtaggctggaagtccacacgcttcgcccttgctctgggcacggatggacggtttgacctggcattccggggctttctccgcgtcggtcttggccttgcggatgttttccaggaatgtcttggatttctcgatttccgccttgatgtcgtacaccttgtccgatccggggttgagtatggttttcgtgactttcccatagagcacggtccaggacacctttttggcgtcggacagttccgggaaatcggcctcatacctggcccgcagatcctcaaaggtacactcgcggtcggaaatggggtctttggccttgccatagataaacatggcctctttcccggcaaagctgtctgccagccgctcctcgcttttcgcctgtgccttttttaaggcttccgcaaagggatcttcctgctgtacctctgccggcggctccgttttattgggtgtaggcttctgctgggctggcgtggctgcaggcgtttgagcctgtggaggcgtctgcaccggcggaatcgccggaattcccggcatttccgcggcgggcgcctgcgtcgctggaacaggcggcggaacgggtacagccgctccggccggttccggctggctgggaaagggaatcggggcgaacaggttgttctccggttcctcttccgcttggttcagaaagtcgttcaggggattgttcgtgctttcgttcatgtcggtcgtcctttctttttgttttgtaaaacaaaaaaagaccggctttcaactcatctcatgacgagtgaaagccggtcttctttcgttgttaccgattggattttcctgactgatggttcctgcctttcgggctggaaaccgaaaaaggccgaatcaacccccgggtagggattcatccgaccttttaactcaaaccaaggcttgcaaagaagccattacctcaaacctaacaacatatacactataccatatattgtatgtcgtgtcaattcgttatctgtatttcgtactttcttcttaggattttccgaaaaaaaataatagcctcttaaatttgacaaagaaaataacggccgatatactggaagtgcgtccttttttgaggggcacggcttaaggggttgggccgtgtccctcgcttttttagcgtgaaattgcttcatcatccgataagggggaattttcatgagcaaaggaaagaaaaaaaggaccgcattgggaaaccggctgcggacgctgcgccggtataacgggatgacacagcgggaagttgccgcgcggcttcacctggagcgctcaagctatgcctactatgaaatcgggacaacagaaccggatctgcataccttgagcgagatcgcgggcttattccaggtatccacagactatttgctgggcagaggggagtacacgattccgatagggagtatccgctgggtgcccgtaccggcctttcctgctgccggcgcaccgaataaaaaagcgccgcctgatccatagaatcaaacggcgccttgcgttatgtggatttagaatactgggtaagcagataggtttcgacgatccggacgaactgctccgcattgtgaagctgttcctcgacctcttctttagaaatcaggtaaaaatcgtcgtagtcgctgccctgacggatctccaccagcgcctcaatgatgggcgacagttctttcggcagcaggccggatttgatgtattcccggcggaattccgcgataatcccggaatgcttcttggaatcgaagccctgcaaagccaatactgcccgcatagcggcaaacaccgcataataggagcgattcgccaccgtcttgtagtcgcccagcttcaggatttcctccgcaaaggccaggcgttccttggcgattagcagccgcgttttggacaggtcgatttgcatatcagacggcaaggggaatcccctccttccggacattctgatagaacggtaccgcgtcgagatacttttcaaaggtgtcggtatccttgagggttacggtgacgacgatgtcatactccagccccagatcgctggtggccttcagaaacggcttcttgtacgctgcgagcttttcccgcggcacgtcggccagcaccaggatgtccacgtccgattccgcgtcgtaatccccccgggcataggagccatagaggtaggcgctgtgaagccggtcgcccaaagccgtcctggccgtggcggcaaccctgtccaaaattgccttgagttgattttccgtacacatggcgcacagcctcctttctaatgatagtatatacaatttggcaaaaagattcaagggagtgtacgtcaagatgtcttgcgatccagaagctgtacggcgatgttatcctctgtcagctccttcgtccggaaaatccggtcgcagaagggttccagtgttttcccgcaggcattgtccttgtccagcaggatgccggtcatcgccgtccgctgccggcgcagcgtttcccggaactctttggtaaattcgtccgtcagcgcggattccccgtcggtgatgatggtgatatcggcattttcaaagccgttttgcagcagccgcattgcttccttcagcggcctttcaaaattggtgccgccattgaaaaaatgttccgcggcccgaagaatatccgccgtctggtattgtcccggttcaaacaggtcggtctttatgtccgtggaaaaatgcaccagggcgaacttccgcctgcccttggcggccacgtccagcagggcaagggcgatggctttcgcccaccctgccatgagacgggtggaggagctttcatcgagcaggacaatcatgtccccctcgcctttgatgagcgcctcccgtttccggtactgcatgagctttttctgctggaaccggcgcataaacagcacttcggtttcgggcgcacccagcagcgccagctccgaggccaggcaggaattgatgtcgctgccgaacccgatgtcatatttctcgccccgtccgtaggcaaagctgttttggcgtttggccgccaggatctcccgataccggccgagataggaagcgatcttctgaagcatttcactgtttcggacatagttcaggagttcccgattggccggtgtgttcttcatctcttcgctgccgtcaccccaggcttgcagaatcgtgctggtctgatgcgccgcttccagcgccgcatcgagagcggagccgatgtgcacaaccaccgcctggatataacgaacagccccttcctgtaccttttggcgcaggttggcaatctgggaggctttgcggaaaatccggttatacaaatagagaagtttaaggggcgggccgccggctgcgtccgaaaggagccggtcgagctccgccgtcagcgcctgttcctgctccgtgagcttgtggataaccggcaggaactgctgttgcgggatctccaaggtgatttcggccatggattgccgcagggagcggcagaaggcggccgcagcggtgtatgcgggatattccctgctttcacacagggatttcatctccgcataccggtcaccccgcagcacgctgtccagaatcggcttgttgtacagccgttcccgctggaaaaccgcatcctcgtcccaccgccgaaggacaggggaatacagcgccgtgaataaatcttggcagagcgtttcaaaacgggggccgttttcctcgggcagttcttccggcgcgtcttcatcctcggcagcaaagccccggtaaatcaaatcggtcaggcgggtggattccagcagacggccggtgacgggttcccgctggttcagccggtgcccggtcagccagtccgccgccttgtccaaatgggcgggggaacgaaaaaaatctctcatgaagtattcctccatacagtcggtcgatatcatgtcgataaagggcaggcggcccggacaggcgcagggcctgtccggtaccgcagccgccggtcagccggggaaaggcgggaagctgtcaaaatcgctgtcgtcgatgatctcttcaaaatcggcggggccgcccgccgcagtggccgagaagtccggttcaaaacccggcgcggtcgccgcttcggaggccgggacggcttctcgttgctcgtttttgctgtcgccgaagaacacattgtccgcgatgatttccaccactgtgcgcttgttgccctccttgtctgtgaatttgcggctttccagccgcccgtccaccgtgacaagggagcctttcacaaaatatttggtgacaaattccgccgtggcccgccaggccactacgtcaaaaaagtcggtatcccgttctccgttgccgtttttgtagttgcgctggttggcgatggagaagctggtgacggatatgttgctctgggtggtacgcagttcaggatcgcgggtcagccttccggtcatggtaattctgttcagcatagttttttacctctttcgttcatattttggatttctaaaagtcaggcgtgcagctttgtcccacaggtcgggcagtaattcagcggctcgaaatcgtagctggtacgaccgcaataatagccgttataaaatgttttatgcacaagagcggcgccataccgtgcttctgttacaccgctcctgccatcccggttgttactgtaatattcgtccatatcttttaatttatgataccattcgcaaaacgggcacggcgtggcattctccattcccacgactcctttcctaaagatgttaggcgctcatctgcttgtaggctttcagctccggcaactgcaaataggtgaaggtggtcttggcgtgggcttcacggctgatcccctccaacgtggcgatcataccttccaccgtggaacgggcaggatcatcctcggccagactgcctttcagctgctcggcctcgtcgtaaaccgccagcaggccgctgcgcatggcgatcagcgccagccccgggctgtcggcactgtcgaattcgtcccggcactggtaggcccgggccagcagctcgtccagcttgtcgcccagcgggttctcggttaaacgggtgatcgtctcttcaacaatttcccggtcttccggtttatcccataggtagttgacaagagctttcatgtcctgcggctggacggtattccggccagccagccaggcttccgcctgcaccacaggcgaatagccgaaataagtgcggtcactcaccggaatgtccttgcggcgcagttcacacaggatgttgtcggcgagttcgttgatgctgcttgggattttcaccgccttgacctcttcctgcatagcgtacaggtcttccagccggataccggcctgcatgggtgccgccacgtttttctgttttttctgaaggattttcatgcggttggccttgtcctccacatagcgggtgttcaccttgaaatcgaatcggtcgtacagcgcccgcagcgacttttcttccgggttgtggaagttgggaatttcgttggaagcagcaaagaagctgatgacgggaatggacacggaaacgccttcattggtgaaggtgcgctcgttcagggctttcagcaggctgttgagcaccccgtcgttagccttgaagatttcgtcgagcacaacgatatggctttccggtatcttgtttgccgtcaccatttccggtacgccctcgtgctgtaacgccagcgccgctttatagcggttcatccggccgtgcagttcgtctatctcgacatatccgcagtcgtcctgggcgctgtccatcaactcggccagccgtttgcgcatctgtgcatagcggggatcgccgttgaggacggtgtgggaaacatggccggggatgatgctggctaaatccagccgcccgaaaagctgctcctgatccgtccccttactcatgaggatgtcgaattgtttggcgtccgtgatatgggagcggaacaggtcgatggcctgggatttcgcctggccgggttcgccgagtacaaacaggtttttcctggtgagcagggccagggcaatggtatgtaccagttcctcccgttcggccagttcttcgcatacctcgtcgatcagggcattcatcttgttattgagcatgattgacctccttttttgttacgccgccttggtttgggaagatttcttcgctctcggcttcttttcggctttctcaacctccttttctgcaattttgaccggcctgcgggggcatacgaagtaccggctctggccggtctccaggatcagaaaaccacgctcgtcgatcagaacgcgcagagtaccggacgtatgccgcaggcagtccagcagaaaccgctggtcgaaataaaacccgtcttccggcgtgggaatggtatccgccgcccagatggcggaggaggaatggccgcttgtggtctccgcctgcatggtgatattgtccaccccgatgcgcagattgacacagggaatgtcgctgccctggaacaacgccgatacgttctgggtcagattcgagaggctcccggcatcggtcgtcgcctgataggccggcgtgagccgttccagtatccggctgcctcccagaaatttcccgccgaacatcatgctggagaaaaacagatcctccttcatgaataccgcagacttgccggaaatccccacaaacagctcatcggagggggcgatgatggaagccagtatccgcacggccttttcgtggagaaacagctccagattgccgtccgcacattggggcgatgtgctgatcgccgcataggtgctgttggtggcctccgccgtcgtcaggccgtccgcgaaagcgagccggacatattgcagggatatcttgtccaagtcggttgttttgccgtcggcggcgaataccgttttacggaaaagttcgttgagcccctgcacccggatggtatcctccgggaaagggatttgcagccggggaaatgctttgacttccagaaacgggagtgaaaaagcggcgtttccggaaccgatcagcaccgtccctttgtcgctttgaaacgataccgactccccggccagcttgtccaggacgctggcgataagcggcgtaaggatgatgctgccgctttcctccacctgctcctgccggagccgccgctggatatgggtgcggatgtcggtgcccgtaacggtcagcaggccgctggacgcatccgcttcgatcaggactccggcaatctccggaatatcccggttgggctgaaccacctttaaagccgttttcatggctttcagcaaaaggagacggttggctgtgaattgcatgaatgcttcctccttacaatgttgtttcatgaagccagcaggtcaaaaatactgacctggcctgtgtcttccgctccgccgccgttggttagcaaatagggtgatacagggagcaaaaccggttgttgaacgggcggcgcctgcttttccggttctggcggggcagacggctttccggctgcggccggtttggggtggttcccgatgatcgccattttcctgaagcttgccgccagatcctccacgtcgtccttcaggccgcgcatcagttccttggcaagctgggtggtgagatcctggcagtcggacatggctgccagcccttcatcggaaatctgcccctcgatgacggtggccgccgacagcttggacgccatcaggcggagcgccttgtgctgcatggtatcggcatagtaaagcatatagatttccaccttgggcgcggtctggttgatccgccagcttcggcgggacgcctgccggaacacatacaggttgaaggcgatgttgtagaatatcagggtggtaaaagcattgagatccaacccggtttccacaagggcagaattggtgatcagcactttcaccccttcgtgcacacgcttgtctacccattcttcccgctgcacagtcggcactttctgatccagaatcgcggctttgacgcctttttccgtcagcagcttgtggagccgctcctgcgtgtccagccgtacccaggcggtgtagacgatgacgcgctcgccttcctggagtttccggtcaatcaggtcgagcaagacctcgtccttgggctgtaagtcatccgcgctgccgatgtctttgggggccgagagcacgttctggtcttcctccggtacaaacgggttgcggatcggctcgtggccatagggctggtcgggataagcggacagcaggttcagatacgcggacatcacccgtttgccgatccggggtccctctctcatcagataccggaagcagttttgcagggcgtcgtattcctttttgacttccggcagcatggtacaggggatggggatttcctcgtagtcgggcagctcctttcccatgtcgttaagccccaggaacaccgcgttttccagcaaaaaccgcgaatacacgataggcgagacccccggcaggaaccgttcccgcaccttgcgcttctttttggatttcgatgtggaattgtattgttcggtatcctcttcgtacatttcttccagcaccccgtactgcaagcagaaatcccgggggcgtttgtacgcctggttatccagcagcatcaggcgagccttcagccggaacagcagatagaagatgcctttggcgtacccgttgacgagggtggcggtcatgccgagcactttgtcggcgatcccggccagttccgccatggcctgcccctgggcgctctcgccgctgtactggtgcaactcgtccacgatgagcgcgtcgatccgccgcacctttcgcttgagataggctgacagcggataccgccggtaggcgccggcggcgggaaagaggccgtccggccgttccaccacttcctcgatcttcgcacggaacgtctttttacaggtttcggccgcctgataggcaaacaggcggtggacatagccgtaaccgcctatgcgcacccacggggttcgttttggcgtcaggtcgtcgggattctggactgtccagagggaagcgccgcagaaacggcagcggtggttgcgggaattctcttgctgaaaaaacagggcgtccgccttcacccaggcggaagtgtcgggatcgcgcatctcctgcaccctgccgcagtccgggcaaataaaccctctcttccgccggctccaggttacggccggccggcgcatatacccgttgcgggcggtctctttggagagaatgcagaacactgttttgttttccctttggtataggctgtacagccggtcgatgtcccggatgctgttcacaaactgggcaaagcagttcgggacggtttcgtgcagctcccgtacccatttcccggtcagatgggatggacagaccacgacgttgaaggctttccgattggtgcgtctgtccggctggccgtgctggtaggcatacagggcggctgcgccgatcttgctcttgccggtgccgcattcggccaccaggagcgccagcctgtcggtttccagctgacgcttgagggcctccgccgcaccaagctgcgcgtcgaacagagagtatccggcgtgtgcgaggacataccgattgacctcctgcaccggcggcgacaccgcctcctcggccgggttgaaccggggagggaagcagtccttgatccgcccggcgattttgtcgccgaactcccgcaggtaggcggtaaaggaagggatgtgccggaatacatcctcttggcccggggagctccccggaatggcgatgcacccgtccttcaggccgtcttccagcacctggacgatttcgctttcgtcttttgatacgctcatatgccagcactggaatttacggcccggacagtacaccttcaggcggtccagcaaaccgcgctttttcagttccgagaggaaatacccccggaactcaggcaaaaggggaacggaaagcttacggtccagctcgtcaaacagctccgcgctgctggtacagaagatatacaggttccgtttcagactgaccgtttccttttcgcttttggggtcgtcgtcttcctgtccgacggccagggattgcagggaatcgtcctgaagccagtggattccctcggcgtacacgccgtcgtgggagatccgcctcgcatagttccgcctccctttgctgtttaagcaaagggagcttttggagccggtcagctccagttcgcagccgccgagaatggcgtcgctcatggcctgcaccgtttccggatatccgccgatccgcagggcgaccacgtttttctcctgatcgtataccaccatgtccgcataattgacaaggcccacggctctttctgcgtccaggcagcgcacacgaatcagagatggggttggcacgcttgcatcagtcccttccgtttaatataggtgtatatataacgaaaaggccgcgccactccccacacgaacggaaagttgacgcggccttagcggtcgcttggattttctgtgctgattttcccggccgaagtcggcggaaaagaaaaaaggccggagtatcccccgagaagggaatcatccgaccttttaactcaaaccaaggctacaaaaagagcccttatctcaaacctaataacattaaaatataatatcgaagaatacccgacttgtcaaggggctcgattgttaagggagtgtccaaaaaagtaagttaataaaaagagtaacattgtactgctaggacactccctcgttacaactgtaggacactccctcgttacaacacccttgacagtgggaaaaaggctgtgctataatgtgaccgttttccgccggagggcgaagggttcagcagacggagatatacgaaaatggaattaaaaaataaaaaatgcttgtttttgggcgacagcattaccgcaggagttgggacctccggagagacggcgacattctggagcctgctgggacagcgcacaggggcgaaagtacggggctatgggatcagcggcaccactattgcgccgcaggtaaacgttatgtatcccgacattgacgtcccgtattttcgcactcgggtggagagtatggaagcgagcgcggatgtgatcgtcgtgctgggagggacaaacgactacggacatggggacaccccgttcgggacgttgcaggatcgcacggaagagaccttctgcggagcggtgcatcagttgtttcagacgatgatccgccgctggcctgcagcagtgatcgctattctcaccccattgcaccgattgcatgaggcagcagtcatcaatgagcgcggtgtgcgttgcgagcacacgctggcggaatatgtggaagcagaacgccgcatcgctgaatattacgggctcccggtgttggacctttacagagtctccgggatccagccggagctgatggaacaacgggaacaattcatgccggatggactgcaccccaacgatgccggacatgctcgcatcgccgaccggctggagggcttctttgccgccctgtgatcgcccggatgcatccaatgcaaagcccaccggttaaaaggcgtctgtgaatatgatgtaggcccggatgtgaattggcctacaggcaggcaaagaaaaatataaataatctcggctggcagcttgacgctgccggccgtttttaatacggcaagatataagctgtgctttttactttatacatgtgacatatttggggtcgatatctcttcccaggtttattgtggaatgtgatccgtatgctggaatccttgattgttactacctgttgtgaatatattgccccggggcacagccatagtgtttcttgaatgccttggtaaaggaatagacatccacatagccacaagcaaccgatacctccttgatgctcatgcggcgctgcgtcagcagtttaacggcgctctccatgcggtaattggtgaggtattccttaggagagacacccaaatacttacggaacagagagtagagatagcctcggtcgatattaatgtactgtgccagatcaccgattcgaatctgcctgttataaaagtcgtgtatatacgacaaagcgctatccacatattgctgagcacacgctctgtttgatggttcgctgagaatggaaaacaagttcagaagttctgcacacacggcgcagtgatcattaacattctgttgtgccaacagaagaatgttttgaaaaatcgttccgagacggctgtcggtatagcaatgctgtccctcggcaaaaggcttggcggtggtctgaaaattagcaaagcagtaataccacggatccttttcatccgccacatacatgacggtctcatcaggaaaaatcacgaacaactgtcccttggaaacggggtgggcatcggagtcagtatacagcacgcctttaccagaaaacacatagtgcactacataataattgcgggccgcgggcccccaggtcatgcccggcgatgcgtattcatagccgaaggcgggacagcgcagccggactggatcggcatccggaagaaaaatataggatttctgttccatgcgaggcacctcttttatctggagcgcagatgacagaatatcaattataagctgtttgaaaaagatagcaacagcagcttataacattttgacaaataaatataacttttctgcattgcacaatttctagaaaagaagtaaactataaatagatgatacgatagacatacaaattctgaataatatagcatataaagtgtatatgtattatagatccaaagcggtgttttgtcaatgcataatgttgttaatgtaaataaattgataccaaattttatcataactcttttactgcagtattcgacttcactcgtgtacggagggactatgtatgaagcagaacatcacgaacgaaaagcgacgtcggctgtctgcaggtatattgacggtactcatagcgctttcgttgatgggagggctttcccccataaaggcggcggtacagccgataccgcagacacaggaagcagcggaaacagcggcagatatcgccggagaacccccatataccacctatgcggctgccaacgaggggagcgcaccgggaaccgaggtcatcactctactgggtaatgattatgtccgggatgcgggcgccaaggtgctgcaggatccggaaactaccggtgcggttcgatgggacagcgagaccggggcactgcactggcgctttacggtgacggctgacgggatttatatactgagcctccgataccgtcccctgcccggccgcggcggcgatattcggctgggtgtgcgtctggacggcagctatcctttctccgaggctcgggaactgtccttttcacggctgtggcaggatgccggggaacggcagaccgatcgtagcggcaatgagaccattcccggacaggtggaatgcgatctatacatccggcaggaggcccgggatgaagtggggcgtcataacggtgcctacgcgttccgcttaacggcagggactcatgaattggaactgatcgccgtatccgaaccattcgtcctggcttatattcagtgggagccggcgacgacattcgtggcatatgctcagtccccccagccggatgggaaggactacaccggtgcgccggtgatcattgaaggagaggacgcgctgtacaaatcctctgcctgtttgctgcctcaggcggataccgacagcgcttccatacgtcccatcgatcccgcgcgcacggtgctcaattacattggcggtaccggttggaaaaatatcgggcagaccattacatggaaaatcatggtgccggaggacggttattaccgtataggtgccacctaccggcagaacacggtggtcaacggcgtttcctatcgttcgctgcgaatcgatggggagattccttttgccgaagcagatcggtgggcgtttccatatgaaagcgactggacgtataccgactttgctgataatggcggagaaccatacaagctgtatttgactgccggggagcatgagttgtccctcagcgtatgtatcggctctatggcgattttccgtaccgatctagagaatttagttgatagaattggagatctatacatacaaatccacatgatcaccggcgaatttccggatgccaatcgcagctatgaactgttccggcagatccctggattcaacgaaacactagaggatatggttgagcggctggaaacgctggcgcagcgcattgacgagatgagcggtgaacgcagcggtaatctggtagcctccatcaacaatatgcgccgggtgatgaacatcatgctggaaaatccctatacggcgcaccagtataaaagcgactactattccaactacagcacgatcagttcctggctgtatgagatgacctccatgcctctggggattgacgccctgtatctccagtcccccggtacccagggtacggcacggccgaccactttttttcagtcgctgtgctattctttccgccggtttttccactcgttcgttcaggattaccaaacagaggagccgaatggatcggaacggctgaccctttggttaagcggtagctttgatcaggtgcaggtggtgcagtcgctgctacgagagtctttcactgcacgggaaggtatcgaggtggatgtaaagctggtgaacacctcactggtgcaggggcttctgtccggggatttccccgactgctcttttggaatggcgcgtaccgagcctgtcaatctggcgatccggggcgctctgctggatctgacacagttttcggattttgaagaagtaacgcaacggtttcgcaaagatgcctgcctgccctatcagtataaccatggctgctatgcactgccggatttccagagcttccgggtacagttttaccgcagtgacatttttaaggctctcggcttgtccgtgccggagacgtgggacgaatacggtgaggtggctgccgagctgatgcgcaacaatatgcaggtgggactgccgtacgcctctctgtccggtccggaaatgatgagttccggtatagccgggatgagtatgctgcctaccatgctgttgcagcacggtgtgccgctctataacaaggagcagaacgcctgcctgctgaatgcgccggaggctatcgagatctttactaaactgaccgatttctacaccaagaaagggtttcctctgtcggcggatttctataaccagtttcgtgccggtttgatgcctctgggcatccaaccctataccatgtatacgacgctggatgagatggcgccggatatccgtggccgctgggacattgccccgcttccaggggtacgaaaggcaaacggcaccatcgaccgcaccgatgccgcatccgggtcaggggcggcgatcgtgcgtcgctcgcagaatccgcaggcggcatggaagctgctcaaatggtggacatcggctgacacgcaaacaggctattctcagggcatggaaaaccggctgggtgccaccggcaggcaggcggtcgccaatgtggaagcactcggtcgtctggcgtggaaagccgacacgcttaagattcttaagcagcagggggagagcgtgagggaataccaggaactgcccggcggctattatatgagccgcgccatcgatcaggcgttctggaacgtgaccagttccggcaaacgtccaaaggatatgctgttcaaatggagcgagatcgctaatcgggaaattgcccgtaagatccgcgaatatgccattccagaggacggctgaccacccgggatgtcccgtacacggaatataactgcgaaggagggagcctccgttgagacggaaaaccgttaaacagagagccattgattggaagacagaagtgtcctacctcatcatgctgtccccgtttttcgtcctttttttcattttcatcctcttgccggtaggagcgtcggtggggttgagcctgtttcattacgataccgtctcagagccccacttcatcggcctggaaaactatctgcggatgttcatggatgatgaagccttcctgacggtgctgaaaaacaccatactttttgctgttgtgaccggtccgcttggcttcctgctggcatttctcatggcgtggtgcatcaatgaattttcccgtggactgcgtacgctgttttcctttatgctgtattccccggcgctggcaggcggaggatatctgttctggaagatcctgttttccggcgacagctatggctatcttaacagcctgctgctgtctttcggtcttatcaccgatccgacgcagtggctgagggatccccgatatatcacctggatcgtgctgctggtgcagttgtggtccagcatggggatctcgttcctcgccaatttggcggggctgcagaatgtcgacagggatatgtatgaggcgggcaccatcgacggcatccgtaatcgctggcaggaactgtggtatatcaccctgccttccatgcgcagcatgctgctgttcagtgctgttatgcagatcgctgccagctattcggtgggagctgtcgccaaggaattggcaggctatcccagcgttaacaatacggtggataccatcatcgcccatctgggagaggtgggcaccgtgcggtatgaatacggctatgcggcggcgatttcggtgtttctatttgcgttgatggctttgacacgccttatcatcgatcgggcactgaacgccgccggcagataaccggacaaatataggctgcctgtgcagcagggggcgatgagagtgaggttcaagatgacaaaaagcagcttgcggctgcgaggccgttccggaaactacaaacgctacacccgttcagggggcggcaatacggcgatggtgctgtttctgttggcagccggagttttttcagtgctgccgctcgcctattctgttatcacctcctttaagccgctggatgagctgctggtgtttccgccgacctttctggtgcggcgcccgacactaggtaattacatcacgctcccctctttggtaacaggtctgcaggtgccgtttgcccggtatgtcttcaacagctttttcgtggcagcggtgacgacggttctgcatgtaataacggcttccatggcagcttttgctttgtccaaatcccgtctgcggatcatgacagtgtttttctggatcgtgcaattctcgctgatgtataacggtacgaccctggctctcccccagtaccttatcacggttcgcatgggtctggtggacacttattgggcatacatcctgccggcgataccctcggcggtgggagtgttcctgatgaagcagtacgtggatgccggtattccggatgcactgctggaggctgcccgtatcgacggagcaggttctttccgaatcctctggcagatcgtgatgccgctgatccgtcctgcctggctgacgctggcgctactgtctttccagtccctctggtccatggtgccaagcggcactatcctgtcggagtatctgaaaacactgccttactgtgtggcacagatcggcgcggcaggcatcgcccgttcgggtaatatggcggcaatgagcgtcattatgatggtgcctccgattgtgatgtactggatctcccagtgcagcattatggagacgatgagcagtgccggcattaaggaataatggccgctgtctacgatccggtaaagggagtgtcaatatgcaaaaaatattccgcaaaaagcatatcctgcgctggttcgcctgcctgctgctggcactgtttctgccgctgagggcagcggcagaaaccccgtatgacagctacacctattggaacaacgaccaaggtgtccgcaagctggtttccaatcgtccgatgtatgagccgctgctggcggtgcgggcggaggatttcggtgaggctgagtttgagagtctgtccgatgtgtataccgataaggacggcatgacctatctgctggacagcggtcggggacttctgtatatgctggacgccgcctacaagcccgccggcgtcatccggcaggcaattgtcgagggcatagctaccgggtttgccggagccaaaggcgtattcgttgcgaatagcggagatatttatctcgccgatacccagaacgcccgggtactggttatggatcggcagggagtggtgcggcgcaccctgactctgccggactccggattgcttccggaggattttctgttccggcccagcaaggttgcggtggattcgcggggctacgcttatgtactcagcgaaggatcctattacggcgctctcgtctatgcgccggagggttctttcggcgggttttacggctccaataaagtctatggccccaccatcggcatcatcagccggctcagcgacaggttgttcagcaacaacgaaaagcgcggcgggcagatgcgcaaactgccttatcagtttacagatctcaccgtggataaggagggctacatctataccgccaccggacggattggcaccacaacacaaaccgggcaaatcaagcgcctcaatgctgccgggagcaacattctggtcaatagcgatgtgaatttcgccgacgaaggactgctcaccctgctgaacaagcctcaggcgcaggatctgctcagtctggaggtggacacggacggcttcatttatgcgttagacagtgtcttcggcagggtatttgtatatgatgtggaaagcaaccttctcacggcattcggcggcggtctgtcccagggcgat

SEQ ID NO: 931 - DNA, 8585 bp, Unknown
  16S sequences of unknown bacteria
agttggttgacggattttcagcttaaatttctgcactatcaccaattcaattaggcttaaacttacagttcagttcgatatctgctgccgcactggattgattctatgttcgctgacggaagctaaacttattggacgttcttttacatcaaaggtggatatagccaatctgagagtgcaaattccttactccgccatactttcgactttttcaaggtctttgaagaatctctccattacttttgacgcaagcttttcattctttttatagtatgatgcataatctgcgctctttgattctaccgcaagggagcctatggtgtaaaaaataggattaacgccgccgtcaaatccgaagtaattgcctacgggttcgtatgttatagtgtcgaaaattatgtcgagcattgcgacagtgtcttcgtcacgggctatctttccttcaagcagcttttcgtaatacgcgggaataacctcgtttccgctttcgtatgcgagcagttcaagtgttgcgcccaccatgtcaggatttcttatcgttgtaggacagcccatgagtccaccccagtcgagagatatatagttttcctgattctcgtcgaacagcgggtacggcagaagtcctatattgcattcggattaacggtaatttacagcgtgcgcaagtgtgttaagttcaaaaagcagatttccgtccgctactgataaggaatttgccggagctattacgccgtcttttattgcaagcgagtagaacttttcaacaagtgtctgcattttttcggtattcattccgagcttccattcgccgtcatcgctcctttcaagcattttctgaccggctccgctcataaagctgatccactttgaggtttcgtcatagcttacgccgcgtctgtcgttgtttgttatcttgccgtttccgtcgaggtcggctgtcgcgccttcagccatggaaataaacttgtctaccgtccactccttattatagacaagctcgtacgggttttccaaaccgcattcggtcacaatatctttgttgaagtaaatagtgtacgggcagggtatcatgtagtcggacacaccgtaatatgtgttcttgccgaggcgcagttcgttcatcatacggtgattccaccacggcgcgtcaaggtcggtgtgatttaaatcatctaagttgtagagaagaccgcctcgcaccattgaagccactccgtcaatacagtgcagaagaacaagctggtacgcgtcgtcgtcagactttaccgaagccgagaccgtcgggaaaatctgctcaatgtatccggggcagacctcagtcaaagtaatttttatcgcgtcctctaccttcgacttgcggctgaatatagcatcgttcattacatctcccgtatattcgttcgcgaagaagtagtagttgtacccttgccagttcggataaacaatggtaaacgtttccccgccgtagtcaaggtcgctcgggacagcgtgcatttgacgggtttcctcgtctgcgattgtttctgtgctttcttcgcctgctgtgccgcctgtttcagccatacttgaagcggtttcactcaaagtcgtatcttcagaggtgtcggaacacgagaaaagcgtttgagagagtacgagaatcgcgaaaatcagtgccagttttttcttcatgggtcagtcctccttgctgtattcagctataaattagttatggcgttttatcgtgattgtacatttcgcacgtattatatgaccgtttcgcaaacaaattatagcataattcaaattcgcttgtcaatagtcacaaattgattttagtagaatctctaccagttcagctcaatatctgctgccgcactggattgattcaacgttcgctgacggaagcaaaacgaaattggacgttcgcttcatttcaacgcaatttctaacgcccatccgcggttagcctaatccaattcagatatgatttggtattctcgacctcgcgcgacaaagtataaccgattttaacgaaactacccgcgtctacctctaccgcgcgaacattttaagctccactactacgctttatgcgatgccgcgcgactggtcttttgatggtggcgaagacggaagtatattgctaagccaaactccaccgcgagccggtactccgaactagcatagctagttcaaggggcggcgtctgagcctctagaacgagcttgctcgttagcgttcacccctgaaaagagctccccacgagcagtggaataataaaatctgaaagggcgaagctctttctactttcttctcactttaatctaaagtgaaacttacagcggtgaagtctcttagacggcccccgtcgtctaaggtaaagaaaatggcttcgctctttcttgactacttccgcgaagtatgataaaatacttctatacaatattcgtcagaataactcattttataaaaggagttcaccccgtatggaacttgtttattcttcccccgctaaagagtgggtcgaggctcttcccatcggcaacggtcgtctcggcgctatggtctacggagactataaacacgagattatccagctcaatgaggaaaccctctggagcggaagatttgataaaaccgccgataaccccgactgcgcttcccacctcaacgagattagaaacgccgttttctcccgcgactataagaagggtcaggagcttacccagaagtatatggtctgccgcggtataggctcagcaggcggatatacacccgacggagactacggtatgtaccagactgccggagagcttcacctcgattatgccctctccgacgacaccgtcacaggctacagacgtatgcttgacctcgacggaggactttccaaaaccgaatattcagtagacggcttgaagcatacaaactacgtcttcaccgccctcgctaaaggcagacttgagggtcttctcggctgtcgtatctccgctgacggaaagttcaccgtaaagctatcctacgagtgccgcgacgcttccgtgacatacgagaacaacaccatcaccgtaacaaaatccttcccagactcaattgcctttgccgtttatttcagcgtgaagtgcgacggtgaagttacctccgacgacgacggcattacgctcagcgatatcactcaggcggagattttcggtgacgtcagaaccacatacgtaaagcccgaccgcgaaggaaagataaaaccctcgtcagatcccgcgctccctctcgacaggtgcaaaaaatccgtcgcgcaggctgagagaatcggcatagaggatatgtactccgaaagcgcaatcatactttcttcattcatgaaccgcgctaaggttgccctcagagtgaacgaccgctcccccgaaatgctcaccaccgacgagagaatactccgcgtgagacgtggggagagcgacgcgggactgatactcctctacttcgcgttcggcagatatctcctcatctgctcctcctacaactgcgtgctccccgctaacctccagggcatatgggcgggcgactactcaaatccgtggtcgtgcgactaccatatcaatataaatatccagatgaactactggcttgccgaaacctgctccatgcccgagcttacaaagccgttctttgaatacctccgcttcatctcggagcatggtaagcgcaccgctgagattcagtacggcatgaacggatgggtagctcacaccataacaaatccgtggggctttaccgctccgggcgagggtgcttcgtggggctcgttcatgtgcgccggcgcttggtgctgtcagcatatcatggaaagataccgcttctccctcgataagaacgtacttcgcgaaaactatgacatcatgcgcggctcggctgagttcttcctcgactacctcacgcttgacccgaacacaggctgccttgccacatgcccgtcaaactcccccgaaaactcattctttgcacccgacggaggaagatacgccatctgcgcaggtcctacaatggacaacgaaatcgtccgcgagctgtttaacaacactgccgaagccgccgatatacttggagttgacgaagactttgccgcacttctccgcgaaaaagccgcacttctcagcccgattaaggtaggcaagcacggtcagataatggagtggagcgaggactttgacgaacccgaacccggtcacagacacgtctcccacctctacgctctccatcccggctgcgagataacaagaaacacacccgaacttatggacgcggctaaggtaacgctgaagagacgtctttccggcggcggaggtcacacaggctggtcgagagcttggataacgctgttctactcccgtctcggtgaaggaaacgcctgccttgacaatctgaacgcccttctcggaaagagcacgctcccgaatatgttcgacactcatcccccgttccaaattgatggcaacttcggaggtacagccgcgcttgccgaaatgcttctccagagccatgacggaagaatcactctcctgcccgctctacccgacaacgaggactggaaaaacggctcgttcgagggtctgtccgcgcgcggtggcatcacggttgactgcgaatggagacgcggcaaggtcgttaagttcactcttaaatcaacgaaggacaccgaggtcactgttttcgcggacggtaaggaatactcctgccgaatcatcgcgaacagacccacggtatacgaattcctcgcgtaaagcaatatataaatatataactaaaaaataacgaaaggaggcgcggtcttgtctaaaaaattacttcttgcggcgacgcttttctttacattaataatgatgtgtttctcggtgtccgcttccgacgtgaacgcgcttgccttttcatccacaggctacgacggagacgaggtacagattttctctcccccggacagcggcacattatcggtatttacacttgaggacagcggatggtatttctacggactgaactcgataacgggtatgcgtgtgaaaaacgatattccctacgtctttgcggttgtgggaaagccggacccgacggatgaacccgacacgaagtacaaaaccgagcttatgatagacctctccggagacagttacgacctcacacggttctcgacgatgtacttcggtatcgcgattgtgggagacaacgacataaaatacaccgtatcagcgtcactgtactccggcggcgggcgtatcgactgtgaaactctcgtcggcgtcggctggaacctgtacgcaatggacataagaagcatgacgggttccgcttcgcacctgaaaatcacggtgtactacgacacggaaattcccgcaaatatcagagtcagcgcgccttatgtcaccgaaaacctcaactccggctttgcaatggtcgacaagtatctcacaaactcgcttgaagccgcggaaggtctgtgcgtacagaaaagcggaagaataaagcccgacgacagcacgggaagagcggtactgaacgcaaatctcatgctaatcgacgacactctcgaaaactgcgccggagagaacctttactttgagttcggcatcggcggagtaaactcggggggcttcacgctttccctgcgctcctttgacggctctgagcttgcgcagtcgaagaagatatccctctacagcggagttacgtcgttcaccgttcccctgaaggtaagcgaagagccggcgtcgtacactctgacgtttgacaacatcgactgcgacgtgtatttcacccttgaatacgtgaaggtcagacgcttttccacctctcccgcgaaggctgaagcaggcataggacagctcacgagaataacaaaatcttcatcgggagttacgttcacgggcggaatggagcgtgcggctgttgcagagtattcacgctcgagcgacggaatgatacacttctactcccttcccgccgagcacatggacgacctctcctacgcaaacgagcttggaagcataaagctcactacagtgttcgagtacacggctcaagtcgaggacggggagggcatgatgttcttcgcgggtgtctgccgccgacggaacgatactgccgctgtcccatcctcgcttccccgacgcagaatccgcaccttatccgacagaatccgccgcgataatcggactgtacgatccggcttccgtaggcgcgtttgagtcgaatatttcagccgtaatgacggaggttaggcttgaagacattattgtcggttcggcttcaaaaaacacgtactccgttccttataagtcaagcgcgccggatgaagaagagcagataacacttgaattcgacaggcagaagctgtccgagcttgacagcgacatagaattctacaccaccgccggagtacgcgtctacatcaggcttacttcgtcatcggctgacacatccctcatctcagccgcggtaaggtttctctcctcgcgctacccctccgttatgggatttgctgtaggagacggaataaatctcccctcgaccatggcggcgtttggaacatcccgtgtaggagacaataacatatactccctcgaagaatacgtctccgacctcgcgctgttctaccgaagcatatacgacgcggcgtcaagttccggttccggtatgctgtccggttccggtacgctgtccggctcatccaaagtagtaatagttccggttgcggaatctgacgaaacgctcggcacagtcacgctctcgaccatgcttgtgtcaaggctgtcggagataggaaaaataccgcttctcatcatgtccgattacgacatatccgcaaagactcactcgcccgacgcttttgccgcagtgcagatgataagcgagcttgaatgcggtgagatagacggtcttgtgtacttctgcgcgccctcaaccgaggatatcgaagcaaaatactcgtcagagcaggagacaggctcgttcacggaatacgcggcaagactgtttgtgtccactgcatcctcactcgcgggcggcaggacaaggtgtatattcttctcgctcgacaacacaaacctgaaaaacagccgcgacttctactccgtattgaagcagtccgacgaggcgacgggtcacgtttacgactacgcggcgataatgcacgacagcacaaccgacgacggcgcgaaatactccctctgcgacttcacggacaagtattattccgacggatggatagcgggtggcggagttgagtcgtgcataaccacgcagaaaaacggtgaaagctcccgtgtgctcacagtcagcttcaagcacgacgcatacaatacataccgcaccggaagcagcggctctgcgggaataacgctccgcaacttcgacaaaagcgtagacttcacgaatgtgtcatcgctcgaattcaccttttcactttcaagcgaatcctcgtccgctccgtcgtcggtagtgtttgttatcggaaacgacgagacaagggcggaatactacgcggaagacctcgaatgcggcacggagtacaaactcagctgtcctctcggaggctttgagacgcgcggcagggtcggatatatcggaataatggtgtactccgatgtgaacgtggtgctcgagctgtcctcggtagacgtatgcagcagcgtgcttgacgagggcgagcttgcggcgttgttcacggaaaaggagaacacgcacatatcggtcgactacaagacaatagcgttcttctcgttcacgattgcggcggtatcaataatagtgttcgtgttcctctcaaagctcgagaaggaagacgaagaaaatgacgcgaaacgccaaactacaggaggcagaaatgagcaaaaattcagacggggataagaaaaagtacaaaggcttcgacgagaacatgttcccggagccggacgaaaagatgaatgtaggaaacgtccgtccgttcacgaaataccgtgcggtggagatggcgctctgtcttgccgcgatagtgatggggcttttatacctatacacaagcgcggtaacgctcggagtgcttctcccctcgttcacggcaggaatggcagtaataaccctgatgcgctatcttgacgcgaagaaaagcggaggacgtggatttatcgcgtacattccgacggtattttccgcgctgctgaccgttcttgttgccgctgtgacggtggtgtacttccgcgacatggctctcgcgaagacacacgagctgtcggcggtgatgacgattttttgaaaaccgtcgaaaataggtgaagaaaagactccgtcttttcgatttcattatatctcactgcggtgaggggacgctcctatgcggagggcacgcagagatgctcaaacgcctgccccttgcacttactatgtaagtgcggagtaccggcttaccggtggagtatggcttagcaattaactttggctgtcgcacccggattatactggcgaaagggtcttcttcgattttggctaaccgccggattttataccaaaattattctgtagttgacagcggtattcataatcgagatttttgcaccatcaccaatcttgtgaagccg

SEQ ID NO: 932 - DNA, 5698 bp, Unknown
  16S sequences of unknown bacteria
aaggccgagcgccagcggaggctcgaagccggcgaagcgcacccgttgtggctgcacaccgacgcaagtcaggcggcgggcgccctttcgctcaacgtctcgacgctcgaggccgacctcgtcacgatttcggccgccaagatctacggccccaagcaggtcggcctgctgtgggcaagcgacgacgtcaagctgcggccactcgtcttaggcggcgggcaggaaggcggcctgagaagcggcacggagaacgtacccggcgtcatcggctttgccaaggcgctccaaatcgccacggcagagcgcacgcaggaatcgcggcgcctcgcgcagctgcgcgaccagctgcagcgcaccttgctgcaggagttcccgtgggcagtcgtctccggccccaagaagagccgctggcgcctgccgggcctgctgcacatctcgtttcccgggctcgaggcgcgccgcctcgtcatcttgctggaccagcgcggcgtctccgtgggcacagggtctgcctgcgcggcgagcaagatgcgcatctcgcacgtgctcacggcgataggcgccgacgaggccacggcagcgggcagcctgcgcatcacgctcgggcgccccaccacgcaagcgcaggtcgaggcagcggcacgcatcatcatcgacgtcgtcaacgccgagcgccagcgcctcggcatcaggtaaggagcagcagggcacatgggcaagaaggttttcgtcggcatgagcggcggcgtcgactcgtcgctttccgccgcgcttctcgtggagcagggatacgacgtcaagggcatctacatgcgcaactggtcgcaggacctgcccggcttcaagtgcccctgggcagaagacctggccgacgcggagcgcgtcgccgtcatgctcggcatcgacctcgaggtgtgggactacgaggagcagtacaagcgcgacgtcgtcgactacctcgtgggcagctaccagcgcggctgcacgcccaaccccgacgtgatgtgcaacgagaagatcaagtttggcgtctttgccgagaaggcgttcgcggaaggcgccgacttcatcgcgaccgggcattacgcgcgcgtgcgctacgaagaaggcaagccggcacacctgctgcgcgccgccgacgagcacaaggaccagacctacttcctgtggcgcgtgcccggcagcgtgctctcgcgcgtgatctttcccattggggatatcgccaacaaagaggtcgtgcgtgagatggccgcggcgcgcgggctcgaggtggccgagaagccggattccgacggcatctgctttatcggccccatcggcatccagcagttcttgctcagccagctcgagcgcaagccgggcgacatcgtcgaattcgagacgggcgacgtgctcggccgacacgacggcgcgttcctcttcacggtcgggcagcgcaagggcctcgacctgggcggcggcccggcgcgctatgtggtgaagaccgatacggcaaacaacgtcgtctacgtttccgccgacaagacctgtcccgccctgtggacgcgcgagatagtcttggatgactgcaaatgggtctcgggcgcggcacccgcagcgcacggatacctgattcgcagccgccacacccgcaagctggaagaggcacgcatcgaggtcgacccgcgcgacgcatcaaaggcgcgtgtctgcttcgacgagcccgtgcgcaccgtggcccccggtcaagcggtctccatctacgacgggctcgagtgcctgggcggcggcatcgtctcgggcaacctataacgcaaaaacgcgaacggcgttcaggagcacgggcttcctggctccgagacgcgcccgaagactatggaacactcaaccgcagcgttcatctcacatggacagatatcccagatgagtgtctcttctttgccgagctcaacaacccgttttcggttggcactgtcggccgggtctgcgacttgctcgatgcgatgccaccgaagattcattacgcacgagaagaaattctcagcagttggattttggcggagcagctcggcaaggggttccacacaggagagatgccactcgagatgctcacgctgtataacgtgcagacacctcgtcttcggagcctcgactgcctgtcagcactcggagagctctacgagctgctgtcgggacgctccttggcctcgctcgtcgaaccggctgagagagaaaactgtctcgccatgatgcggcaagcgcccctcgacagctatctggatatagcgggttgcccggcagagcgtattgaaactgcctacagcgcaggactaatcactgcccggctgtatagcgaacacctcgcaatcgagcgggcagcgcagatgcaggctccggaaggcgcgaacaccgagcgcgatgctgaggaatggcattttgtcgaggaagaacgcgccgggcagagaaaggccacgggctccttcgtcgaaggcttttcaggacatgacaagtactgccgcagcttcgaggtcttttcggcgagcatcttgagcggtgaggtcaccatcgacactcagaggctgatggactcgataagactcgtgctcgacgaccatggaatcagccattacgaggacgattcgatattcttccccgtatatctgctcgtcgcccaggcgcaggcgcgcatcacgcgctaagaagaagggggcatctctatgtcgttgccatcagaagaagacctctggtcgcgcatcatgcacgacttgcacgcggatttctggccgaagacgaagacgggggttcaaggcgaaggctccatactattcgagtacttcctcgacgaaagctggcatcacttccgcgtgcagtcgaagcgccttttgcttctcggcaagaaaaatgcgctcgtcgccctgattatcgatacattgctacgtgatgataaagcagggcaactctctaaatacaagtgcctgccgcttctacttgcagaaatcgccgatgcaaaacccgaatcgttcgagcgcatctcgtccaagaagcaacgcctcctgcttgctgaagcgagcgaggacatcggccgcacggcgagcagcctcagcgaccagctcgtatccgacctcttggcagagatgctcgccaagtactccgccggcacaaaaagcgcgcgcacaatcgagtggttcgaggacctgctccttggcaatgcaaacgaaggcagtaacgagcgtgacatggacgcggcgatgaaagcgctggcaatccgtgccgagagtatcacagagcagtgcagtcgtgcccaacaagacggcatgcccgaagatgcggcagtcgaactgaggatagcgctcgaagcttcgccccagacaatgctgccagaattgaaacgcgcggtgttcccgcaggtcagcattcaagcgaaacgctggctcgaaaactccggatttggcgggtcaactccgacaccgcagagcaccgtaataaaatcccagaacatcgacttgaagcttgtcgagttgtggagcaggcgtttttctccgttgggggaaggcggcagagccggcaccgacctcgaggccgtcggcaaagacatcaagcagatgataagcgtcgtgaagcgggatcgaaacaacgcgcgcgtcacaggagacgatgtcctgatccccctcctcgtcgacggggaatccggtattggcctctacctttttggcgaggggtggttcaggggacacgagaactcgctgagcgagagggaacgagcgacactcgccgagaacaggtgtattccggcgctgctcgtcgaaacaggcgcggcaagaaggttcgaggccttcacagagctcaccagccccgagaccggaagcgccgccccgaagagacggcgtcacgacatcgagcgaatcgtcagggaaagctgcgatctgctcacgaacgtatggaatggcgatggcatcgaggagaccctcgcctggtaccgtaacgcccagatgagcgcagtgggcgaacggaaatccttctcgctcgataactatgcggcaccagacgggacgccccagaggtacctgcgcttcttcgaacgctaggcgtgagacgaggggccgtgggtatcgtgccgctttggcacgaagggacaccccggcccgcccctcaactttcggaatctgccatatttggctgtttccgatatcggaagctgccttttttggctgttaccgaagagttttgctatatttttggcaggttccgaaaataacggacatccacgaaaggcagccgccatggaacgagaagcatttgcaagcctgcagaagtgggcggactcttcgcataggaaaccgctcgtcgtgcgcggcgcacgccaagtgggcaaaacttggcttgtcaacgaattcgggcaaaagacattcgcatcagtcgcccatgtggtctttcttaataacgaggtcatgcaaggtctgttcgcaggctcgctcgagcccgcccggctccttaccgcaattggcgcctacacgaacacgaaccccctcgacggcaacacgctcgtcttcctcgacgagatacaagagtgcccacgcgcaattgcatccctcaaaacgctgtgcgagcagatgccgcaagtccccatcattgcagcaggctcgctgcttggagtcgccttgaacaggcagaaagaggaggtcgagggtcgaatctcatggccggtcggcaaggtcgattatcttgacctgtacccaatgaccttcagggagtttttgcgcgcgctcggagaggaccagctggcagatctcattcggcctgattcgctcgacatcatcagtgctcttggagagaaatacgaagatctgctgcggatatacctgttcacaggcggtatgcccgaagcagttcagaagtatgtggacacgcgccttcttgccgaggtgcgccatatccagagcaacttgctacgcgatttcgaatacgatttttcaaagcatgtcgattcccctttggaaaccgagcatattcgagaattgtggaggtcagtcccaacgcagatatctcgcgaaacagggagcaagaagttcgtgtattccaaggtgaggcagggtggacgtggacgcgattacaaagacgccatctcctggctcgtcgatgccggcctgattatccgggtaaacaaggtgagcaagccgggcattcctttaaaaacgtacgaagatggccagtctttcaagctcttcatgctcgacgtcgggctgctgggtgctgcacttggtcttgacaagcagacggttctcagcggaaacaggctctttacgcttggcaagggcgtgtatgccgagcagttcgtctgcgagcagctctgcgcggcgggcagtattccccgctattgggcagcggacggaaagcagagcaaaggcgaagtcgatttcctctacgagtcagaggggcaagtcgtgccagttgaggtgaaggcgaacgacaatgtgaaaagccgcagcattgccgacttctcgaagacatacggcatcgaccgctgccttcgcctttcgctcaggggatatatcgatcaggggtggctggtgaacatccccctctacgctgccaacatcctcccattagcgctttagtgagacgaggggccgtgggtatcgtgccactttggcacggagggacaccggatgtgcggacaatttccgatacactctatcccgccgccgccgtcgaccgcctg

SEQ ID NO: 933 - DNA, 32759 bp, Unknown
  16S sequences of unknown bacteria
gaaggaatggcgggtatagggggaagggatggcgagagagcggaacgggtacggctaagcggagagattcgcctgacggcgaatcttttggatacgcggcgacgcttcacgccgccaacgaaaggggcggggagcggaaggatgggcgggcatagagagaaggatggcgggaggcggaacgggtacggctaagaggggagattcgcctggcggcgaatcttttggatacgcggcgacgcttcgcgccgccagcgaaaggggcggggagcgagaagggccggcgccagcggaagcggcggtacggaagagagaaacaccggagggtgagcgattccgagcggatttgggggagaagaaacgggaaaaagaggaattttttgggcgggtggagaaagagagacgcagatgacgagccttgcgcgcaacgggcgcggcggggagttcgttaacaaaatataggagattgcaacaatttggacaaaaacgcagcgggaagaaattcccggaacgcgcaaagaaaagggtgaacgcatgtttcaatggaagaaacgccccccgcaggaggggggaagaagcgtttcggcggtgctccactccaagacgctcctctcggtgctgatgctgacggtggcctttttgatcgtatacggggtattcctgattgtggccacgccgcagcggcacgatctggaagtgggcgacattgcgcccacgaccatcacggcgacaaaggacattgaggacacggcggcgacggagcagctgcgcgaacaggcggcggcctccatcgtcgagggcgcgacgcgtctggacacgacgatttcggccacggtggacgagaacgtggtttcgatcctgacggtgatgacgcaggcgcgcacggactacgcggcggtgacggcgacggtcgcgcccacggcgaccccggaggcgacggaatccgagacggcggagccgagcgcagcggccggcggcgcggcggagagcgcaggcgcttcgagcgcttcggcggaagccacgccgacggccagccctgccgcgaccccggtggcgacggccccgcgcgagagcgcgacgcagcgccagcaggcggtgcaggaggacctgaacgcgcagctgacgggctttggcgtagagctgacgaatgcgcagctgcgcgcggtgctcacggccagcgagagcacgtttgacgggatgtgcgacgtgatcctgacgctgacgcgcgaggcgatggagacgggcatccgcgaggggcagctggacgagcgcctgcaggcgctgcacctgcagatcctcggccgcggcgtgagcggggaactgctgcaggtgagctacgcaatcgtggacgcgacggtgcaggagaacgtcttcatcgacgaagaggccacgcagcaggagcgcgaccgcgcggcggctgcggtggagccggtggtctacaagaagggacagaacatcgtccaggcgggcgaagtggtcacggcgcagcagctgcagctgctctcgagcctgggactgctcgcggacacgcaggtggacaccgggatgctgctgggtcttgcgatgctggtggcgctgatgtacctgacgattctgctctacctctatcaattcgcgcgcgatcttctgcagagcccgaagatgattctgctgctggtgacggtgatgctgctggagatggcgctgggccttgtgctcaagcagatcaacatctacctgatcccggtgcagatgggcgccatcatcgtggcgatgctgctgcggcaccggctggcgctgacgttcaacatcgtgacgggcgtcatcgccggggtgatctcgaccggcagcgacggcattttgacctcctcgatgttccagatcctgctcatggcgctctttggcggcgcggcggcggtctatctttcccgccgggcgacgcggcgcagcgtgatcctgtacgccgggtttgcgattgcggcggtgaactttgtcacgacgtttgcctccggcatgctcaccagcacgaactggagctccgcgctggagagcgcggtctacagcgcgggcggcgggctgctgtcggcggtgctggccgtgggcctgatgccgctgatggagaacgcgttcaacctggtgacgccgcaggtgctgctggagctctcgatgccgaaccagccgctgctgcgccttttgcagaccgaggcgccgggcacgcaccaccacagcctggtggtggcaaaccttgccgaggcggcggcggaccgcgtgggcgccaacgccctgctctgccgcgtgggcgcgtactaccacgacattggcaagacgcgccggccgatcttctttaaggaaaaccagatcgaccagcccaacccgcacgacggcatggacccgcaggtttcggcggcgatcctggcggcgcacgtgcgcgacggattgcagctggcggacaagtacaagctgccgcgcgaggtcaaggacatgatcgcccagcaccacggcgacagcgtgatggcttacttctactacgaggccaagaaggcggccgaagcgcaggggcgcgacgtggacatccgcgacttctcctacgacgggccgaagccccagagcaaggaggcggccatcctgatgatggcggacacggtcgaggcggccacgcgcaccctcaaggaccgctcgcgcgagagcatgtccaagatgattcaaaagctggtcaaggacaagtttgagtccgggcagctgtccgagtcgccgctgacgttccgggagctgacggagatctccgacgccttcatccggacgctgacgggcatttaccacgagcggatcgagtatccggacctgaagaccctcaagaagcccggcgcgtcggccctgccggacgccccgcaggcggagtccgccccccgggcaacggttgccccccgggcggagtccgccccccgggcagctgctgcctccaaggcaacggccgccccgcaggcagaggccgcccccaaggcggagggcgcggagaaaaaggaggaatagagcggaatgctgctggaatggatggatgagcgcgaggatgcgcaggcggcggaggagagcgacggacagacgcaggcgctgctgacccgcgtgatggaagaggtgctgcggcgcgaaggcgaggatgggaacgtcgtcgtgggcgtgacgctggtggacggcgagcgcatccgcgaactgaaccgcgccttccgcagcgtggaccgggtgacggacgtgctctccttcccgatggtgcaggggcgtctttgcgacgcggcgccggaggagctgacgggccttacggacccggagacgggcgcgctggagctgggggaccttgtgatctgcccggcgcgcgcgcgggagcaggcggaggaatacgggcacagcgtccggcgcgagatggggtacctcgcggcgcacggcctgctgcacctgctgggatacgaccatgagacggaggaggagcgcgccgagatgcgccaaaaggaagaggcggcgcttgcggcgtgcgaattgacgcgcgagggcgcgggggccgattgaacgcccggcgcgccctgcccgcacgagaaaaaaacaaacgcataggagagaaaccatggagaagaagaacggattccgctcggggttcgtggtgattctgggccggccgaacgtgggcaagtccacgctgatgaacgcgctggtgggcgagaaggtggccatcgtctcgccgcgggcgcagactacgcgcaaccgcatcatgggcgtgatgacgcgcgaggacgtgcagatcgtcttcctggacacgccgggcatccacgcgccgcgcaacaagctcggccagtacatgatgggcgcggtgcgcgacgcgctggagggcatcgacgcggcgatcctgatgctggacgcgaccgacgtgcgcgccgcggacctggagctgctgcgcaagtacgcgaaccttccggtcaagaaggcgatcgtggtcaacaagatcgaccaggtggacgccggggtccttgcgcccctgctccagcgcctgggcgaggagaaggcggacgcctacctgccggtttcggcgctcaagcggaaggggctggacgcgctggtggatcagctcgccgcctggctgcccgccgggccgaagtacttcccggacgacatggtcaccgaccagcccgaacgcgtcatcgtcgcggagatgatccgcgaaaaggcgctgcgcaacctgcgcgaggagatcccccacggcatcggcgtggaggtgctctccatggagaaccagggcgacgaaacgcgcgctgtgaccatccacgccaacgtgttctgcgagaaggactcccacaagggcatcctcatcggcaagggcggggagatgctccgccgcatcggcgaacaggcccgcggggacatcgagcgcctgctcggccagcgggtgaacctgcagctctgggtcaaggtccggcccgactggcggaaccgcgccgaggacctgcgcaccctgggttacacgccgcccaaggactagaatcaaaaaaagggaggagcgttcactcctccctttttgcgctgggggcgggcgacggctcttcccgcagggcggaatacagggcgtagtaggacgggcggccgctgtgggcaaagagggaccagagcaggtcggaaacgctgtgcatgcgcggggcacctccttttgcgggtagtgtgccccgggcgcggccgcgcattgtgtggaagaaaaaggcgcccgcgggcgcgaggggaggaagggaacatgccggagaggcggatcgtcaacgcgatcgtgctgcgcagcgtcaactaccgggactttgaccggattttgacgctcttttcgcgggaggaggggaagatctccgcggcggcgcgcggcgcgcaccgggccaagagcccgctggccgcggcctcgacacagttcaccgccggggagttcgccctggaggagcgaaacggcaagctgtccgtcaagtccttcctgctggacgaggcgttttatcccctgcgggaggacgcgcggcgcctgagctacgccacggccctttcgcagatcgtcgaggagatcgtgcagccgaaccagccgaacccggacctgtacgacgcctttctgcgcgcgctggcctacctcgcctttgaccgcgagcgcgactgcacaaacgccgtgctgcccttcctgctgcgggccatggccttctccggccacgcggccatgctcacgcgctgcgcggcctgcggcgggcgcatcgtggacgcgcgctgggactcccttgccggcggcgtcgtctgcgcgcgccacgcggaccgggacctgcccgtgatcacggcggaggacatggcggtcctgcgcgcctgcgtgcaggggccgttcgccccggcgcagggcgacgtgcgccgcctctgccgcatcgccggggacttcgtccgcgcccagctcgagcgggattttgacgcgctgacgctcgccgaatcgctggacgcgcaggggtaggcggattcgcccccttgcgcaaataccctgagcattccacgccaaacgccgcgtgccgccagcccagatgggctggcggcttttttcttgcgaaaaagcctcgaccgatcggcgtctggaaggaattttgcttttgcgctttttggcgcaggaatcttgaacgtacatggcgaaaatgatggactgtgagaagcaggacaaaagaaaaacctctgaagaacctagagaacccggattgacatctgacacaaaaagagatgcagacggaaggagagaaagacatgaacgccgtggagcggtacggaagaatccagattcccgcgccggagggcgcaagttgcctgtgggtgcagacgccctccggtgcgcgggagcgcatccccacgtttttgaaccaggaatacgactttgtctacgaccggcacgggtacgaggcgcagacgccgcggggcgaggcctatcgctgcgcgcgctacacgccggagcaggagggtgaatacctcgtgtatgacgaggcgggcgcacaggtggaggcgttcgtctgcacgccctcggacaacccgggatacgtccaggtgagccggcgcgacccgcgctatttcgccttctcggacggcagcagctacgtccccatcgggctcaacctggtcggctgcgggtacgaccggcagccggccggcaacgagcacttccgcgcgtcggaggacgtgcggaccacgggcatgatccagtggcggcgctggcttgcgcagatgcacgaaggcggcgcgaactacgcgcgcatctggctctcgaaccgctacacgcaggcgcgcacggagatcatgggcgtgcacgacccggccgcgctcgcgcggctggacaaggtcctggaccttgcgcggcagtacggcatccgcgtcaagctctgcttcgagcacttccgcacctttaccgatgcggggcactttgcctacaagcgcgttgtggacccggataccggccggcagctgctggacgtggagacctggttccgggaggagcgctggaaccggcgctggctggaggacatcgccccctacctcgaccgataccagaacgaccccgtggtctttgcctgggagctgtggaacgagatcgactgcggcgacgcctgctttgagacggtcgagcggtttacgcggcgcatgctgccggaggtcaagcggcgctccccgaaaaacctggtggtcaactccctggggagcatggacgaggcgggcaagcagcaggtgcaggatgcgttcgcggcgatcccggacatggactttttgcaggtgcaccgctacctggaccagggcgcgccgctggagatctgccgggaggacccggtcgccttctcccaggacgcggtgcagcggtgcagcaccgggaaaaagcccctgatcctgacggagaccggggcggtgaacgaccggcacgtgggccccttccgcttctattccgcggaccacggaggccggatcttcgacgacgtgacctatcccgcgttcttctgcggcgctgcggggagcggccacatctggcactgggactgctatgtggacgcgcagaacctctggtcgcacttccggcccctgcatgacgcgctggagggcgtgcaggtggacgcggagaacttccagcccgattccatccccgacgagcgcgcctggattctggagctgaagggggacaatacgacgcttgtcctggtgcgcagccgcgcggaccgctgggacttcgtgctgcgggacggcaaggagccgccggtccttgcggggatcgacctgcccctgcgcggcaaggccgaggtcttctggctgccgggggacgagggcgcgtgcgagccgagcgcccagggatggacgctgagcgggttccgccgcggatgcatcgtaaaaatacagaacgagaaatgaggagaaacggcgatgaagaccaatcacatgatcgggatcaccccggcgcacgacgcgccccggtttgacatgctgcgcgacctgggcgtccagtgggtgcgccagggctatgtcttcccctttgcagagcgcgggagcgagaggccttccgacgcgttcctgcgcagcgaggagcaggtggagacctacctgcgcgaggggttccaggtgctggcctccttccccgggcccgggtccatgcgctacgccccggaggcggggaagaccgtctacgtgcgcgccatgcccgagtggatgggcgaggtgggcagcgaggactaccagaaggcgctgtttgacgcggcgcagtggctggcggagcggacgaaggggaagatcacctattggcaggtggccaacgagccggacatcgacatcttctacgggccgctcacaaaagaccagaacatcggcttcctgatgaccgccgcccgcgggctgctcgcggggaatcccgacgcaaagcccgggatcaacctgggctacatcaacgactacgcccgcctgctgatgcgcgagatgtacgcgatcccggacagcccctttgcgtatctgggaatcgacggctacatgggcagctggcagctcggcgggccggagacctgggtgagctacatcgacgagacggcccggctctccggcaagcccatcctcatcaacgaatggggattctcctccctgcagtggggggagaagtacacggacctggagcgcaagaacttctacaaccagcaggtctgctactacaagcactggcagtacacctggggcaaggggcataccccggaggagcaggcgcgctacgtccggctgtgccagaagatcttcgccgaccatccggcggtgatcggaaacttcttcttccggtggagcgacgcgcccacctgctggcagtgcggcgagccggactgcccggccgaatgcgcctgggggtgcgtggacgtcgaccagaaccccaagcccgcctactacgcgctgcaggagggaaaccgcacgctgtttggctgaggcacagggaagcgccagacggccgcccggtcattcaccggaatttcacaaaatgaaacgcggttgcggggatcgggacggagaagcgaaactgccggaattccggcgcgtttacattgtttttacagcccttggcaaaaaaggatttgcgaaaaagcgggatttcgagtataataggaacggctcaagattccgcatttcggaatccatttgattcgatcaacgtgttttccaccgtgggcaatcgcagacgcgcaccccccgcgcgctgcgtccaccatattttgcctaagatcacttcaaggaggttgccttacatgtcccacaagtacgtgtatctcttcagcgaaggcgacgccagcatgcgaaacctgctgggcggcaagggcgcgaacctggcggagatgacgaatctcggcctgccggtgccccagggcttcaccatcaccaccgaggcgtgcacccagtactatgaagacggccgtcagatcaacccggagatccaggcccagatcatggagtacatcgagaagatggaaaagatcaccggcaagaagttcggcgatctggagaacccgctgctggtctcggtgcgctccggcgcgcgcgcgtccatgcccggcatgatggacacgatcctcaacctcggcctgaacgagcaggtcgtcgaggtcatggccaagaagagcggcaacccccgttgggcctacgactgctaccgccgtttcatccagatgtactccgacgtcgtcatggaggtgggcaagaagtacttcgagcagctcatcgacaagatgaaggaggagaagggcgtcaagcaggacgtggagctgacggccgaggacctcaaggagctggccgagcagttcaaggccgagtacaaggccaagatcggcgaggacttccccaccgaccccaaggagcagctcatgggcgccatcaaggcggtcttccgctcctgggataacccgcgcgccaacgtctaccgccgcgacaacgacatcccctactcctggggcaccgcggtcaacgtgcagatgatggccttcggcaacatgggcgacacctccggcacgggcgttgccttcacccgcaaccccgccaccggcgaaaagaagctcttcggcgagttcctgatgaacgcccagggcgaggacgtcgtggccggcgtgcgcacgcccaaccccatcgaccacctcaaggacatcatgcccgaggtgtacgaccagttcgtcaagatctgcaatacgctcgagacgcactactgcgacatgcaggacatggagttcaccattgaggaccgcaagctctacatgctccagacccgcaacggcaagcgcaccgcggcggcggccctgaagatcgcctgcgacctcgtggacgagggcatgatcgacgagaagaaggccgtgctcatgatcgagccgcgcacgctggacaccctcctgcacccgcagttcgacgccaaggccctcaaggcggccactccccttgccaaggcgcttgccgcctccccgggagctgcctgcggccgcatcgtcttcaccgccgaggacgccaaggagtgggccgagaagggcgagaaggtcgtcctggtccgcctggagacctctccggaggacatcgagggcatgaaggccgcccagggcatcctgacggtgcgcggcggcatgacctcccacgcggcggtcgtcgcccgcggcatgggcgcctgctgcgtctccggctgctccgacatcgccatggatgaggagaacaagaagttccacctggccggcaagaccttccacgagggcgactggctgagcatcgacggctccaccggctgcgtctacgacggtcagatccccaccgttgacgcctccatcggcggcgaattcggccgcgtcatggagtgggcggacaagtaccgcaagctgcgcgtccgcaccaacgccgacacccccgccgacgccaagcaggcccgcaacctgggcgccgagggcatcggcctgtgccgcacggagcacatgttcttcgactccgaccgcatcccggccatccgccgcatgatctgctccgacaccgtcgagcagcgcgtcgaggccctggccgtgctcgagcccatgcagcagggcgactttgagaagctctacgaggccatggagggcgcgcctgtcaccatccgcttcctggatccgccgctgcacgagttcgtgcccacggaggaaaaggacatcgagctgctggccaaggacatgggcaagacggtcgaggagatcaagaccatcatcgccggcctgcacgagttcaaccccatgatgggtcaccgcggctgccgtctggccgtcacctacccggagatcgcccagatgcagacccgcgccgtcatcaaggccgcgctcaacgtcaagaaggcgcatcccgattgggacatcgtgcccgagatcatgatcccgctcgtcggcgaggtcaaggagctcaagtacgtcaaggatgtcgtgtgcaaggaggctgacgccgagatcgccaaggccggcgtggacctgcactacaaggtcggcaccatgatcgagatcccgcgcgcggccctgaccgcggacgagatcgccaaggaggccgagttcttctccttcggcaccaacgacctgacgcagatgaccttcggcttctcccgcgacgacgccggcaagttcctcggcgcctactacgacaagaagatctacgagaacgatcccttcgcgcgtctggaccagatcggcgtcggccgcctcatcaagatggccgcggacctgggccgcaagacccgtccggacatcaagctgggcatctgcggcgagcacggcggcgatccgctctccgtcgagttctgccacaaggtcggcctgaactacgtctcctgctcgcccttccgcgtgccgatcgcgcgccttgccgccgcgcaggccgccatcaaggacgagaagtaagccaatcccgcgcgccgctgcgcgcgtccgccccccgcgtccccttccccgggacgcgggggtttttttgcgcgcacagccgccaaaatcgcccgaaagttcaaggttttttacgcatgtgaaaaagcgggaaagtcggggaaaaacgcgagggattaacctcccctttacagagcgctgaaagaacctagaaagagcgctggtactatgtacgcgtaaccgaaagggaggattgaaaagtatgaagagcatcctgatcaaggcctttgcgctgctgacggttatggcagttctgctgaccggctgcaccgcgacccccgaagccaccgaagcgcccaccgaggcgcctgccaccgaagcccccgcggccagcgaagagcccgccgccagcgaagcccccgcggccagcgaagagcctgccgcctctaccctgagcggtgagctgatgatcaccggctccacctccgccgagcccctggtcaccgtgttcggcgacctgttcatggaggccaaccccgacgtgagcgtcgcggtgcagggcaacggctcctccgcgggcatcaccgccgccaccaacggcaccgcgcagctgggcatgagctcccgcaacctgagcgatgaggaggccgccgccgagggcgtcaccggcaccaccatctgcatggacggcatcgccgtggtcgtcaacctggagaacccggtcaaggacctgaccaccgaccagatcgcctccatcttcaagggcgagatcaccaactggtctgagctcggcggcaacgacgaggagatcctcatcatctcccgcgaggctggctccggtacccgcagcgcctttgaagagatctgcggcctgctgggcgaggacgaagagggcaacgagatctctctggtcgatgagagcaaggcgctgatcgccgactccaccaacgcggtttctaccaacgtcgtcagccacgtcaacgccatcggctacatctccctgggctcctatgacagcacgcaggtccacgccatcaacgtcggcggcgtggagtgcaccgaggagaacatcgtcgccggcacctaccccatcgcccgccccttcctgctggtgcagggcccggccaccgatgatctggcccgcgcgttcctggactacatcctctccgcggatggccaggcggtcgtctctgagcagggctacatccccgtcgcgtaagaggaccgaaggaaaagcggaaaccccatagagaaagagggggaatggtgaacagaacgcagctttaccggcagctgttcaccattccttttgtatgtgcaaccagcggatcaccggggaggagtacaatggaagcaaaggtccaacaggcggcggcaggcgccaccgcgaaaaagggaaacaagaaaaaagtcttgaaggttctggagcgcatcacggagagtgtgttcttcctctgcgcagccgcggcggtgatcgcgctgtcggtgatcgtgatcttcctgttcatccagggcatcccggccctgcgggagatcgggctttggaacttcatcagcggcacgacctggcagccctcggccaacgagttcggaatcctgccgatgatcgtggcatcgctgctggcgacgttcggctcggcgctgatcggcggattcatcggcctgatggcggcgctgctgctggcggagctggcgccgaacttcctggcaaacatcatccgcccgctgatcaacctgctggcgggcattccctcggtggtctacggcttcttcggcctgatggtcgtggtgcccatgatcatccaggtcttcggcggcacgggcaacagcctgttggccacgatcctgatcctggcggcgatgatcctgccgaccatggtctccctgtccgagacggcggtgcgcgccgtgccccaggcctaccgcgagggcagcctggcccttggcgcgacgcacatgcagaccatcttccgcgtgacgctgccggcggcaaagtccggcgtgctcaacgcctttgtgctgtcgctgggccgcgccatcggcgaaacgatggccgtcatcctggtggcgggcaaccgcgcctcgatcccgacctcaatcctggacccggtgcgtccgatgaccgcgaacatcgccctggagctctcctacgcaaacggcctgcacgccgaggcgctctacgccacgggcgttgtgctgctggtgttcatcgtcatcatcaacatcacggcgcacatcgtactgcgcaacaagaaggagggctaaggccatgcgcaagacggttgacaacctgctcaaggcgctgctctggatttgcggcggcattgcggtggcgtttctggcgctgatcctgatctacgtcatcacccgcggcattccctacatcaactgggagttcctgacgacggcttaccggccgggcctcggctccaacggcatccgggacatcatcgtgggtacgctggcgatggtgggcctgacgctcgtcatcgcggtgcccatcggggtgctggcggccatctacatgggcgaatacgccaagaagggcaaggtactgaccaccatccgcttctgcgtggagtccctggccggcattccttcgattctgtacggcctgttcggctacacgttcttcgcgatccagctggcgttcgggttttcgctgctttcctcggcgctgacgctggcgattatggtgctgccggtcatcatccgctcgacggaggaggcgctcttcaccgtcccggacagctaccgcgaggggagcctggcgctgggggcgagcaagctgacgacgctcttccgcgtcatcctgcccagcgccatcccgggcatcctctcggcgatcatcctttcgatgggccgcgtcatgggcgagacggcggcggtctattacacggcgggcaccatggcgcgcgtgccctcgagcgtgttctcctcaacccgatctctggcggtgcacctgtatttgttggttaaggaggggttggagtcgggcgacgcctttgccacggcgacgatcctgatcgtgatcgtggtgggcctgaacgccctggccaatttcatcgccaagcgcctatcccgcaagctgacaggaggaaattgagcatgactgaagtgaagatgagcgccaaggacctgcacctttggtacggcgagatggaggccctcaagggcgtttccctggacatgaacaagaacagcgtgaccgcgctgatcggcccctcgggctgcggcaagtccacgttcctcaagaccctcaaccgcatgaacgatttggtggagggctgccggattgaaggagatgtgcgcctggacggcgaagatatcttccggaagggaatcgaccttgcggagctgcgcaagcgcgtgggcatggtcttccagaagccgaaccccttcccgatgtcgatctatgacaacatcgcctacggtccgcgcgtgcacggcatccgcaagaagaaggtgctcgacgagatcgtggaaaaggcgctgcgcggcgcggccctctgggacgaggtgcacgaccgcctgcgcaagagcgcgatgggcctgtccggcggtcagcagcagaggctctgcatcgcgcgcgtgctcgcggtggagccggaggtcgtgctcatggacgagccgaccagcgccctggaccccatctcaacccagcgcatcgaggacctgatggcggagctcaagcagaagtacaccatcgtcatcgtgacgcacaacatgcagcaggccgcgcgcatcgcggaccggacggccttcttcctcaagggcgagatcatcgaggcgggcgacacgctgcagatcttccagcagcccaaggacaagcgcacggaagactacatcacgggccgcttcggctgatgcgggaaaacgcggatacggcgaaaggagcagcgaggagaacatgaacagaatcttgatgaacaccgccatggagggactgcacgagtccatgttggagatgggcaggctctgcgagcgcggcatcgacgaggtgctctcggcgatctaccgctcggacaaggagctggccgcaacggtcgtcgcgcgcgacgacagcatcgacgagatggagcgccggatcgagacgcagtgcctgagcatcctggcgcgcttttccccggtggcaaacgacctgcgcgccgtgacggcggccatgggcatcatctcggacctggagcgcatcggcgaccagtgcgcggacatcgcggagatggtggagcacctctgcggcgcggacaagcacatccagcccatggcggacctgcgcctgatgggcgacacggcccggtccatggtgcacgacgcgctggattcctacatcggcggcgacgcggagaaagccaagggcgtcaccatgcgcgacgacatcgtcgacgcggcgctggagcgggtgatcctgcacctgaccaacatcatgcgcgagagcccggacgcggtcagccaggcggtggacatgctgtttgtggccaagtactttgagcgcatcgcggaccacgcgaccaacatcggcgagtggagcgtgtacctgagcacgggcacgcacccgctggacaaggaactgcgccaggagtaaagcagagacgtaaggcccgggctgggcagacagtgctcagggtgggcggcaagcccgggctgggcagacagtgcccagggtgggcaacatgcccctggcgggacgggcagggcccgcggcctgcgggggctgcgcagtttttgggaaaacacgaacggaagcaaaggacgggaggtgcaaagggcatggcggtcatcgcggttgtggaagacgagcaggccattgcccggctgatctcgctgcacttgcagagcgcgggatacgagccgaagctgtacgagacgggggacgagtttctgcgttccctgcggggcgacgtgccggatctggtgctgctggactggatgctgcccggggaaaacgacggcatcgcggtgctgaaggccctgcgcgcaaacgagaagacgcgggccgtgccggtgatcatgctcacggccaaggcggaggagctcgaccggattttgggcctggaggtgggcgcggacgactacctgaccaagcccttctacttccgggagatggtcagccgcgtgcgcgcgcatctgcgccggcgcgagtgggagaaggacgaccccaccgtgcgccgccacggcaagatcaccatctacctcaacgagcaccgcgtgaccgtggacggcaagaacctcgccctctcgcccaaggaatacgacatcctgagcaagctcatggaaaagccctcctgggtcatgacgcgcgagcagctgctcacggcgatctggggcgcggactttgacggcgaggcgcgcacggtggacatgcacatgaccaacctgcgccgcaagctcgacgaagcgggcgcaaaggactacatccagaccgtgcgcgcggtgggatacaagatgtgcacgctataggcgcgctggtgcgctgtcccggaaacggacgtgcgtccgtttccgggaggggcccgctttccgaaaaaagggagacgactctcgtcgtctcccttttttcgggccgggccccgtgggccccggacgcgcactcggctgacgcctcgcacacgtccggggcctcaaaggaagcgatttccgccgtgccaaggttggaggaacggctggggcggtaggtgcgaacagggcgggactgggggctccggtagctatgcggaaatcgccccgtgcccgccggcaaagccgccgggcacgatgggaagtcgggaggggagcccccctcccgacaccctcccccgagggtgaatgagggctgcgggaaaggcggggcgtgggaggggagccggggtgtcaaggagggagccggccccctccttgacaatcctccccaaccaaagcggagagattcgcctggcggcgaatcttttggatacgcggcgacgcttcgcgccgtcagcgaaaaatggcgggtatggggaagggatggcgggaggcggaacgggtacggccaagcggggagattcgcctgacggcgaatctctggatacgcggcgacggcggagccgtcgccagcgaagatcggcggggagcgaagggattgcgaagagacggaatgagaacggacaagaggaaagaggtcgctgggaggcgaaatctttagcatcgagaggaaacgcatccgggtgagggagatctggatgcgaaaaaaagaaggaggaaacgggatgcggcgcaaggtacttttgctgctggttgtggtggcgctgctgacggaagcgctgctgggcggcgggatctatgcatttcagcgggcgctgctggcggatcaggcggccgagcgcatggaggatgttgcggttcttctgctggagaatctagtggacgagggtttgcaggcggaagtggacgaatgggcggacgcgctcaacgagcgcagcggcggctaccgcgtgacggtggtggacgcgcaagggcaggttttggcggactccggcgcggcggcgggggagatggagaaccatctcgagcgcgaggaggtacaggaggcgctgcacagcggcgcggggcaggcgctgcgcgactcggcgaccacgggcgagccgcagctctacgttgcgatttcggacgggtcaaaggtgctgcgcctttcgcagacctttgaccagatccgcgcgctgcagcggctgctgctgctggcggtgtgcggcacagcgctgctgacgctggcggtggcctgggcgctgagctatgcggcggcgcggcgggtattgcggccgatcgaggcgctgcggcggggcgcggggcgcatcgcggagggagacctgagctaccgcattcccgcgcagccggacgagatgggcgccctggcgggcgacttcaacgacatggcggacaagctctccaagtccctgcagcacgagcgcacgcagcgcgcgcagatgcaggcggtgctgcgcgcgattccggcgggcgtcatcgcggtggaccgcgagggcgtcgtctcccagatcaacccggaggcggtgcgcctgctgggcctgcgcagcgggcgcgtgggcgagaagttcggggacctggtgcgcgacgatcagctcgtggacctggcgcgcaagacgctggagcagagccaggggcagaccgcggaatggaccacggaccgcgtgctccaggcggtctctgcgcccatccgcgacgagagcggcgcgggaatgggcgtggtgctggtcatcagcgacatgacgcagatgcgccggctcgagcagctgcggtcggagttcgtctccaacgcgacgcacgagctcaagacgccgctgacggcgatccgcggctgcatcgagacgctgcgcgacccgtatgtggacacggcaaatcctaagatcctcagcgagatgctcgagatcatggacgtgcagggcgagcggctgcaggcgctcatcagcgacatgctcgagctctcgcgcatcgagagcgcgccggcgctggccgacgagcggggggacctgtgcgccgcggtgcgcgaggcggccaaggccgtgggcgtgcaggcgggcaaggcggagatcacactgcacgtctcggccgaaggggagctgctctgcggcgcggcggaggagcgcctgcgccgcatcgcgcagaacctcatggagaacgccgtgcgctacaaccggccgggcggcaacgtctggaccacggtgcggcgcgagggcgcgcgggccgtgctcgcggtgcgcgacgacggcctgggcatcccggaaaaggacctgccccgcgtctgcgagcgcttctaccgggtggacaaggaccggtcgcgcaactccggcgggacgggcctgggcctggccatcgtcaagcacctggtgcggcgctacgacggggagctggacatccgctccaaactcggggaggggtccacgttcacggtctatctgcccatcctgcgcgagaaggcgaacgcggatcgggaggcgtgagcaaggcgcatttttgcaaggggcggcggagcgcttctgcctcgtggacaaagaccggtcgcgcaaacccggcgttacgacgggggatgagctcggaggggttatctgcccatcctgcgcgagaaggcgcccgcggaccgggaggcgtgagaaaaggcgcagtttgcgcggggcggcggagcgcttctgccgcgtggacaaggatcggccgcgcaaacccggcgttacgacgggggatgagcttggagaggttatctgcccatcctgcgcgagaaggcatctgcggaccgggaggcgtgaacaagacgcatttttgcaaggggaggcggcgaaaccttggccgccgccccttgcgctctgttttttgggcccatgggccggcagcggaaggaagaagggggaagaatgtagaatgtaaggaaggaaagcgtgcacagttccctcccccttagcgcgggacgaaaaaggaggttggagaagatggacgtgcgagagcgaaccatggaatggcaccgcgagatgttttccccctatgcctgcggcgacgaccgcctcgtcgaccgggagcggccgatggagccctgccccctgcgcacggacttccagcgcgaccgcgaccgcatcctgcactgcaaggccttccgccggatgaagcacaagacgcagtgcttcctcgcgccggagggcgaccacttccgcacgcggctgacccacacgctggaggtggcgcagatcgcccgcaccgccgcgcgtgcgctgcgcctcaacgaggacctgacggaggccatcgccctcggccacgaccttgggcacacgccctttggccacatgggcgagcggattctcgacgccctgtgcccgcaggggttctcccacgcggagcagtcgctgcgggtggtggagcggctggaaaacgacggcaagggcctgaacctgacgctcgccgtgcgcgacggcatccgcgagcacacctccaagggccatccgcggacgctggagggcgcgatcgtctccctctcggaccgaatcgcctacatcaaccatgacatcgacgacgccatccgcgcgggcgtgctccggcaggaggagctgccgcaggatctgctcgacatcctcggccacgagcacggggagcggttcgacacgctgatcttcgacatctatgaaaacagccgcgacgcggaggagatccgcatgagtccccgcgtctaccgggcgatgatggacctgcgcgccttcctctttgagcaggtctacacccggcacgaggtcaccgtccaggagaagaaggccgagttcttgatccagagcctcttttcccactacgaggcgcacccggaggagatgcccgaggaataccgcgcctgcgccgagcgggagggcgtgggccgcgcggtctgcgactacgtcgcgggcatgacggacaactacgccgtgcgccgcttcgaggagctgttcatccccgtgcaccaggtgctcctctgagcgccgcaaaaggccgaaatttgggcgaacggagcgcccgcgcgcgaaaaccattttttaacccgagggaaattccaaaaccgtgaaggattttgctcgaatttcgcgaatatctctatcggttcgttttgcgggccgcggttgcactttgggaaaggaggcgcggcagtccccatggcaggcaggttccccagcgagtggatcgacgaggtgcgcgaccggtcggacatcgtctccgtcgtgtcggaatacgtgcccttgaagcgcaagggcgcaaagttctggggcctttgtcccttccacggggagaagacgccctcgttttccgtggatgcggagcggcagctctactactgcttcggctgccacgcgggcggcaacgtcatcacctttgtgatgaacatggagcgcatggagtttccggaggccgtcgtgcacctggccgagcgcgcgcacatggaggtccccgagcgcacgggcgcggaccccgcgccgaagaaggaccgcgaccggctctacgcggcgctgacggcggcggcaaagttctattacaagacgctctactccccgcagggggagcgggcgctccagtacctgcacggccgcggcatccgcgacaacgtgatccggcgctttggcctgggcgcgacggccgccgggcacgcgagcctaacgcagcacctgaaggagcagggcttctccgacaaggagctgatcgaggccaacctcgccctggagcgcgggggccgcgtgttcgacaccttccgcgaccgcgtcatgttccccatctttgacccgcgcggccgcgtgatcgcctttggcggccgcgtcatcggccagggggagcccaagtacctgaactccggcgacacgccggtgttcaacaagcgccgcaacgtctacggcctgaacttcctcaagggcggccggcgcgaccggctgcgcctggtggagggatacatggacgtggtctccctctaccagcacggggtggacgggtgcgtggcgacgcttggcacggcgctgaccccggagcagatccgcctgatgaagcgctacgcgcccgagatcctgctcacctacgacggcgacggggccggccagcgcgccatcgcccgcggcctggacctctttgaggccgagcgggtgcccgcgcgcgtcacggtcgtgccggacaagatggacccggacgagttcgtccgcgcgcggggcggacaagccctggaggagctggggagcgtggacgcgacgacctaccgcctcgacgcgctccgggcgcagtttgacctggacgacgccgaggcccgcgcgcgctacgcggtcgagggcgcaaaggtcatccgccgcctggaggacccggtggaggtcgagcggttcgtcggccggctccacgaggagacgggctttacgcgcgaaacgctcctggagcaggtgggcaagcgccccgccccgcaggacgaggcgcggcgcctggacgccgcccagcccgacggaatggcgcgcgcgcggcgcggagagactaaagcggaggacggcgccctgcgcgccgagcgggagctggcctcgctccttgccgcgggcgagcgcgtgccggaggggctgatccgggaggaggacttcacggacccggcctgcgcgtttgtggcgcgcctggcgctctccggcgggcgcagccgcatccaggaggcgctcgagcaggtggaggacgaggcgctgcgcggcgacatcacgcgcctgctcaccacgggcgagcgcgtggatcccgagcgccggccgcagatgatcgccgactgcacggaccgcctgcggctgcgcaggctggaaaaggagatcgacgactgccaggcgcgggccgcgcggccgggccttacgctgcaggaacaggtggaattggccacgcgattgaaccagctctacgaccaggtagagcgcctgcgccgcggcgcaaagggaggcgaaccctgagcgggcgctgcggcagggaccagggaagaaacgcgccgggcgcatggcgcccggaaggctttgacatagacggctggcggccccgccatggggcgtgtgcacaacccgaaaggagtgacacttttgtcgaatacggacaataagcaagctcgcatcaacgcgctgattgaaaagggaaaaaagaacggcgtgctgacgcagaaggaactcaacgatgcgctgtccgaaatgcagatttcgcccgaggcctatgagaaggtgctcgacagcctggaggccatgggcgtggacgttgtgagcgaggtgaccgagcccccggaagaggaattgatgatggacgacggcgaggagttctcggcggaaaacgaggacctctccgtgccggaggggatcgcgaccgacgacccggtgcgcatgtatctcaaggagatcggcaaggtgccgctgctgacggcggaagaggaattggagatcgcccagcgcatggccgccggcgacgaggaggcgcggaagaagctctccgagagcaacctgcgcctggtcgtctccatcgccaagcgctatgtcgggcgcggaatgcagttcctggacttgatccaggagggaaacctcggcctgatcaaggccgtggagaagttcgactactccaagggctataagttctccacctacgcgacctggtggatccgccaggccatcacccgcgccatcgcggaccaggcccgtaccatccgcatccccgtgcacatggtcgagaccatcaacaagctcatccgcgtctcgcgtcagctcctgcaggaatacggccgcgagcccacgcccgaggagatcgccaaggagatgggcgtatccgaggaaaaggtgcgcgagatcaccaagatcgcgcaggagccggtgtcgctggagacgcccatcggcgaggaggaggacagccacctgggcgacttcatccccgacgacgacatccccgcgcccgcggaggcggcggccttcaccatgctcaaggagcagctcaccgacgtcttggacaccctcaccccccgcgaggagaaggtgctccgcctgcgcttcggcctggacgacggccgggcgcggacgctggaggaggtcggccgcgagttcaacgtcacccgcgagcgcatccgccagatcgaggcaaaggctctgcgcaagctccgccaccccagccgctcgaagaagctcaaggactttttggaatgatttttgcagcaagagagggacaaagactgcggtctttgtccctctcttgctgtgcgtgccccccgcaaggggcggcctgcgcccgccccttgcgggggaccgcgggttggggcccctgccccaacccggcgcacccgggcaggggtcgcgggccggggcggcggcctccgctcccagggatcgcttgacgcgcgcgcgcccggacggtagaatgagggagagagaacgggaaggagggaccgccgatgctgcagctggacgcgcggctcgctttggccgaggatctgctcgggcggtgcgagacgctgtacgacatcgggagcaaccacggcttcctcgccgtgcacatgctgtggaccgggcgctgccggcgggccgtgctctgcgacatcagcgccaacgcgctctcccgcgcgcggggattggtcgcgcgcgcgggccttgccgaccgcgcggccttcgccgtgacggatgggtttgcagggctcgacccgcagccgggcgacgcggcggccatcctgggcatgggcggaaggaccatcgccgccatcctgcgcgaggggctgccctgccccgtggttttgcaggcgaacgtggagatcgcctgcgcgcgccggcgggtggagcaggctggcatgcacatcgcgcgcgagggcgtggcccgcgcggccggtcggctctacgtcgtgatgcgggcggagcccgggccggcggcgcccatgagcgaggccgagctccggctgggccccgcgctcctgcgggacaagccagagggcgcgcgcgaatacctgctctggcggcagcgcgtcgcggcgcgggctctggagggcgcgcgcctgggcacggacgcggagaaactgcggcacgccgaggcggaattcgcctgcatcgaggcggcgctgcggcgcatggaggaggaagaagcgtgaagatttcggaatttttgcagatcatcgacaccatcgcgccctgggagctggcggaagcatgggacaaccccggcctgctcgtgggcgatccggaagaggaggtcacgggcgtgctgctgtgcgtggacgcgacgcccgcggccgtggactgcgccgcggcgcgcgggctgaacctgatcctcgcgcatcacccgctgctgttccgcgggacaaagcacctgcgcgcggacgagtacgagggcgcgctgctgatgcgtctgatgcgccaaggcatttccctcgcggccgcgcacacgaacctggaccgcgcgcccggcggcgtgaacgactgcctggcccaggcgctcggcctgcgcgtggaacagagcgaggactacttgcgcgtcggcgcgccgggggtgcggaccgcgggcgagctggccgacctggcgcgcgcaacgatcaaccctcaggccgtgttctacggcgagcgggaccgcgcgatcgactgcgtcgccagctcctgcggcgcgggcggcgagtttttcgccgaggcggcgcggcgcggggcgcaggtgttcgtcacgggcgagatgaagcacaacgagcgcatcgaggccgaaggcctgggcctgagcgtgctcctgctcggccatggcgagagcgaggccgtggtgctcgagcccttgcgggcgcgtcttgcggcgcaggtcctcgccgaggtctttgcgccgcagcgatcgggcgcgaggggctgacgaaaccggggagagcggcgcagactccggcgcgggagcaaggcgggggagtgggggccgggccgcgacccgcagcgccgggttgtcgagggtcgcggcccggccccccgtccccccttgggcgtgcagggcctccggcccggagcggccgaggggggacattctcccccgggggggcaaaaaggcgcgcttttgcgttaaaatttcacgatcgcttgacagcgcgcgggaaaaggggtatactattgcatgttgaagcagaagcacccgcttctcacccgcgcggcaccgtcgccgggtcacaatgcaagcacatgcagaaatgagagctgtgaaagcgggtggagtctgtctgcccgctttttttgcgggaaaaaatttggaccgcatacggaggtgcatcggaatcaatatggacatgatgatcaatgaagaaatccgcgacagggaaatccgcctcatcggcccggaaggcgagcagctcggcatcatgtcggcgcgccaggcgctggacatcgccgaggaaaaggagctcgacctggtcaagatcgccccaacggccaagccgccggtgtgcaagctgatggactacggcaagtaccgctttgagcagtccaagcgcgaaaaggaagcgcggaagaaccagaaggtcatctctgtcaaggaggttcgcctttcccccaccatcgaggagcacgacatgcaggtccgcgtgcgcgactgcgtcaagttccttcagaacggcgatcgggttaaggtctccatccgattccgcggccgcatgatcacccactccgacgttggtctccaggtgatgaacgagttcttcgctcgggtcaaggactacgccgtccaggaccgcaagccctccaccgagggccgcaccatgacgatgatgctctcgcccaagcaggacaaatagttcatagaaatttccccgaaagagaggaggaacttccccatgcccaagcagaagacgcacaagggcgcagcgaagcgcttttccgtgacgaagaacggcctggtcaagcaccagaaggccttcaagggtcacatcctcaccaagaagagcaccaagcgcaagcgcaatctgcgcaagaccggttacaccaccgcgacggagggcgcgaccatccgtcagctcattccctacaagtaagaaaacctcatgtggttcattctaaaggaggcaggaaacaatggccagaattaagatgtcggtcaacgccaagaagcgccgcaggaaggttttcaagcttgccaagggctacttcggggcgaagtccaagcagtaccgcgctgcgaccgagcaggtcgcccgctccctgcgctacgcctatatcgggcgccgtctgcgcaagcgcgacttccgcaagctgtggatcgcgcgcatcaacgcggcggtccgtccctacggtctgtcctacagccgcttcatcaacggcctgaagctcgcgggcatcgaggtcaaccgcaagatcctggcggacctggcggtcaacgatccccaggcgtttgccaagctcgtggacgcggccaaggcgaagatcgcctaagcgcttttccgcaaaaaaagagggtccgaccatgcgtcgggccctttgtcgtaagaaaaaggggggttccgagatggagctgccggttctgtccagcacggccaatcccgccgtgcgcgccatgcgcgccctggaggacggcaaggcccggcgggagacgggctgcatgcgcctggaggggcgcaagctctgcgccgaggccgcgcgcgagctggaggtgaccgcgctcttcgtgcgcgagggccgggccgagctgtacgcggacctgatcgcagcctgtacgcagaagggcgcgcgcacctgggcggtcagcgaccgcgtgctcgagtacgtctgcgcggccaagacgccgcaggacgtggtcctgtccgcgcgcatcccccgcctggcgctgcggggcgggccgctggtcgcgctggacggcgtgcaggacccgggcaacctcggcgcgatcgtgcggacgtgcgacgcggcgggctttggcggcgtggtgctcggtccgggctgcgcggacccctatgcgcccaagtccatccgcgccacgatgggcagcctgctgcgcatgcccatggagaaggttccggacctggccgcgtggctctccgcccggcgggacgaggggcgcgccctgctgctgacggcgctggacggcgaggacttcttcggccgcggggcgctgcccccggacccgatcctcgtcatcggcagcgagggccgcggcatctccccggcggtcgcggcctgcgccacgcaccgctaccgcctgcccatggccggcggcgcggaatcgctcaacgccgcggtcgccgcgggcatcatgatctacgacctctaccgcgtgcagcggcagggcgaatcctgacaaaatggcttccaccacgcggtggaagccattttgtcctgggaaaagcgctttagcgcatggcgctgtagcggtaggtctggaccatgtcccccttgagggcgaagccgagcttggggagcacgtccgagagggcagccagcgcggcgagcatgtcctcgtcgttggccgcctcgcccatgtggccgatgcggatcaccttgtgcgccaggacgtcgaacgcgccggcgagcaggatcttgtggtcgcgcaggagcgcggagaggatgtccgtgtccgtcagcccctgcggcacgcggaaggccgtaaccgtgttggaaaacccgtccttgaggtagagagagaggccgccggcgaccagcgcctcgcgcacgcccgcggccacgcgcgcgtggcgggcgaagattcccggctcctcgagcacgttgtccagcgcgcgggcaaagccgtggatgtcgcaggcgggcatggtgtaggggaaccactgcttctcatagtagtcgcgcagggcgagcaggttcgcgtagaaggaggcgatgggcgtcttgcgcgcctccatgcggcggaaggcgtcctgggacacggtgaccatggtcagccccgtcgggcaggagagcgccttctgcgacccgcccagcagaatgtcgatcttggcgcggcgcgcgtccacagggttgccgaacatcccggacaccgagtccacgaccgtgaggattccgtattccttcaggatcgggcagagggcgtggatgtcgttgagcacgccggagggcgtgtcgcagtgcacgagcgtggcgtagcggaagtccgcgtccttcttgaggaaggcgcgcagggcctcgggcgcgatcggcgcgtgggggtccgtggaaaagagcacgggctccccgccgtagatgcgcacaaagtccgcaaacccgcggccgaagatgccgttgtccagcaccagcacgcggtcgcccggctcggtcagcgacgcgcaggccgcctccagacccagaatgccctcgccgctgagcaggaaggaggggttcgccgtgttcaggaagtgcgaatacttggcgcaggtcctcttgtagaagtcatagaactccgggtccaggtctgagttcccggcctggatcgcgcgggcctcgagcacgtttttgcggaccttgctcggcccgggggtgagcatgttgtaatcgtacatgggatttgacctccttggtgggcgcgcagcgcgcctcttttttcatgatagcgcaaacgcgcgcatttgttaagcgcggatttggcgaaaattttgccgcagggccgtttgcgcgcaatggaattgaccacggcgcgcatttgtggtacgatagcagaagattcctgcgcccatgcggggcgagacaaagggggaaaaacgcaatgaagaagatcaaggcggcgctcgcgctggtcctgctcctggcgctcgcgctcgcggcgacgggctgcggcgcgcagtcgctgatcatcggctcctgggtggacgacacgcagtccctcaccatgcagctgggcaaggacggccaggcgatcgtcacggcctacaatttcccgctggaggtcacctacacctacgagggcgacgtgctgaccatcctctattccgaggacatcacggatacgggcacggtcaccttctacggcgacaacgagttcgtctgggagaagacggacgaggacggcgagctctactgggagacctacacgcgccagggctgacgcgcggggacagaaagcggggcgaaggattgcaaagcaacccttcgccccgcttttcgcgcgcccgggggaaaagcccccgcggcggcccttaggctctgcgcagtttgcggatggccaggaccagcgcgacgatggcgagcgcgcccacggcggcgcaccccaggaaaatgaggaggttcagaccgtgcatcaggagggagacgggatttggcgccataccttcacgctcctttttttgaaaaaatgcgggaactcctacctatagaatagcaaaatttccgcgcttgtcaaggcgttttggcgaaacctgcttgacaaggcgcggcgcatgtggtataacgggagcagttggctgggatgagttgcagtaagcgccccttcggaaatcccacaagagaacgtccgccatcggctggaagcggacggggaggggaggacgcgccgaagttcgcctcggagccggctcgggtgcgcccgctacagcgcgcgagaggccgcgcatgtgcgccaaagggtttgcgcgcaggctgcggtgaatttgggtggtaccacgttggagctgacggcccctgcgtcccaatggggatgcgggggcctttttttatcccgtggaagccgaaaaacgagagggaggaaccatcatgcaggagaaactggacgagatccggcgcagcgtgcaggagcagcttcttgccgccggggacagcgcgcaggtcgagcagatccgcgtttccgtgctcggccgcaagggcgagctgaccgcgctgctcaagggcatgggcaagctcagcccggaggagcggcccatcgtcggccagcaggtcaacgccctgcgccaggagatcgaggccgcgctcgcggcaaaggaagcggagctgcaggaaaaggagaagcaggcgcgcttggagaaggaggcgctggacgtctccatccccggaaagccggtcaaggtgggcaacgtccacccgctttcttcgaccctggagaagatcatcacgatcttcacgggcctgggcttttccgtggtcgaagggccggaggtggagctggatcactataactttgagctgctcaacctgcccaagaaccaccccgcccgcgacgcgcaggacaccttctatttcaacgaaaacatcctgctgcgcacgcacacctcgcccgtgcaggcgcgcaccatgctctcccagaagccgccgatccgcatcatctgcccgggccgcgtctaccgcgtggacgagctggacgcgacccacagcccggtcttctcccagtgcgagggcctggtcatcgacgagggcgtgaccatgggcgacctcaagggcacgctggacgcctttgcgcaggccatgtacggcgagggcatccaaacgcggttccgcccctccttcttcccgttcacggagccctcggccgaggtggacgtcacctgcgcggcctgcaagggcgcgggctgccgcatctgcaagggcaccggctggatcgagatcctcggcgcgggcatggtcaatccgcacgtgctggagatgtgcggcatcgacccggagcgctacacgggctttgccttcggcatcggcatcgagcgcgtcacgaacctgaagtacaacgtgccggacatgcacctgctgtttgagaacgatctgcggttcctttcgcagtttggaaaagggagggtctaaggaatgctcgcaccgctttcttggctgaaacaatacgtatccatcgacatggcgcccgaggaattcgcccgccgcatgatcatgaacggcaacgcggtcgaggaggtcgaaaacctcgccgccgaggtcgaaaacgtggtcgtgggcaaggtcctgtccgtcgcgccgcacgccaactccgaccacctgcacatctgccaggtggatgtcgggcagggggagcccatccagatcgtcaccggcgcggacaacatggccgcgggcgactttgtgcccgtggcgctgcacgactcgcacctgcccggcggcgtgcacatcaagcgcggcaagctccgcggcgaggtctccaacggcatgatgtgctccggcgaggagctgggcgtgcccgcggacgtctacccctccaacgtggagcacggcctgctgatcctgcgggaaaaggacctcgtgcccggccaggacatccgcccggtgctgggcctggacgacgcggtcctgaactttgagatcctggccaaccggccggactgcctgtccatgctgggccttgcgcacgaggccgcggtcgtcaccggcggcgcggtgcaggagccggcctgtgacgtcgcgcccgcgggcgagggcacggtcgaggacctggtggacgtctccgtcgaggcgccggacctctgccgccgctactgcgccgcggccatccgcaacatccatatcgcgccctcgccgctctggatgcgccaggcgctgcacaaggcgggcgtgcgcccgatcaacaacgtcgtggacatcaccaactacgtcatgctcgagatgggccagcccatgcacgcctttgacctggaccaggtccgcggccgcaagatcctcgtgcgccgcgccaaggacggcgagaccatccagaccctggacggcaaggaccgggagctgacgcagaacatgctcgtcatcgccgacgccgagggcgcgaccggccttgccggcatcatgggcgggcaggagagcgagatcacggagaacacgaagctcgtgctctttgagtccgcgtgcttcgactccgcctgcacgcgccaggccggccggtccctcggcatgcacaccgaggcgcagggccgcttcgagcgcggcgtcaacgagcgcctctgccgcaaggccctggagcgcgccctgcacctgatgcaggagctgggcgcgggcgaggtcgtccccggcgtgatcgacatctacccggaggagaagcccctgcccgtcgtgcgcgcca

SEQ ID NO: 934 - DNA, 10285 bp, Unknown
  16S sequences of unknown bacteria
caaataggctttacgtacttgttcgttgtttgaaagctctttggcgtcgccgctcatcacaacctgccctgtttccaacacgtaggcacggtttgcgatgttcagcgccatctttgcattctgctctaccaacaataccgtaaccccggttttatttacatcctgaataatgctgaaaatttcctgtaccaaaattggggacaaccccatcgaaggctcatcgagcagcagcatttttggtttgctcatcagcgctctgccaatggccagcatctgctgctctccgccagacagcgtaccagccgcctgctttctgcgctcctttaggcgaggcagccgctcaaaaatacgctcgtattcctcgtttaggttttccttgccatttcggatgtatgcgcccatttccaggttttccatcaccgtcatattggcaaacacacgacggccctccggcacctgggccagacctagctttggaatcttatacgcatctgtatgcgtaatttcctttccacaaaagtggatagagccgcttttgggctttagtaatccggaaaccgcatgcaatgtcgtggttttccccgcgccgttcgctccgatcagcgtaatgatctccccttcattgacttcaaaggaaatattcttgatcgcgtgaatggcaccgtaatatacgtttagatccttgacctctaacattgccatgcttattcccctcccagataggcagcgatgaccttgggattgctccggatttcttccggcaggccctccgcgatgacttgaccgtaatccagtacatacaaccgttcgcaaatattcatcacaaagctcatatcatgctcgatgagcaaaatcgagatcccgtaccgaatctgaagcacctgaatcgtctccaaaagctcacgcgtttccgtcgggttcatgcccgcggccggctcatccaacagcagcagtttgggatcggtcgccatggcacgtgcaatctccagtttacgctgctttccgtatggcaggtttttggcatctgcgtcggcaaattcatccagacctacgacctttagcagctcgtgtgccttttcgtcgatttgcttttcggctttccaataggatggcagtcggaacatgcccgccaccatggaatatttcccctgcggcgtcatggcaatttttacattgtccaataccgaaacatccttaaacagacggatattctggaaggtacgtgcaatgccgttctgcgttacctggtaggtctttttccctaccaagctttcaccctccagttcaatggttccctctgtgggtacatatacttctgtcaaaaggttgaataccgtagttttccctgcgccgtttgggccgatcaaccctacgatctctcctttgttgaccgttaaatttacatcctgcaaggcctgtaagccgccaaagcgaatacccagcccttttgtttgcagcaatggcatcgcttacacctcctctttggcgggctttgcttccgtcttttccccgccgccttttcctttgcgcctgatgcgatctatcacacgtgtcagcgaaaactcataccgacccagcaacccgttgggcttaaagagcatcatgacgatcaaaacaacggaatagagcagcatgcggtaatcagagaatccgcgcagcgcttctggcaatattgtcaatacaatggccgccaaaatggagcccgtcgtagaacccatgccccccaatacgaccatcaccaaaaactcgatggaatagttgaaatcaaacttggtaggattgattacgccgatatgatgcgcatacagcccacctgccacgcctgcgatggctgctgccagcacaaacgccatcatcttgtagtatgtggtattgatcccggaagcctctgccgcgatctcatcctcgcggattgcaatgaccgcccttccatgacgggatttgacaaacgtcgtcacgataaagatcgtaatgaccgctgcaaaaaatacccatgcaaacgttgttaggtttggaatgccgcgcatgcccagcgcaccgccggtaatatcaagattcaggaagataacgcggatgatctccccaaagcccagcgtaatgatcgccagataatctccgcgcagatgcagcgccggaatgccgatgacaatgcccaccacagcggacaccacccctgcaatcaacagcgccagcggaaaagaaaccgccgccggcagatccaccgtcgtcgtaaaaattgctgcggaaaacgcgcctaccgacatgaatcccgcatggcccagcaccaattgtcccaggtatcccgtggttagatttaagcttaccgccatgatgatattgataaacatcatggtcaaaattccggaatagtatctatcaataacgccggcgctcattagcagggacaaaaccacatacagcgccacgaccaagaccgcatttcggagataggcaaacatcgttttctttttcatcgtctccccctcctcatactttctctgtcgcatgcttgcccataataccggacggctttacaagcaatactacgatcaaaataccaaataccacagcatccgccagctgggtggaaatatatcccttggtcaaactttcggcaatgcccatgatatagccgcccagcatcgcgcccggaatgtttcctataccgcctagtactgcggccacaaacgcttttaagcccagcatcgatccgataaacggcgttatcatcggataagaagcgccatacagtaccgcgcccaccgcggcaagcgcagcgccgaggccaaatgtgaaggcaaccgttccattggtattgattcccatcagcttggcggcccctgcgtcttcggaaaccgcccgcatggctttgcccatcttggtcttattgaccaaaagctgcaacccaatcatcaataccacagaagcaatgattgttacaatggttaccatcgaaatctgcatgctcccaacagaaatcggcggcgcatcgatgatggcggggaatgccttgcccgaagacccaaaaatcagctgcgccaagttttgcaaaaagatgctgacgccgatggctgtaatgagaagcgaaatgcgcgctacattgcggttcaaaagcctacggtatgcaatgcgttccatcaagagcgcaatgacgacgcaggccacaatggagccaagcactgccaccaccagaggcataccgcccatcaccaggaccacataggccgcatagccgcccaccatgatcaaatcgccatgggcaaagttaatcagctggacaatcccgtataccatgctgtatcccagcgccaccagcgcatagatactgccaacgtgaagtccgttgatgatctgtgataaaaagtccaacctcgtcacaccttactttataaaattagctggccctacatcgcaaggttttctttaggatgcaaaaagccttccgatgcagcgcctgccgtcatacttgtccataaaacacgaatccgagagagggcctgggccccctctcgtctacgcgtttgtttcggttttttcctaaagcttattcgctcttttcgtagctttccacatattcggtggtgccgttggtcagcttgttgatcattacgcccttgatggggttgcgttcctcatcaaagatgatatggccggtcacaccatcgaattggatattcttcatagcctctaccacagcagctttgtccgtgctgcctgcttcctcaatggcctgcaccagcagataagccgcatcgtagccctgtgcggagaatcccttcggcgcttcgccgtatttgtccgtatatttctggataaactcctgtacttttgcatcctggctctgcaaggagaacccgcagcagtacatggcgccttctaaaacgctcttatcctctaccttatccagcacgccgtcccagccgtcggcacccagcagctgtgcggaaatgccggcggattttgcctgctgcacaatcagcgccacatcttcataatagaccgggatgaacaatacatccggattctggccggcaattttggtcagctggctcttaaagtccacatcgcccttggcatagctttccttggcaacgatttgcaggcccagcttatctgccgtagaaacgaatgcatccgtcagccccacagagtaatcgtccgaagcattgtacaaaatggcagccgttttagcgcccaactttttataggcataatccgccatcgtctcaccctgatacggatcgataaagcagacgcggaacacattttctcccgccttggtaatgtccgctgccgtaccggtcgccgaaatcatcgggatgccatccttggcagcctgctgtgctaccgcaatcgatgggttgcttgtcacatcgccgatcaaagcgtcgatctgatcgctctggatcagcttgttgtatgcgttgacagcttctgtcgcatcgcctttttcatcatatacgatgtactcgatctgtttgcccagcacgccgccggccgcattgatttcatcaatggccattttgaccccgttatccgttgcaatcccgtaaatggacaggttaccggtcaaaggcgccaggccgccaatcttgacggtatcagcattggacgtttgtccctccgtgccaccgccaccacagccaaccaagctggcaaggctcagcatacataccaaagccagtgccgtaatgcgttttttcatcgtactctcctcctgtactctatgaatattgaaatcccggtaggccgggcctttcatttcctggcgcatggtgcataattattctttttattccctacaattatacaccataattatgccttattttttgaatttgggtattataatactgcattgctatccagttttcaagactttcttgccgtgattttagatattgtacaaatattggcagccagggcttgccctttgtggccgagcgcgtttatacaccctctttgacaaaataccattattcattttattatgcatctctcgtagtttgacactacagctccttttttgtatactcaaatatgaaactgaatttcaatttcatatttgaggtgaaaaccatgtcctcttcttccggctatcatacccgccagcgggatcagattttgcaatacctgatcgcccatcagcatgcccatgtaacagccgaccaaattgccacacatctacgaggccgccagttttccattggcaaggccacgatctaccgctatttggataagctcgttacccagggccgcgtgcgcaaattttatttagaggaaggcgccagcgcatgctatcagtatatcgatgaatccggctgctgtcaggagcatttccatctaaaatgcgtggattgcggcgctttgattcaccttcgctgcgataccctctcccaaatccatgaccacatccgccaggagcatggatttatcatcgatccctcccgcaccgtattttatggccagtgtgccgcctgccgggaaaaacagggcgggcaataccatggctaaaaaagcgttctctttcctgctggccctctgtctaacactcggcattgccggctgctctgcctcgacgcccgcgcctacggcccaggaagaaaagatccggatcgttgccacccttttccctcagtatgattttgccaaagccattgcaggcgataaggcagaggttacgcttcttttgccgccggggatggaaagccatgcctatgagccgacgccgcaagacgtgctatccatccaccaagccgatttatttttgtataccggcccggaaatggagacttgggcgcagagcattgtagagagtctgccggcggatgggcctcttgtcgtcaatgtttcccagggcatcgtcttgacctccgtagaagaagagcatggccattcccatgatgatggccatcaccatacctatgatccacatatttggacagatcccctgcaagccaagcaaatcgttcagaatatttgcagcgcgctcagtaatcttgatacgcaaaacgcggatctctatcagcataatacacaattatacttagcccagctcgatgcgctggacgaggcctttcgcaccgttgttgcacaagggcgccgaacagaaatgattttcgggtctcctttttccttatattattttacccagcgttatggtctttcctacgaagctgcctttgacagctgtacaggggaatccgagcccagcgtagctaccttggtacacttgattgaacacatcaaacaggcgcagatccctgtcgtctatatcacagaactcagcgaccccaagatcgcacagtccatttccgaggaaaccggcgccgagatcctgcttttccatgcttgccataacgtttctagggaagattttcaaaacggcgtttcctacttatccttgatgtggcaaaatgtagagcacctaaagaaagggttacaatgaatagtttaatccaatgcaaaaacctcacccttcagtatgatcggcacatcgctgtacaaaatgtaagcttttctgtggagcctggtgattttctctgcattgtcggggaaaacggttcaggcaaaagcactttgcttaaagggcttttagggctgctgccgccgcatgatggccaaataagctatgctccttctctctctcgtactgccatcggctatgtaccacagcaatccaccgtgcagcgggatttccccgccaccgtttgggaaatcgtgctgtccggttgcttagcgcgccgcggtaaacggccctttttctccgctgcggaaaaaaagcgggcccatgcatccttggaacgccttggcatcgcagacttgtgccgtcaaagctaccgtgccctttccggcggccagcagcaacgggttttgctggcgcgcgccctatgcgccgcggatcagctgttctgcttggacgagcctgccaccgggctggatccgaaagccaccgcttctctgtatcagctcttgcattccctttgcgggcagggcatggccatcgtcatggtatcgcatgacctggacagtgcgctttgctatgcaaagcatattcttcatatggatacgcattccctgttttatggcacagccgacgcataccgggagacggcgctttgccatcgttttttgggagggcctgcccatgtttgaagtattgtctaccctgttttcctattcctttatgatgcgcgcgctgcttgccggcgccttggtagccttatgcgcggcgctgctgggcgtcagcctggtactcaagcggtattctatgatcggggacgggctgtcccatgttggcttcggcgctctttccgtggccaccgcgttaaactttgcgcccatggccgttgccatgcccgtcgttctgctgtccgcatttttgctgcttcgcatcagcggaagcagccgcatcaaatccgatgccgccattgcgcttatttcctcctctgccttggccatcggcgtcatcgctacatccctcacctccggcatgggctcggatatctataactatatgttcggcagtgttctggccatgagccgggccgatgttacattgtccatcgtcctttctctggttgtgctggttctgttcttttgtttttatcaaaagatctttgccgtcacctttgacgagacatttgctaaagccatcggcgtcaaagccaacctttacaaccttctcatcgccgcgctgaccgccgttaccattgtcgtcggcatgcgcattatgggcactctgctcatttccagccttatcatctttcctgcgctgagctctatgcgcctgttccaaagctttaaaggggtggtgctttgctctgccgtgctttctgtttcctgctttgtcgtaggcctaatcgcctccttcctattttccacgcccacaggcgccagtgtggtcatcgtcaacctagctgttttccttctcttttccctcattgcctttatacgccgccgcggttgaaaaaaagccctgtcttcggacagggctttttattatatcgctttataacgcattgcctacatccttgataaactgtttccaagcatccggatgctttacataatataaggggcattcttttcccgtcacatcatagtgccgtattacgtcgttttcgtccaaatgataccgatcgcacagccacgctgtcagctttaccagcgaccggtacgttttgttgttgaatttccccgttttatccgggtggcatacttcgatggaaatggtgtccccatttctatcgttggtggcagaggatttttcatccagcggcacacactgaatgacctcgccctccaagccaacgagaaaatgggcacttaccgttgtatcgtcgttgttgaaataatcccgattctgctgggccgaggtgcctgggtttgccacataatgcaccacgatgttttttaccttccccagcttttcgccgcggcgggcatgtccgttgatctgaatcagctgttgatcgatccattccggaaactctgccccgctgatgttggctggtgcttgtccaaacaaggtccccagccaaaatgaaaaccccaacagggctgtcagccccatagcgcccaaaacgaaccatttcttattcttttcttggatttttctcctcttcttttgtcttgacgtagccaatgaacttctgcctttctcccctattgcatttatcatagcagatttctttgtatacttcttgacaaatttcttttgaattccttacaaacctatgatggtaaggaggctcctctccttctgcgtgcatacggcagataagctgcgccaatggccaaggaaatcagaacgccatcccaatatcctagcgataatccatggacccaggcggccgtccagctcaccagcagcgcatccgtcaacggcgtcagtaaaccggccaagaaaacattcaacggtaagatcagcgtctgtatgaatgggcgtatcagcgtatacaaaaccgtcagcatcaagctgccccacaagggtgcgctgccctgacaccgatccggcgctatggcaaacaaacatgccattacacacgctatgcctatagccctaaacacaatggccttcatactgtctacgccccctttcttcccagcgttttggcctctacccaactacgctttgccccatcctgtatatccacatgcacataggtctgcggcctggactgcatcagcatcagcaaaaattcctgtactgctgccaatgccatgtttacataacccctcgctcttcggggcagtatggccgccaacccctccaaagacagcgcccattgatacggcacatacaaagccagccatacccccaaacgcagccgtggctttccacctgttaaccgcactttgatcgctaggaaccagcttttcctagtccacatatactcgtaccttcatcacactgccatcctggtctagatcaacattgacaatatcctcttccagcgtttcaaacatatcgacaattgcgccaatgttcagggccgtcaggtctatgcccttgtcctttagttctccccttacatcctttggtacacagttcgacaaaatattgtccgcataccgagccagcaccagaggaacactcacgtttacattgatcttcttatccttttccatatatccatttacatcgacccgcagttttttccctctcatccgctgcgcatcctcctgcacgcggacgctctccctttctgcgctgctctccaggcagtccagcagcctggccgcttcatccggcgtaatgcgcccctgctccaacatttccatcactctttgtttttcccgatccattttatttttctcctttgatttcatttaaccgtgccaccgccgtatcggcatcaatttccccatcggccagctgttccaatatttttttccgtttttgctcttttgtctgctccgcttgtgccgggccattgccaagccccaacgcctccagcgctgcatccatcatattcctcaccgtcggatagctgacccctagtgccttttccacctctttgatcgatcccctacagcgtaaaaatacctcgataaattgcctatgcttttcctccagcatacaaaatttacaaggcgcaaaattgcccgtcaattctgtttcgcaatgccggcagtgcagtcttgttacttccatggtctgcccgcataccgggcacttggatggtgcatgatagttcatcgtatcctcctttatgctgaaattataccattataataaataaaatcaatatatttatcaattttatttatattttaatct

SEQ ID NO: 935 - DNA, 8648 bp, Unknown
  16S sequences of unknown bacteria
tgcgcaaagcaataagcagtgggttgggacttgcttgtatcaggagtggtacaagccactcctgataagctgcgaagcagctattcggttatgagcaagtagcgaagcggattgcgaatatccgcttttacctggtaaaaccattccgctgctttacggtcagtgggctgagacttgcttcagaaagggggaagaaggatgagaaaattcagacagtggttgatgatttcttctgttctggctgtgtttgccacaacatccgtgtttgcggaagaagaatctatatggaagtttgatgacgagcaccgggttttgaaagagtataccggtgaagaccgtgaagtaaccgtgccggatacgttgatgggctgtagtgtagacggtgtggggagtaacgccttctgcagcagtgaaattacttctctgacatttccggaaacggtacagtatctgaatacaagtgtggctgcacattgtgaaagcctttcagagctgaagcttccgcagtccctggtcatgatcggagatggctgctttgtggcaaccgcgcttcaggaggtgaccataccggcgaatgtacgtgtgtttggtgagcacgcgttcagcttttgccaggaattgcgcagcattacatttgaaggcgaatgtcctgcttttggaggcgaatgctttgtcgcttgtccggatgacctgacgctttatgttccggatgatcagctggaggcataccaggaggcagtggatgaaatcaaggatatttatccggtcgaggtagcggtcgagccaagcggaaagaatgccgtacccgcggaggcaaaatacgataatgaacactttgtatttgatgcagcgaccggaaccattacggaatacacaggagaaagctatcggctggatgtaccggagacgatcgatggggtaagtgtccggacgatcggagcgaacgcctttaacggaaactggaatctgatttatctgacgcttccggaaggcctgacggcaattgaagatggggcgtttgaaagtgcatatcagctttcctttgtggaatttccgtccacgttaaggacgatcggaaatcgtgcattttacaactatcgtggcggaaagctgatgctcccggaggggctggaacgaatcggggatgaggcattttatcgttgctcggttcgggggacactggagctgccggaaggattgaaggagatcggggacagtgcctttgcgcgcagcatttttatgcgtaccctggatctgccgtcaacacttgaaataatcggggagcatgcgtttgaagatgtatccttatcgtacgtctatatggatggactgacgccccccaaggttgcaaaaaccgcctttgcagaatgtaccagcctggcagatattgagctgaatgaatactgcacgaagcagcagatgctggatatgcaggcgattatcgatgaggccgggttgaactgccgggtatggagatatgaaaatacacagacctcaatggcaaaaggagcttcctatatttataatccaaataattcggatgaagtgtatctggtcggatatgacggagaagagacacaaataagggcctgcaaccggtatcgctttgcggatgatgattataaaccggtaaccggccttggagacggcgcatttgtgggaaatcagacggttacctattatgcggtgactcataatgatgtctttacctatatcggaaaggacgcatttgcagacagcaggattgagcatgttgatttctttgattcggtgacgacgatcggcgtaggcgcctttcgcaactgtacagagctgcaggagctgatacttccggagtcggttacggaaatcggggacggagcgtttcgcggttgtacggggcttacagaggttaccattttgtgcgatctggcactgatcccggaggatctgttttcggactgctcaaagcttacgaaggtaacgatcgcgaacggagcgattccatccggtatgtttgcaaatcttgcttccttgcaggaggtgacgcttggggacggtgtgacagcgatcggagaccgtgcttttgcgggcacgtcgcttgcgagggtggacctgaatcaggtgaagacagtcggagcagaagcatttgcagatgcagggcttacagaagtggatacaagggcggtagaacagatcggcgcggatgcgttccgaaatgcggatatggagcagcttgtaatatcggcaaatctgcaggtcaatgcggcagcgtttgctggtattccgacggaggtgataaggatcagtgatgcggcttcagatgagcaggtgcaggtgtggtccgaagcactggaatttccgtggtacagtcatctgttgcgtgaaagtgaaacatcggcgtttctggagatgccatatcagtcatctccggaggaggactttgaatttgatgcgtccaccggtacgattaccgggtataccggagaagccgtggatgtggtcgtaccgcgtaccatcggcggcaagccggtacgtgtgatcggctatcacgcatttgatgcggcgaaggattataccgatacggaaatgtcgacgaatcggacggagtgggtgcatatcagatccattgtgattccggacactgtgcggacgatcgaggacaatgcactttcctatctgcagcagctggagctgtttgtcagctatgcaccgcttgagacgaccggaggaacgcagttcatgctttgccgaagcctgaaaaatgtcatttttgtcaatccgcttaaggagctgggcaattatctgtttgagagctgtgatgccctggagctggtgtggtatccgaatacactggattccgtcggtatacagtgcttttcacaaagcaagattgatgctctggtgatcgatgcaaaggtgattaattattatgcatttgcaaggtgtgataatttgaaggaaatccatctgcgcggcagtctggaatccctggatgtcagtgcatttgcagaggttccgcttgaacggctgtgcctggagacgaccaatccggatgtgattacggagggatacttcggagcaccgcttgagagcctgatggtcattgtgccggaaagtacgacagatgaagagctgaacaactttgccagaaagtttgggccggcaggaaaaggagtgatacaaaatcaggatcagatcgttcgcggtacgtgtacgcagccggatccgattccgagaccggatgtggatgcattgctttcggaatatggaattcatcagggctgagctccttttgcagggcatgcaggaaggcagtaaagcagggaaggggaggaagcgtgatatgaagcaatttctaaaaagaaccatagctggcgcagcctgtcttgcgatggcgctgctgtttgcaggatcagcgtcagcaaagggtgatatttttacgcagcgacagatacttgccgatgaggattgcatttgtggggttatttttcttggttatgtcgacggtgaaaaataccttgcagacgatgaggaataccgcaggcaggtacttgagaacagcggatatacggaggagtttgagtttctgacagagataccatctgatcgtatcgtggagacggactggggagcagagctttactgcatttatccaagacgtgccgatgcggttgtcgcggtgaatgcatgcggatacgaggagtctgaggagaatggatatgatctcgtgatcggcgagatgatgtttgagagcagaagcggtgctccgttcttgttaagatgcaatatcagcgatattatgaatgattgtcaggtgtcgatttttaatccggatggaacggtgctcaactggtcgccgtcgatcagcctgaatgacggatctgtggtattgccgcaggagggaccggcagtctacgatgcaagcagaaaaccggaggccgactatggaggcacagattacggagatacagactatggtaatacggattacggtgatacagactatggtaatacagactatggtaatacggattacggagatacagactatggtaatacggattacggagatacggactatggtaatacggattatggcgatatgaacgatggtgatatcgaccatgaccgatatgataacggaacgatctggcactggagtctgacggatggctgggaggtatatccgacaccggatgcagggcttttatcctaccaggaagtggcgggagacggcaatacgattctgctggattgctcgattgcggatcggcgaatcgtggcgagccggagctttgaagcggacggagaaatccttcgggtcggatgctatgagtatgagacagatccggtctggggatattgtacttcagttaattatgtaacggagctgaccgctacggaagcgtttctcggtggaacggcacagaatccggcggtgatgattcaaaatacggatcagggcctgtacaaggtaaacatctggaccggagaggttgagtggatcataccggcaaaggagctgcagatgagcggatgcatttcttatgtggttgatgacagtaccggaatgatttatatgtgtggctactacgggccggatccggtggcaatttcaccggacggagacattcgctggagggcggatgcagataacgatgatatttactggccatatcatctctctcttgagaatggagtggtagtcacgaggtacggcggttactgtgaatatggcgagtttgttgttgcctatcgacagtaagacggcaaaaatgaatggatggatatctggtaacagaagccttttacagcaatccccggggcccttgtttatggagccccggggatttttgactcataggagacggtggattatccttcaattggttcaaaatctactgctccgtgtttgcaaagcggacagatgatatcttccggaagctcatcaccttcataaatgtatccgcagactttgcatacccagccttttttgccatcagtctgtggctgcggcttcacatgcttctgatagtaagtgtaagtcatggtatcctgctcactcatgacacgggcttctgtgacactgcagatgaacattccgtgtgtacccagatcaacataatgttctaccttgagagacatgaatgcattgatatatttgtccagaaataccaggccgttgtctgcgcggttcactttctggcctgcaaatttatcaacacttctgccggactgaaagccaaactgttcaaaaacagagaacggagcatccacggacaggcagtttacattcaggatacccgtctgctggatcacgtgatgggaatagtttgctttattgatgttaactgcaacgcggtaaggattgtcggtaagctgtgtgactgtgttgacaatcaggccattgtcttttttgccatcgtttgaggttacgacatagaggccgtagccgatgcggaaaagagcggtcatatcatttttgtctgcaagatcgtcacttttggcaatgtattcctgacagagctcgtcggccatagcatccatttgtctgcggttctcttcctttacggcagacatgatcttgacggtcgtattcagccagttgatttttttacattttgaaagcatctctttcatgactttcgctgccagtggcgcccaggttccgttttcgatcagaccgaccgtgcggttctggaaattgtgctcgaccagacgggtaatgaagtcattcatgaacgggtagatgcttgcattgtaagtagtggtcgccagaaccagcttggaatagcggaaggcatcgcttaaggcctgagacatgtcatctcttgcaagatcatacaccactacatttggacatcctttactgcggaatttgtcagcaagctgctgtacagctgctttagtgtgaccgtatacggaggtgtaggcgatcacgattccatcgtcctccggtgtataggaagaccaggtatcataaagacggatgtagtgaccgagatcctcagtaagtacgggaccgtgaagcgggcagatcacctggatatctaaggtggcagctaccttcagaaggttctgaacctgtacaccatattttcctacaatgccgatgtagtatcttcttgcttcatcatcccatggttcctctacatcgagtgcgccaaattttccaaagccgtcagcagaaaagagcactttttcggtactgtcataggtgaccatgacttccggccagtgtaccatcggtgcaaatacaaaagtcaggttgtgtgttccaagggagaggctggagccattgtccacaactattttctgattttccagatccagatcaaagaaattctgcatcatgccaaaggcttttttgttggagacaacggtggtatccggataaaccttcatgaagttcgcaatgttggctgcgtgatccggctccatatgctgtacgataagataatccggcttgcgctcgcccagaacctgctggatgttatcgagccattcgtgggtaaagttggcatctacagtatccatgacagctgttttttcatccaggatcacataggaattataggacatgccattcggaaccttgtactgtccttcgaaaaggtcgatctgatggtcatttacgcctacgtatttgattgtatcggtgattttcatgagcatttcctcttttctttttaatctacaggttgttcttaattttgataaaaatataacagattttgcacgaaaaagttgttgcaaatacaacaaaacacaaaaaatccaagctttacatcatttgagtactgttataaaattagcatgatgatatcctgatttattgatgattttttgtgtgatgttgtttacaaggaaaaaatgacaggaattatgatttactatggtcggaggcagagggatggaacacattacattatttactgatattatgcccgaagagcaggaaagaattcgggtttgctttaaagtccgggaagaaatttttcagaatggcgagacgatcatggagtactccagttccatgaaaaagatcggtttgattcaggacggtcgtgctgtcctgtactgctgcgatgaggatggaaatgagtatgtgatcgatgaactgaatcaggatagcgtgttcggagaaccatttttacttccgtcagatgcccagcactattatgcctgtgcgacaatgcagacgaaagtcctgtttattgattacgagcatgtgatcaaacgctgtgaaaatgcctgccatcatcacagccagatggtcagcaatctgctgcagatgattgcgcttcgatccagacagcagacggatcgaatttatatgctgtccagatccagcaccagaaaaaagctgatggcgtatctgcattctctggcagcagaaaaaggcactaaaaagtataaaattccaatgtcgtacacagccctggcccagtatctgagtgtggaccgcagtgccatgatgcgcgagatcaaaaatctgatggagatgggtgtgctgcgaagaaaaggacggaatgtggagctgctggggtgaaggaaaatccggcaagacatgggacattccgggaaacgcagattgacctgacatttccgcttcctcagcgtttctctgtgtcgctatcttcatcttccagcagcacacaggcacaataaccaggttccggctgatagcagcgaatggtcagtgttttgtcaatttccgggctgtagtcatgaagggtgcgctggacaccgtttaaggctacatctgcgtaagcaatgagccattttcggtctccattttgaaatacctcataaaaggaatgatttatcatgtcttccacaggaactccttccacgactgccatatatttgttgcaatagcggaaaataaaatcgattccatgctcatgttcatcaaaaacaagctcgatgatacagtatgccatcggcatatcatcgaggagactgcatttttcgagaagtgtcaaaggaatgggcggctgttcctgaagggaatgggaattctaacaccagtcagcatcaaccgtacgcatgaaatcttgtccagcgtgtttaacattccactggcaaccggaaccatcaaaaacatggtatcgcgctgtgcggaatcactgaaagatacttatgagcgaatccgtttgacgatgacctcactcggtctgcttcattgtgatgagactggaacccgtgtagatggaaaaacctgctgggttcacgttgcatccgatcaggattatacatatctgaccataaatcagaaacgtggtcagataggcgtggatgctgcgtatgtactgccacatgcccgtggaaccatcgtgcatgactgctggggttcatactggaagtatcaggatgtgacacctgccatctgctgtgcgcatcttctccgtgaattaaacggtgtgattgaaaatcatccggagcagacctgggcggtcaggtttaagaagcttcttctcgacatgaaaaaggtgcgtgataaagcacttctttcagataaggatgaagtcagctactatcaccgccataggtttgatgtggagtatatgcttttcaactaacggggttctgaacaaatacaacaaatgatagagatgagcaaaacacattaattcaaaagtaggacgtggcagttagtttcc

SEQ ID NO: 936 - DNA, 27789 bp, Unknown
  16S sequences of unknown bacteria
ggagtacggcggcgtaactacgcaggaagacgcagagcggttcctggcagacagcagcggaagccatattgtcggcacctttgataaggctaatattgtcatcggaagcggtctttttgtctccgacggattcaccggcccggaatacggaagtaccgattccgacaatcctgctgaactcacgcctgaagacggcgacagcattacgcttctcccgcagattcttggcggcgacggcagcgattatacatatacttggtataaggatagccaggtgatttccggggcaacaggttccagctataccattgaaaactatcaatctccggaagacgatgggctttattccgtcattgtctctcaaggagataatcgcataaccctatattggcaggtaggggagaaaacatcggcacaggatgccgttgcttatctgaatgaaaacggcgatgagcagacgctgacggacgactatacacccgtgacttcagatgtgaccgcttggtcagacggctggtatgtggtagagggagatgtgagcattgacagccgcgtgactgtgacgggcgatgtgaagctaattttgaaagatggcgcaaaccttactgttaatggtggacttctggtgcgaactaatgatagctttaccgtgtatgcgcagtcccaggggactggtgcattgaacgcgatcagtggcaatggcgctggaatcggcggcggcggtgaaggttctccgggagatgattgcgggacaatcaatattcatggaggtataattaaggctacatgctctttcaacggtgctggtatcggtgatggtctgtgggggaatgctacaggcaagattactattacaggcggtgtggtgactgcatccggtacatcgcaggagggtattagcggtatcctgagtacgggggcaaacggaaacgccgtcatttacaccgacggtatcgatccggaaaacagcaatagctggagctgcattttgtttaacagtgatgacaataccggaacagtctatggcacttctgttacggtggatgagagttttgagatcccggaaggctaccaactcacggtcggcagcggccaaaccttaacaataccgagcggcgtcaaactgacaaacaagggtagcatagtaaacaacggcaggatagaaaacagcggcaggatagaaaacagcggcgaaatcatcaatgacggcgggcaaatcacacaaaaccccgttaccggaaactcgccggtcacatatgtcccctatttggatgaaaatggggcagagcaggtattgtctcaacaatatattgaaattaacggcgaaaatcttcccgccgtctggcaatccggctggtatgtcgtcgaaggagaagtgagcatcgacagccgcgtgacggtatcgggcgatgtgaagctgatcctcagggacagttcaaacctcaccgtaaacggcgggattgatgtttccgagggcaacagttttaccgtatatgctcagtcgacaggtgacagcatgggtcagcttactgcagacgcatcgaatgttgattctgtatctggcatcggcggtgagtatggcgacggcggaacgattaccatcaacggcggaacgattgaagcaacgggtggtagatatggatccggcattggcggcggtaacagaggcgacggcggaacgattaccatcaacggcggaactgttactgcaaccggcggaacgtctggcggcgctggcattggcggcggctactggggctccagcggagcaattaccctcagcggcggaattattaccgcaaccggcggtaaaaacgcatccggcattggcggcggctacatggtctccggcggcaatatttccacaggtgagaacggcacagcagtaatttttgcttctttcattcctacttccaacactaccggttggaaaggcttgattttcaacgtaaataacggcaaaatctacggggatagctacaccgtagagggagcactcaccattcctgacggcaaaacgctgacagtagaagacggaaaaacgctcaatggtggtgcaaacattaccaacaacggtaccattaaggtcaacatgggcggaacctattccggcgatcagcccacaaataacaaggtcatctatcagatcgactgggacaccgacggtgacggagatgtagacgaaaccgaatatgttgcctacggcgaaaccccaagccacgaggacggcagcaaggcatccactacggacacggtctacaccttcaccggctgggatcctgagattgtgacggtaactggtacggccacctatacggcccggttctcttccgacacacggacctataccgtaaccgttcccaccggtgaaggatataccatccagtattccggtggcacggaattgccatacaacagcaacttcacattcaccgtggagattgggcaggggtactataagaccgccggcttcgcagtgcaggtcaatggcacggctttgacccctgataaggacggcaactacactgtggaggtactgacggatacacggatcaccgtagagggcgttgcaaaggaatctgcacttgctgcgcccacggtggatactcacggctatgatggcgcgtggaccgctgacaatgtgaccctgactccctcggcgactgccgacagtggaatcgcctactatgaatactccaaagacgatggaaaaagctggacgagtcttacgggtaacagtctgactatctcagagagcgattttgccaaggattacatcttccgggcagtttccaatgcgggcaacgtaagtccggagagcgatccggtcacggtacaaatcgataaggcgaaacccgatgtaacgttcgacggcaacatcactgactatctccaggaggacacgctaaagattatccccatcattggactttccggtatctcccaggtggagctgaagaaagacaacggcgagtggataacgctcaatccatccgccgataacccgaacacctacttctacaccgttacagaaaacggtctgtacaccgttcgtgttaccagcggcacaggcgttgtaggcgatgagaaaagcattacctatgataaaatcgacagcacagagccggtggtgaccatcgattccggcagctatagatccggaaactggacaaacgaaaatgttaccctgtccgtgtctaacacggcaagcaatttgggcaccgccacattctggtacaaggtggataagggtgagtggcaggcatacactgacgacatcattgtttctgaagaaactgacggcacggtatacacatttatggccatcagtgccagcggtgttgagagtgcggaagcttccattaccgtgaaactggataaaacagctccggacggagatgtcgaaattgcagagagttctgtcaaaaagtttatcaacaccattacatttggtctcttcttcaatcaaaatgtggatgtgaccatcaccggaaccgatgatttgagcggcgtagctgctgtagaatactaccgcagcgaggagattctcacagaggatgatgtgttggcgattgaagactggactgtgtactcctctatcagtgagacggcagaagctgcagcgaagtttgtctactatgtgaagatcaccgaccatgcgggtaatgtcacatactttggctccgatggtgtgacatttgacctgaccgctcccgttatcgagggcgtgacaaacggtgcaacctattatactacgcagagtgtcaccgtttctgacgcaaatttggagtccattacactgaatgacgaaacggttggcgaaacctttaccatcgagggtaacaaagaggagacctatacaatcgttgccaccgataaagcagggaacaagacaacttatacggttacaatgaaaccgattgcaagccttgcagagacgatagaagagatcaacaccggcaatgtgacttccgaggacaaggaaaccgtggagacggtgaaagaacagatcgaatccatagatttggaagatgctaccgaggatgaaaagacagcgcttcaggagattcttgacaagtgcaacgagctggttgaaaaaatcgaagaatctgtgcaggccggtaataccgaaaataccgacaaagtagaggatattactgccgacaatgtcaaaccggagaacaaagacgatctgactgcagcgaaagaagatttggaaaatgcccttgaaaactttggtgataactacaccgaaggggaaaaagctgaaattcaggataaactggaccaaattaacaaagcgctggaaagcatcgaaaaggttgagacggtggaggatgccatttccaaactgcctgatacggtagagccggacgacgccgaaaccgaagcattgataaatactgcaaaagagcagtatgacgcgcttaccgatcatgaaaaatctttgattcccgaggaactgaaggaaaaactggaaagcctgctcggtgatctgctggactatcgaatcattgaaggcgatggaagtaagtggacactcggagatgacgcttccctcaccataactgccaacggctctgttgagaaattcacaggcattgaggtagacggaaaagcggttgatgcagcgaattatacagtgaaatccggaagcaccataatcagcttgaaaccggaatatctgaatacgctgtctgttggcaagcatacactgaccgtgatctacacagacggtgagacatctggtgagtttgagattttaaaggatactgaaacaccgacaccggataccggcgacagcagcagtatggtattgtggattacactcatgttcattgcagtctgcggtttgagtggtgctatggtttacggtcgaaaaaagaaatatggtaaataatttctcgataacctaatgcgcacccccataatgcgatgcaccccctaaagccaaagggggggtgcattgtatcaaaataagggttatttgccataaaaccgccgattattcggcggtttttaatttgcatgacatcaattatagattttttcaaaatatgacaccatttttgctctgtattctgtctttttatcagggaatgtatgcagataaatttgctctagcattttttagaagaatgtcccatcatctcggcaatgtatcttaagggaactccttgtaacatggcctgcgatgcaaaataatgacgtagctagtgaattgcgatatttttgttgcccgaaaggaaatatccattccggcagtctccacggcgccgaatcgcctgagactgtgttgcagcgccttatggtgaacatatgctttgcgcatataaaaaaagctgtatgctatactgtgcataccgaagaacaaagcaggataaacaagagcatgcatggcgaaggaaagcatgtatgctgcgcttcaacgacggggcgtgggaggaatgtggacgttcttgggcacaggaacaggaaagtaaaaggatgggcgtatcgatgatagatttaaagagctggtgtgaaagccgtcattgggaagagctgcttagctgttatatggacgcggacaacccgctgccgccggaatgcataggcttttcgtccggcaaactggtcgagtggaaatgccgcgtttgtggacaaaaatggtatgctacccccaataaaatgaaccgaaaacgccaggatcggacggtatgcccgttttgcagccatgaacggccaagcgcattttacaatgctgcggttctgtatcctgaactggtccactattgggacgtagagaaaaaccaagggcggctggaggattatctgccaaaatccggctacaatgcacattggcgctgcaagcagggacatgcttggacacgccccatcgacgagcaggtaaaggctacggaacgataccggcgcaacccttctccgccaagcggcgggctatgcccatactgtagccatagacggacctcatcgttttacaatttggcagtgatacatccggagatagccgatcaatgggattatagcaaaaatggggctttaaccccgcggatggtttctccttccagccagaaaaaggtattttggcgctgcgcttttaatccggcgcatacctgggcggaccgtatctctaaccgcacacaactgcttagaggatgccctatttgttctaggcattttcacatttcgtatacggccagggccatatattactatttgtaccgaaaccaggtgctttgcgcctgcgaggtgcaggcggggcggtatatcatcgatattgaaatacaatcgcctccgctgccttcccgcccgcttgcattggaaatcgatggataccatcatcataagactgccgaggccgctgcccgtgaagcgcggaaagacgaatatctgcgaaaacagggataccgtgtgatgcgggtgaaggagaggccggagcaggatgaagggattcaaatggacggcgatacgatcacctatcccttttccgaacaaaaccgccatctggaccgtgtcatccaatatcttttggtattcatcgcaggcattcatatagagccggaccatataaaagaccattggaaaatagaggctttctacaaccatacacgaaaggagcgatctctggccgttcaatatccggagttggcgaaggaatggagcgagaaaaacgaggaggggccggatgtggtctctccggggctggggaaaaagcggtggtggaaatgcccaaaatgccatcgtgagtatcaggccacagtacataaccgtacctatcaccattcttcctgcccttattgcgcgcatttaagagcgacgccggaaaactgcctggcggctgtgtatccggaagtagccgcggaatgggatgaggccaaaaatgcgccgcttaagccgacggatgtgctgcccggcacagataagagtgtttggtggaaatgcaaaaagggccatagctggcgggccttgatctatacgcgcacggggcctaagcccacaaaatgcccatactgccaggggcatgccgtggagcgaaaacatcgctggcagggaaaacccccgcgttggcacaatactggcatccgtctaaaaatgcggtatcccccgagcaggttgcgcccaactcaaatcaggtgtattggtggcaatgcccagagggccacgaatggcaggaggcgcccaatcaattgcaaaagcatgtgccggaccgcatctgcccatactgcaaccgccgaagactatccaaggaatattgcctggcggcgtcgaatcctccgcttgcccggctatggcatccgctgaaaaacagctgcactgcggagcagattgcaccttattccaacaaaaaggtgtggtggagatgcgaaaaagggcatgagtgggaggcaagcccaagccagatgcagggccggggcgcagaaaaggcctgcccttactgcaataaccgaaaggtttgggttggaaactcgctggcatatcttgcgcccgagttggcagcggattggcacacagacagaaatgcgccgttgacgccggaacagatttttccgtggagcagcaaacgagtttggtggaaatgcaaaaaagggcacgagtggcagacaacaccggccaaacggcacctgcgcggagatgggtgcccgtattgctccggccacagagcctcggcagagaactgccttgcggccacacatcctgaaattgccaaagagtgggatgaggagaaaaatgcgccgctgaccccgcaggacgtgacgcccggaagccgcaagcgggtctggtggaaatgcaagaaggggcatacatggcagtcgacagtggatggacgcatccatagcaaaggctgcccggtatgccatcatgaacagattcggcatcaatcctttgccaaggagcatccggaactgcttgctgagtgggatgctagcaaaaatgaccgcccgcccgaacaatatgccgcccgctccaatgccaaggtatggtggaagtgcaagcagggccaccagtggcaggcgacgccggatagccgatcccaagggagcggatgccccgtatgcgccagagagcaaagaaaacgcaatctgaattgagggcccagacgccgcagctcttggataccacgccgcgcccttgccgtataaaacagcatggaattgacagatgcatacagcgattatatgatgaagaaaaatgcggtgtggagggaattggcaatgaggatcgatgcattggatgtgtactatgtggcccatccgttgatagagccatggacgacggcgtatggctcggaccctgtgatctattctgtgatggtaaagctgacaagcggcggggaaacgtcctggagcgaatcctgcccgtttttggcgccgacctattcgccggaatgcgcctacggggcctattatgtggccagcgaatttttggcaccgctggtgctgggccagtccttcgagtcggcggaggagatcaaccaggcgatggcgtgcgtgaagggcaatccgtttgcgcatgcggcaatagaaattgcttggtggaccatgcaatccaaactgacgaaaacgccgcttcacacgcttttgggcggcagcgatgatgagatcgataccggcgcggattttggccgccagcccagcctggatcgcctgatggagcgcattgacggggcgatccgcgagggctataaacgcatcaaactcaaggcgatgccgggctgggatttggagatgctgcaagcggtgcgcagcacgtttccgaagttcacctttcatatcgactgcaacgccgggtacacgctagacgatttgccgatgtttgaaaagatcgataagctgggcctggcaatgatagagcagccgttgtttcatgccgatgtggtcgaccatgcaaagctgcagagccgtttagaaacgcctatctgcctggatgagagcatttcctctgtatacatggcggaaaaggcgatagagctgggcgcatgcaaagtcatcaatataaagcctgggcgatgcggcgggctgtacaatgccaagcgcatcaaccagctggcacagcaggcaggcatcggctgctggatcggcgggatgctggaaagcgcggtgggcgcgggcatttgcgtagagctggccgccatgagcaacatggtatatcccagcgacctatttccctccagcaggttttatacggaggagatttcgaaaaacgaactggtgttttccagcccggcgaagatgcggccgtctatggcgtatggcaacgcctatgtgccggaggaagcaaagctaaaacagcgcaccgtggcgcacaagcattgcgaatagaacacaggcgcagcacgctgagagactgtgttttatgctgaaagagcgccctttcgcattgagacgaaagggcgccttggtgttttgggaaggggaaactatggcgttaggatggaggcagggatcttgaaaccagcatattgggaaacgtcgcatttgtggttgcagccttggcaccgtaggatttaagactggttgctatgataggggctggtagatattgtgacagtgttcgcccatgcagacatattgtattggcctcttcatctgtttctgcggaaacggctgttccggccgaaggaaacaaagcgctcggaagcgcggtacgtgtgctagaataaaaaaggggggatcctcaatgggaagctttttttccaatgtccatatcaaaaagcagaatgaagttggcgtagagacagtggcgtcctgtttgatacaggggatggaacaggcaggctacaaacaggcggacaaagaagagtttgaggcgatgattgcgatttttgcgcccaaagaaggggattggatcacagtggcctcggatgttattcagtgggaaagtgcggaggaggtgtcagcctatctaacgccgttttccaaggatataggaacagatgtattggcggtctcgtgctttgacagcgattatctttttataaattggatcaatgccaagagaaaggttgatgcttggatgaatgtgggcaaaagcccggagatcccctgtcctaggagaaccaacgcagcggcatggaaaaaggtgataaagcagcacgagcccctaaagcgcctcagaaaggaagcgtatgtatttgccgaggagtttatggagccctttggggcgctgatcgggctccccgctgcacagggctgcttaacacaggagatgtttggcgtggatatcggtgcggcagaaacatgtactttgtattttgcggaggaggagaggcaggaggaacagcaggaggaactgccggaattatggaatatggctgtgccctttttgccatatcggatggaagaagagggttttgttagcgcgatcaaccggggcggacgatccaagggccttggcatcggcatttatatcgaaggaaaaaaagaggatgagatcacgttcagcgatgtgaaactgtgcaccgattttgaaaagcgccccctaaatatccggcccattacgctggaaaagcggcagctggccaatggggaatgggcgtattggtgggaggatgaaaacctgccgctccggcccaagataagcggagagcggaacagggagctgcgggaactcggacgatcgatgacattgtggttcacaccgcatggaaatccacgcaaggcgatggacattgccgtgacatttgtgccgctggaaaatcggatcaaagggcagtgcacctggtgctgctggtggaaatatggatcaaaggctgcgtttatccaagcgaacaatgagcagctaaaaaggggctcaggcatttttcttaacccggacgactacgacctggattgatgcaaagcaagggactcagaggcggaaagaaaatagaaacaagcaaagcaagcatgatagcggcctggtgcctgacggcgatgctctgcctgtgcggatgcggtgctaaggagacctcgttatacgacagagggctaactgatgcaggaaatggcggcggcgccctatgcgcaaacgatgacgcagagccaaacgctgctggaaacgctggacgttgtcgctaggcaggactgtagcaccccaaggcagtgtatcgcatagaggctcccacggaagcgctctctgcccttgtggaaggcgggacggaaggagaggtgtctgaaacgctcaaggcgtatctgatgcagacaatgctgggcgcgctgcccaatcagatcaacgggctggcgggggcttccgctccagcagccgcagcatatgctcagccagacaaacctttgtgcaagcagggctgggggaggatactgtatacttgtacaccttaaatcggcggtgccggcgatggtggtattcctcaagggagagggcgatacggtgctggcgacgggcagctttatgctcaatgaggagtttgcctgtgattggcaagaggcgctggaggaaagcctgcaaatgttttccgccgcggtatcagcagtggaaagatagcgccggaagggagaaagacgctatgccgttgaaatttgtgtgcggagacattacgaggatgcgtgtggatgccattgtcaatgctgccaaccggacgctgctgggcgggggcggcgtagatggatgcatccaccgcgctgcggggccggggcttttagaggaatgtagaattttgggcggctgccagacgggcagcgccaagatcacaggcgcgtatgaactgccgtgccggtatgtgatccatacagtggggccggtttggcagggcggcggccggggcgaaatacgggcgctttgttcgtgctaccaaaggtcgttggcgctggccaaggcgcatggatgccggagcgtagcgttcccgctggtatcggcgggcgcctatggggttccgaaagcgcaagcgctgcgcgcagcggtggagagcatcgaagcatttttgcaggctgatgagatggaagtggcgctggtgctctaccaagccgaggattatgccctggccaaggcgcattatccgatgtatacagcgtaaaggcaaaaaaagcgcagatttttctgcgctttttttcaattagatcttttgcagagcctttttgaactggcgggcaaacagcagcacggtgaatgtgacggcaatggcgtcggcaaagggctctgccatatacacggccatggtggggttggcagaaaatagatgcggcatcagatagatcagaggcagcaggatgatgaatttccgcgtaacggcgacgaggatggattccttggcgcggtccagcgcggtaaaggtcatctggcaggcggtctgcgcgccgaagagcacaagcacggcgaaatacacgcggatggcgggcgtagcaaacgcgatcagcgaggcatccgaggtgaagatggaggcaaacacgccagggaaaagcaacagcgccagccataacagggtggagtataccaagctgctgcgcagcaacaacccgaaggcctttttaacacgatccgcattgcgtgcgccgtaattgtagctgatgatgggctgtgcgccctgacccaagccttgcaagggcagcagggcaaactgcatcacgctggtaaggatcgtcatggtgccgacggcaatgtccccgcctgcatgataaacgtcgccgtacccagcgccaggcagggcaggatgatggaggattgcaggcgcatctgtttgatacggatcttaagatgcgtctttttgcccgttaaaaagagcattacccacgccgcggacagcgcctgcgacaggatggtggccagcgctgcgccgcttacgcccatatcaaagacaaagatgaagacgggatccaatacgatgttggtaacagcgccgatcagtacggacagcatgccggtcttggcaaagccctgggcgatgataaacatattcatgcccaacgtgatctgcacaaacagcgtgccgatggcgtagatgttcatatactcggtggcatagccgatggtatttgcgctggcgccaaaggccaagagcaacggccggttccagatgagcagcacagcggtgagcacgacggaaatgatgagctgcacggtaaagcagttgcccagcgatttttcggcggactcatgatcctgccggcccataaagatggaagcacgcggcgcaccgcccgcgcccacaaaggaggcaaaggcggaaacgatcatgatgatgggcatgcatacacccaccccggtcagggccagagcacctacctccggaatgtggccgatatagatgcggtccacaatgttgtacagcatattgatgagctgggccaccacggagggcagggccatctgaaaaagcagcttgccaataggcgctgtaccgagctgattttggtcttcattcatggagcgttccttctttctgtaagcataaggagatgttttgtgcgatgcggtagtaaaattgctcaaaatcgtgcgtttcctctgcggtaaagccggaaagcgcgcaggcggtaaagcggggcatcacggccagcacgtcttccaaaagcggcgcggcgctatttgtcagcgatagatggatgcggcgccggtcggcagtatcctggcggcggcacaaaaggccgcgctggatcagcgattccaccgccacagagacattgctcttgggcagcatgcgcagctctacgatgtcccgcgcggtatccaggccgggattgttgcccaaaaaggcgagcacatcaaattccgtttgggaaaggctgtgctgcttgcagacacgccggcgcaggctgtcgtaatacttcaaaatattgcgaaaccccaccaggacttcggaatttttggacatgccgtatcattctcctcaaaagtagttttatttaaaaacggtttgcttaaataaccgtttcattgtttattatagaaagccgcccgcatttgtcaagagcggaaggcgttgttttttagcagtgataatgcacaggaagtgtgctagaataaaatcagtctatcaattcctttttagtttcccgtataagtcgtaaggctatatggcggggcactgttttttgcaaagttagcgaactctcaatttacagagaaaggattaaaaaaatgctgctgctcaatcgaacgctgttgaagatggccaagggcctgtggggctggatgggggtcattgtagggctgaagatggtcacgctggtagggacgacgatgtttgccaagaccatctcacaatttttgggcaatttgtatgcgcccaatttgacctgggcggaggcgggctccgccatactggcggcgcttttggcagcgatattgatgtttgcctctgagcttttgacgggcgaggcggaataccgctgcacggccaaggcgcgcaccagccttaggcgccgtatttttgccaaggtgatggagctggatgtgggcaacatcgaaaggatcggccccgtatccgccattacctcggcggtggacggcgtagagtccatgcagacgtattacagccaatacctgcccgggctggtatacagcgtgctggcgccgatctacctgtttttccaaatgaaggaggcttcgctggcggtggccgcggtgctttgcgccatcgcgatgatcctgctgcccatcaacaacattttccgcgcgcatatcgaaaagctgaaaacggaatactgggcctgcatggaggatctaacgggctattatctggaaagcgtgcaggggctgacgacgttgaagctgtatgaacaggacgaaacgcgcaccaaggtgctcaagaaaaaggcctttgccttcaacgataagatcatggaggtcatgaaggtaaactttacctcgtttttgctgacggacgggctggtgtacggctccatcgtgctggccacggggctggcctgcggcgggctgattgcggggcacctttcctttgcctcggcgctgatggtgctgctgctctcctacggatttttctcctcggtacgccagctgatgaacgccacgcatacggcgctggcaggtgtggcggcggcagaaaaggtttcaaacctgctggatatcgataccacccgcccgtatgcgcccgaaaccccagaggatacaacgccgtacagcggcatccggatggagcatatctcctacggatataccgggcggcataaggcgctggatgatgtaagccttacggtggaaaagggcaaggtaacggcgctggtggggctgtccggctgcggaaagagcacgctggccgggctgatgatgcggttttttgatccctccggcgggcgcattaccatagagggccgggattatctgagcatgacgcccgaacagctgcgcaggcgcatcgccatggtgccgcagcaggtcagcctgttttccggcagcattgcagagaacctccgcatcgccaaaaaggatgctacggaggaagaaatgatggaagcgttggagcaggtgcggttaaaggattgggtgctggcccagcccaaggggctgcaaaccagcgtaggggatgccggcggcaagctatccggcgggcagcggcagaaaatcggcatcgcacgcgcgcttttgtgccaggccccgtatatcatttttgacgaagcgacctccagcgtagaccagaagagcgaagaggagatttggcgctgtattgacgagctggcgcagacgcggacgctggtcatcatttcacaccggctttccaccatccgccaggccgactgcatctatgtactcagcggcggcaggatcgaggaaagcgggcggcatgaagcgctgatgcagcaaaacgggctgtatcatcagctggtgacagagcagcaaaagctggaagagcaggcagaggagggcagagcatgagacgcaggtttcgttattcgatctggacgatgacaaagcggctattgcatattgctgcgcccgttaagggcatgttggcgctgtccaccttgacaagcgtggtgggcaacctttcgcagatggggctgatgggcttcggcgcgctgtggattttggcctgcgcaggcaaggtgggcggctccgccgtgctgtatggcgtgctcaccggactaagcggcctaatgatcgtgctgggccggtatggcgaaggggtaatttcgcatgcggcttcctaccggctgctggccaatatgcgggtgcatttgtttgaaaccatccgccgcctggcccctgcctgcctgatggatcggaaaaagggcgatttgctgaatatcgcggtatccgatatagagacggtggagtttttctttgcgcataccatcgggccgatgtttaccgtgatcctgctgccttgtacgacgctggcactggcgctggtgttcagcccgttgtttgctgcggtgctgctgcccatttacctcatcgtcagcatcgtgctgccgttgatcgccatcaaagtagggcggcccattggcatgcgctaccgcgagcggctgggagagatcaaatccatggtgctggaaagcgtatacggcatcaaggatattcagatctttggcgtggcggacgatcagctggcccgtattttggcgcagaacaagcaggtgaaccgagccgcgcacggcattacgctgcaccggcagacggtatcctcggcaccgacgttttttgtgtacctggcccgcattttgattttggtggcagccacatacctggcggccagcggccaggcgaaccccgtgggcaccatcctcatctcgttcttggcaacggcgtccttttcctctacgcagtcgctgacgatggtggtttccagcctgctggaaacctatgccgccgcagagcgcctgtttaccctggaggatactcaaccggaggtagaggaggcagaggaaccctgtgaaatcgggccgattgaaaccatcgattttgaaaacactgggtttcaatactccaagcagggaaaaaagattttggatggctttacgctgcatatccaaaggggagaaaagattggcattgtgggagaaagcggcattgggaaatccaccgtgctgcgcctgctgctgcggttttggaaccccacggagggggacattaagctcaacggcgtatccttaaaaaatacgcggttgtctgaactgcaccggcggatcgccgtactggagcaggatacatttttatacaacacgacaattgcgcaaaacatcgcgctgggctggccggatgcgccgcaggaggagatcataaaggcggccaagcgcgccggcattcacgagtttataaacgccctgccagatgggtaccaaacgcagatggggcagatgggcgcgcggctgtccggcggggaaaggcagcgcatcggcatcgcccgcgccatgctgacggacccggatgtgcttgtgatggatgagccgaccagcagcctggataccctccacgaaaaggaattgctggatacgctttcgcgcgaatacgcggataagaccgtgctcatcatttcccaccgcatgtctacgctgacgggctgtaaccgcatcatccggctggataacggcaaggcggtagagctgcgggacaatccgcataaacagtaggaataagccgaagcgagcgagaatatcgcacaggtttttgggctggaacatctgcaacgatgatgcagtttgaaagcgctgcggcgtgtgcgcaaggcacgggaagaaaagcagaatatccctcatcggaacagagcaaggagtgagcagctcgttatggaactgaattttgataccactgccatagaaggctatcattctgcgtcccaagtggcccgtattcttactgaaaaatgggttgcagacaatatgttctgtccccgttgtgggagcccgcagatcaatcattttcaaaataatcgaccggtagcggatttctattgtcctgactgtagcaatgagtatgaattaaagagcaagaacggtgcattggggcataaggttatggatggtgcttacgacacgatgataaaacgcatcaccggtcatgaaaccccggacttctttttatgagttactcgaggaaacagctttgcgttacagactttctgttcattcccaaacatttttttgttccgggtattattgaaaaacgaaagccgctggcagatacggcccgccgtgccgggtgggtcggatgcaacattcggattgaccagatcccggagcaagggcggatttatatcattgcgggcaggaaaatcaaagaaagcgcggaaattatccaaaaggtaaaccgaagcaatgctttgatggtgcaggacatccatgcccgcggatggctgttggatgtgctcaaatgcgtaaatcggctggatggagatgtcttttcgctggccgatgtatacgcctttgaggggctgcttgggcagaaacatccgcagaaccatcatgttcggtctaaaatccgtcaacagctacagcttttacgtgataagggattcatagattttttgggacatggtatgtatagaaagacagcggcttggtgattgcgttgtgtatgacagcagaagcagtgtgcgagaatgcgcaatcaaaaacggagactaaccaacaaacatcgagaatagccaaaaagccgcggagcaatatataaaatcaggatcaatgctggcccaggcgcgccggcgcagcatggataaaatcgtaaggagaatatgctgatttttgcactttaacaaggattatatatgggatcgacgaaaatagatgagggcgtgcctatggcgcgctttttctttttctttttccccttgtaggccgggcatgggcaatggtatcatcaccaatgagaagggaaataagggggattttgcaatgaggctatggcacagcttacgagagacactgggggatggggaacggatgcgcaccatattgcacctggcttggcctacggtggtagagcaggcgctgcaaacggtggtatcgtatgcggacacggcacaggtgggggccatcggcgcacaggcgtctgcttccgtagggctgacaacctccatgatgtggctggtaaacgcgccgctgtttgcctttggcatgggggtgttgtccgtgatatcgcgggcgcttggcagcggcgaccgggagactgcgcgcaaggcaggcgtccaagccatctggctgacggtttttttgggagtagggctgggcatcgtaacggtagccatcgcgccgtttttgccggcttggctgggggcagatatggagatacggcgcgatgcctccctatactttggggtggtatcgctgccgatgctgtttcggagcagcagcattttgatggcttcggtgctgcgtgcaacgggcaatacgcgcacgcccatgatctttaacatcatcatgaatgcgctgaatatttttttgaatttccttttgattggcccggcagggctgggcgtgctgggcgctgcgattgcgacggcggtttcgtatgtggtaggcggcagtttgatgttttgggcggtgatgcgtcaccctgtcttacagctgtctgctatggataagcggctggatggcccggtgatgcgccaatgcgtggcagtgggcacgccgattgcgggcgagcgtgtaacggcctgcctgggccaggtggtgttcacctcgttgatcgctaggctgggtacagtggctgtggccgcccattccatcgctatcacggcggagcaggccttttacattcccggctatggaatgcagatggcggcggccacgctctgcggattttccgcgggcgaaaaggacgaaaaaaagctgacacagtatgccttggccatttgtgtcatcgcggtgctgctgatgggactgatgagcacgctgctgttctttgcgccggggatgatcttatccatctttacccgcgatgcagcggtcattgcgctgggcaccaggctgctgcgcatcgtagcgttttccgagccgttttttgcggcggccatcatcatggagggcgtattcaacggcgtgggcgatgtgaaggtgccgtttgccatctcgctggccacgatgtggggcgtgcgcatcgtgtgcacgtttgtggtggtgcaattcctgcacctgggcctgccacaggtatggctgtgtatggtggcggacaatgtgacgcgctgcatcctgctgctggtgcggtattttggcggatggtggaaaaagccgctggggcttggcaaatgggcacagacgcaaaatacggcgaaacaatgagctttttagggaatggctgccgatggtttgtaggcggccggaaatgtgttacaatcgttgtatgaagaatgggacaaggctgaaaaattggatagggcgtatcgattggctgctcatcggcaccttgtgcgtgctcatcatgggctatgtgatgctgcatgacctttgcggcggcacgctgttccgtcataacgattgggacagctataccctccaggcgctggcctggcgggaagggcggacggcgctgtcgcaaaattacagctggctggaattggcagtgtacaacgggcagtattacgtttcctttccgcctttgccgtcggtggtgatgctaccgctgacctatatctggggcgcggatacgccaaataacgttgtggtcatggtgtttgcgctatcggctgtggtatgcgcctacgaatgcttccgtaagatgggcgcgaaggacacggtttcgatgttttgggctgtgttttttgtgatgggcagcaacatgctgtggatgtctaccacgggcggggtttggtttttggcgcaggggctgaatctggcgctgtgttttggtgcggtgtgggccatgctgtgcaggaaaaagacgctgtgcttggcgttgattgcgctggcagtgggctgccgcccgttttcgctgtgccttttgggggcggcgtttgtgtatttttgcatgcaggacaagcaggaggcgggcattgcttggcacaaagcggcgctgcgccaggcaaaatatttgatccttccccttgccatcgggctatgctatgcctggtataattacgcgcggtttggcaatcccttggaatttgggcacaattatctgccggagttttccgccgagggcagcgagcagtttggcggaaaatatctatggcagaacgcctacaatatcctgctgcgccctgtaacggtgcaggccgacggtacgttgtcgtttccgctgttcgacggatttatgttttacatcgccaaccccatctttctcgtgtggtttgtctacctggcgcaggatattgccaaaaagcgcatgacgggggaaaagtggttgattacggcggcgctgggcttcaatctggtgctgctgatggtgcataagacctttggcggctggcagtttggcgcgcgttacacggtggacctgctgccgtacgtgctgtggtattttatgcgctgcggacgcaaaatgcccaagcggtgggaactgctgctgggcgcatttgccgtgctgtttaacctatacggcgcgctgtatatgttttttaaggggtgaactgttgaacgcaaagaaaaggattctgtttttacacggcctggggcaggggccggatagctggcgggcggtggccgagcggctgacgggcgttgacgccgtgatcccggatcttggcgccatgttggcgggcagggcggattatctagcgctgcggggcgccctatttgccgtttgtgatgctgaaaaagcgccactgcacctctgtgggctttcgctgggcggcgttctggcgctggcgtatgctgcgcaccggccggagcgggtagcgtcgctggtgctgatcggcacgccgtacacgatgcccaaacggctgctaaagctgcaagacctattgtttgcgataacgccccgtacagcatttgaaagcctggggctgaccaaacggcagatgcggggcctttcgttgtcgatggcaacgctggagattccggcgctgctgccccgtgtacgctgccgtacgctggtgctttgcggcgaaaaggaccgggcgaacagaaaagcagcccggcagctgcaagagggtctatcaaacgctgcgatgcaaaccatcgacggggcggggcacgaagcaaaccgcgaggcgccagaagcgctatcggcagcgctggcggcattttatggcgcagaatagacaaaagagccaagaaaaaaaggacgggccccgtcctttttttcttggcagcatgctaggattcttccggcagattgcgtttgcctgtcagctgatggaggatgaccttgtacacgttcgcatgggaaagccccctgcattgggccaggggatgcgaggcaaagccgtagtgcgccaaaatggtgcgaaggccaaactctttttctttccccgacgtttcaacaaccgtgccaaagccgacgacgctttcatagcgcgccgtgatgcccatgcgccacggctctaccttgtagaaaatatccgcctcgatacagacagtgcggctttgcagaaggcaatccagcttgtatccttgcttggcacagtgaaaatacaagaggggctgcaaagcgtccggcgccagcccgaaggacaccggcacaacgtaggggcgcgtgccgtcccaaaggccgagccgtaccgtatcacagcgggcgagcaggcgcaggatctcggcctgttctgtaagctctctatcttttctgcgcatcaaagcacctcctgggaaaggctaggcgttacggcgccaaaagcggggaatgatctgctgccaggtcttgaatttcggaaaggggaatggtgaactccaccacgcccatatagcccggcgccgcctcgtatttatcaaacacgagcaccagcgcgccgtctgcgttgatgtaaaagctctggtccggacggatggaggtaaaatccagcccgttgtcctgatcgataaagtagctttgcgacgggtctttggccttgcggctgcgcatttgctgctttaccaggccgctgagccgctctacgtagctgctatccggccggaacagatcggaaagctctatcaactgcccggcagttttatccagatggtagatttttacaaaggaattggtgctggccatgacgatatcagtacggatacaaacggacagcaaacggttagaatcgcggagcacctgaaaatccgagtagacatattcatgccctagatcgccgccggcgacaagatccgcttcgtattgggcgatgatgctgtccgcataaccggacagcgcttggttcatctgtgccaggctgtcatccagcggggtagaggggtcgctgtcctcgatttgcggcacggcaatttcagcgccgtaattgccgctgtcgtcggtgtactggcggaatgtaatgacgcgaaacaccgggcccaccaccggcaggctctgcatggccttggcaaacggagcgctgaggttgacggcggcaaacaggcacagcacagcggccgcggaggcggcgctgagcagatgatgcaggcgccgccgcctacgcgcttcacgctgcccgcgggccagcgtctctgtaaggcggccgttcaattcttccggcacgggaatggcctcatattcggttttggttttgacaaagtcagagacagtcatgatttattcagcctccaatctcaaacggcggcagcgcgccttcctgttccaattccagcttcatttttttgaaggcgcggtacattctgctttttacggtattctcattttcccccagaatctgtgcaatctctgaaatctttttgctttcataaaagcgcagcacaatgatggcgtgctccttttcatccagcagggaaagcgcggcggaaaggtccaccttggccggcggttcatccggctgtgcgcgggacagatctgccgcctgctcggagaggactagatggcgcttggccctgcggcgcaagagctctagcgaagtattgaccacgatgcggtatacccaggacgaaacagcgtccgggtttttcaaatgtccgcattttaccatggccttatacgcgctttcctgcacggcgtccatggcgtcctctttatttttcaaatagctgtaagacagccggtaatagctttggtaatgggcaaggatctcctgtgccactgtttcctccatcgtcggtttcacacgcatccacacaccttttgctccgatgggccggtttttattgattcaggtaaataaaatggttgtcggtattcaggaagtctatattatagcatagcaagatgcgtgtaatactgtgttcttggatataggcggccagatcgccgcgaaaataccgaagatccaacacggacatttcggggaaggcggtggctaggtagggcaaaaggcagttggcatagctgtccttgagcacaagcacgcgctctgtaccggctgcgttggaggatacctgtagcgacggctggttgccgccggtaaacacggtgtatttgtccttttgcaaaagcgcgtcggggtgtaaaaacgtatccgtttttgtgccgtcgtcataggtcagctgcacgcggaggccgggggtctggtaatagggcatttcgtcgtgcgcggcaaagctgaccggcgctttggaatacaggctgccctgaaattcatccgccaagatcgaagtgccaaaggcggaaagcggcaacggctcgcggcccagcccctccatcagcgcagcatagccgtaataagcgccgcgcatggtccagtgatggtcggtttgatagtacagcgcttcctccttatgggcggccagcttttcatacggagaaagaagctgcacgcggccggaaagccgttgctttacataggccagggtatcggcctggctgccgcaatcggacagcgcaggggtgttttcggggtacacgcctacggcattgggcacaagcagcagggagattggcaagcgctcgggcacagacgcggcaaatcggttgatctgcgccaggttgcggtcgatctgcgcacggttttcctggtagcgggaaaggtacgacccctctgcggacacgtatacctcgcccagctggcgctggcccatggcaaaggagagatcattttttaagatgacaagcgcatccttggccaccgcctggtcggaaagatagcgttcgctttctttggcaaagctgccatccatcacagaggaaagcgtgaaacggggcggggaagatagcggccgattttccatttggctgaaggtgcgcccgggcagcagcagcgcgcccagcgaaaacaccgccagaaagccaccgaagatggcaagggtgattgtatcttgacgcaagagcgcacctccttaaaaccgaaaatacaaaaaggggttgaatgagccgctgacgataaacgctgtgcaggccaaaagcgcggctgccagccccagcggacagagtacctccgcataccagtgccgggatagtagatgcgtatgcagccttgcaaacgacgcggtgctggcaaagaccaaaagcagccacaacagcacattgtttttgagcaagaaaagcgaagaggcatcgtacagcggcacaccggacagcccgaacagagcgccaaataccccggacagctgcccaggctcggtacaggcaaacagcgcccagcccaccacgatgaaaaacagcgcatacgcatgctggagcatgcggggcaggcgggccagcacgcgcagaaggcctagcttttccaccatcagcagcacggcgtagtacgcgccccacaacacgaaattccagctggcgccatgccacaggccggtgagcagccataccacggcgatgttgaaaagctggcggccccagccgcagcggttgccgcccagcgggatgtagacataatcgcgaaaccaggtgccgagcgaaatatgccatctgcgccaaaactccgtgatgctgcgcgatagatacggcaggttgaagttttcctcaaaggtaaacccaaacagcttgccaaggccgatggccatatcggaatagcccgcaaaatcaaagtaaatctgaaacgtatacgccgccacagccacccaggccgccagcacgctctgcggcagcgccccattgcccaaaatttgggtaaagaccaagccgatgttgttggccaagagcactttttttaccaggcctgccgtaaagcgccgcaccccttcggcgcattgggcccgggatacggtgcggtgggcaatctgctgctccacggtttggtagcgcacgatggggccggcgatgagctgcggaaacagcgagacatacatggccagccaatcccaccggcgctgcggggcgcatacgccgcggtatacatcgacaatatagctgagcgtttgaaacgtataaaacgaaatgccgatgggcagcggcaaagagagcagcggcagcgaaagcccgaacaggctgttgaccgtgccgatgagaaagtccgcatacttgaaaaaacccagcgttagcagatgataggccaccgaggcagagagcacggcacgccgccgggcaggtgtatgggcgcggcccagcgcccgcccggccaggaaggagacggtgatggagctcagcatcaggaggatgtatacgggctctccccaggcatagaagaacaggctaaagaccagcaacacggcgttgtgccaacggcgcgggcacagaaagtaagcggccagcactgccggcagaaagacaaagagaaagggaacgctggcaaagaccatgggccgttatccttggatcagctgcttggcggtggcgttatcgttggaaatgcagagcgccaccaaattgccccggcgaatgagcacagcgtcgttgagctttgtcatttccttgggcacataatccacatacgattgcttttggctgtctacgcgctgttttaaggcgctctctacccgctgggccgcgctgtcatccgtgcaggaaaagacggcgatctcctctgccgtagcgccggtgcttacataggctgcgccctgctgcacatccttttggtcgatgccgtatagggtatagagcatatctccttccagcggggagagggtatcctcaaattggatctgggtggacaggcggtctgccagctccacggcgtcggccgtaggggcggactggccgccgcagccggccgccaagaggcaaagcgcaagggataggcacagaacaatgtttcttttcatcgggggaaatctccttttcatgggttatttcgaatgggttttcagataatccacccattttttacagtaggatttggtaaggtgcacgccgtcggtggcagcttccttgggtaggtagccgtcgctgccggtaacaacggaggcgacgtttaagtagcgcacgccttcttcagaggccatttgcaagagcgcctggttaaagtcgttgatcttggattgcttgtacatcttgctgctatcggatttctcctttgaaattggcaggatggactgcacatagatctccgcctccggctgagcctggcgaagggcctggatcagctctacatattttttcttaaagctgccggccgacggccacccgagctcattgacgccaaacatcacatacacgcgccgacaaggcgtttggcgcagcgcatccacgacggttcccttgcttccgcctgccagcgtgacgaccggctttgtcatcgcggtttccacatttaagcctgtgccgcagaaaaatttggcgtttgccagggcaccgttttgctgaaggccgacggtgcggctgtctccgataaagacggcgtcggaaaaatcctcttgcccggtgccggaagcggcggtggacttgggagcagcagagggcgtttgggtaggggcggcggaaggcgtttgggtaggggaaacggtggccagc

SEQ ID NO: 937 - DNA, 3476 bp, Unknown
  16S sequences of unknown bacteria
attgatatcgccggggagattacgggcgacgttctatcggataaaatctacaacaacaatcgcatcgtcgaacaaaatataggcgtcaagttcgatttctacaattcaggaattccgagcaatcaggccggaaataccgtccgcacgctcgtcatggccgacgacaacacctacgacgcctttttcacgatccagtacaactccgcgcagctcgccgttgagggactgtacctcaatgtcagcggcatgccgtatctcagcctcgacaagccatggtgggacgccgattatatgaacgaaatgacgatcggaaacgaggtgatctacggtctggtcggcgattactcgatagaccggacgcgctgtctgagctcgatgttctacaataagaaactcagcggtgatttctacggcgaccctgacgcgatttgcaacgacgtcatagacggaaaatggacgttcgatcggctcgcgcaaatctcggctgaggtatattccgacgtaaacaacgacggaaagccggatcgcggcgacagagtcggatattgtatcaatgattacagcaatctcgactgcctcttctacggaaccggagcgcgcgccacgacccgcgacaaggatgattttccggtagtttcgatcaacaccgagcgcacggccgatgtctgcgaccgtctgtataagcttgtctacaacacaaccggtggatatttccaagggcacgaaaaccgcgcacaggagactttgaataatctggtaaacttcagtgaagacaacagtatgtttctttttggctttttgtacaacgcggatgggctccgcgacatgaagtctgacttcggcattataccctaccccaagctcgacgagaaccaggaaagctatcacagcattacgcacgacattatgcggatcatgttcctcccgcgcaactgcgggaagcccgaaaccgtctgcgcggctctcgaagagctggctttcatcggctggaacgacaccctgcctacctattacaacacgattctcaaaaataaatattcgcgtgacgaatcgaccggtcggatgatagaccttatccgcgatgattgtacagccgacatcgcgttcatctacaatgacgccttcaactcggtcggctacatttacagaacgctgattcagaacgaatcgaacgcattcgcgtcgaccttcgcgaagaacgaaaccaggaccaacgagaaaatttccgaattcatcgaagaattcagcaaataatcgtataatcgagtcggaagctgcacattagttgagcagcctgactctcacaccaccgtgtgtgccgatcattacacggcggcttaatcaaaaatattgcagataggggctgtcgcaaaagcgacagccccttgaacttcgtgaaggatttactgcggagcttcccgatgacggtgattcctttgcagctgaagccgggggatgccgctcagaaagcagaagtacaggaacaggttttattgatgattggtatctgtactgaaataaggagaagattctgcccgttccggtccgcacagggcgcacgagatcagactgccgggcatttacagaaaattctgaacatagcccgttcaatttgatcttaccgtcttccttatatgtgaacttatatcccatggaagttgagagccatggaatataatcatctgttgacgctattccgaccacatcctgatcatctatcacattatcaccgttagcgtcatgcgtcactttctgagccagctcgttcattttatcaaatgtccatttcccatcgagaacaagcttatacagatcttcaatttcaaagtcttcaactacattcttattgaaatatgttaccacactccatgcggtattaaggattccgtaagcacttgcgccaagaaaaagccgaccatttatctcaaattcatcgtttatcttgttgaaccaccactgagaatcaaacgacaactggtcacaggactttaggtctgaaaaaagattatccgcgataagtggatagacatacgaaacgcttccaaccatcaagtcaaaatccttagtgccgcccatgacgcttccggtgagcgcgctcttgacgtcagacattccgcccatgtagccgttgtaaatacgatagttcagcttgcagttgaatctttcctcaactgtcttgtttctcgcgtaaacagaatcgtttacgatatctccgtcgtcctcggcgtcatagaaatagctccactgttcagcggctgtgagaatgttgatttccgtgccgttcatgtctttgtccggcagactgtcgagccatttcgacgttgtttcttccggcgtcgtgtcctgcgtgactgtatccgtgtccttatctgtcggctgactgtccccgcacgcaatgcctgacaaacaaaccagcatagcgagtaccagtgccgttattctcataaaactgtttttcattctgattcagccctttctgttttttgatttttctgttccgagtaaattctccgcaccgagaaaaactgccttgtgacgcagatgaacgagtagaccgagaatactacatatgtgaccatctccggtctgtcaatcgccatcgcgatgttcagcgctatgccgagcactcccgagacgagcatcagccacgtgtactcgatatacgacagaagcgtcagaacgctcgtcgcgacaccgagaatcgatgtcgctccgtcaagcagactgtatcccgaccccgccgacgtcagcacagcaagcgtcagcgcatagcatacagcaagacccacaagcgatataatccgcgccctcacgctcatccgcctgaactcggtcgagttcttatatttatgcctcgaccacctcgcgaatgtcacaagctggaacggacaggacacaagcagcgcctgcgccgccgaaccgtagattccaagcatcagatagacgatcgtgtaaataatcgagtttattcccccgatcagacacgcgtaccggttcgctcccgcctgcagcatccccacgacgagcgatacaaacagcggcagcatcctgagcggcgtctgcccgaaagcgatccacgtcacaatcagtccgaccgcggtcaccccgagaagcgccgccgaaatcatcgcttgcgtcttctcaatgttcttctctgtattgtttgtttcctttgccgatgtcatcagagttaataccaccccattgctttcttcgtattcatcgatgttgtatatattatacatgattcattccgaaaaaacaatagcaccgtgcgacttgttagaggcgcacggtgtcccattttcggaagttttgctgtttcatttccggttttcgtgtcggtatctccccgcggagacgccgaatttctgctcaaacgccgaatagaacccagacacggaagtatatcctaccttatacgctatctgatcgaccggaagagcggaggcggcgtggttcaacgcctgcatacc

SEQ ID NO: 938 - DNA, 6314 bp, Unknown
  16S sequences of unknown bacteria
aaggaattatgtaccggaagtctgtgcctcactgctctgggaagcggacgggtcaggagccgtaccctggtcggggcgttcgccggggttccggctgccgccgcgtccgccgcccatgccgccaccgatgccgtcagcccggtagctgatggtatcgagggtgacttcggcggaattggcgccggcagtcaccgtataggccgcaccctgttccagttccggagagctgaactgcaccgaggagaagttcttggtgctgttccaggagaagagttccgtgccgtctgcgtccagaacggtgatggtacagggagtggagtccgggctgagagcgatcagcatcgaggcttgggtggagctgtccccgaaggtgcttgccataccgactgtgccggtagcggcaaaggtaccgccggtgatttcagcttccccattgcagtccagagccgagtcagcaccgctggtcggtccggctacataggttacgccgccggtgatgctcagatcgccgttggaatccagaccatcgccgtccgcatccacagtcagggtgcctccggagatggtgatgcaggctccttcggttacggcaaaggcgtcaccgccccgtccgccaaatccgctggagtccgctccgcctgcggcattgagtccgtcatcactggctttgaccgaaatggtaccgccggagatgtcgatgctcagaccttcgatcccttcatagctgtccgcaatggtgagatcacagtcggttatggtaacggcgttgtcggcatggatgccgtcgtcgccggtggcgatggtataagttccgccggaaatggatatatctccattggaatgaagggcatcatcggcagtgtccagggagaaggtgccgccggtgatcatcagctgtgccgaggctttcagacccttggtactggtctcgtccgagctggtatctgttgtatcggaagcggcgggatcagcagcggcatcgtctgtgttggagggagaattgaccgatgccgatgaaacactcgtggggacatctgtccccgcttcggagctcaggtcgtccggctggttttccggaggagcagagggctgcgtaccggtttcacgatctgcgggcggcgttccggttggacggcccccgccaaaggactctgtgaaagtgtgttccggcgcgttggcactgcctcctccggtttggagcgagaaactgccgttatcgacctgaaggatactgctgctgctgatcccatcgccttccgactgtattgagaaactgccgtttgcgatgtacacaaagcccaggggagaatcatctgtattttctccgtggatgccgtccttgccggactggatggtaaaggtaccatcggcaatgcggacgctgtccttgccggacagtccctggctggcggcggtaatggtataggtgccgctggttacagccaggtcatctttggatacgaccccgtgaccagccggagaagagatggtcagggtaccgctgccgttgagggtgaggtcactcttggaaaagacagcggcgtcaatgttgttgtcatctatggcgacataactgtccccgctggacaggctgttttcactgtccggggcagtgtgaggaataccttgtctgcctcccgcacatagagggcggcggaggtttcattggtaatgctggcattgtttaagacaatctgcaccttatcggtgtcctcagcgtccaccatcagcatgccgttttcgagggtaccggagattacataggtgccctcatcggtgatggtgatggtgctcccgtcaatggtgaccgcatcggaatcacaggaggcagtatcgccttccagtgtgatccgggcagcggtttcagcatcgtagccggtttccagatcccgtgcggtaaagagatcggaagctgccaggccgacctgcagggtctgggtctgggaggaggaatcctccgcggtggtggtagtctgactggaacagccgctcagcagcaaagcacagcagagcaggactgtcaggaattttttcttcatgggtatctgcggcctccttttttacagctcgccgatggcggtttcctgcttggatactgtgatctccaggtttccgttgcggcagcgcagccggtcaatgagtgatttttccgtgcggctgtcccgcagggtgatgttgtaggtcagccggaacaggctgcccatattggtggttttcaccgaggtcagttcatattcccgggtgaattcccgcagcggctcgtcaaagacatcgctgtaatccagatcctcggggatggtgatgtgcagggtcttgtagagggaagcgccgccgtcggctttggcgctcagcatccggaagagcagctcagcgccgcccagcaccagggtgcagagcacggcgtagcccagatagcccatgccggcgatgagaccggctgccattgccaggaagatggcacagatttcccgggcggtaccgggagcggaacggaaccgcaccaggctgaaggtgccggcaaccgccacaccggtgcccacattgccgttgaccatcataatgaccacgcagaccacagcaggcagcagggccagagtgaccacaaagctgcgggtatagcgggtatggtactggtagagggcagccaggatcaggccgatgcccagggaaacgcccaggcaggtgagaaactccgccggggtaatgacgacggtcatatcggtatcgaacagaccgcggaacaggttgtcaatcatggaaagagcctcctcgaacagattggtacaggaacttctgataggcagttccgtatttggaaaatgaagtctgatagatgtggaaacgggtcagcaccgaggtgagccataatggcagaccgccgggggtcttgagttccatcagggtgcagccctccggaagcagcgatacgccgtagatctccgaacccagggaaaaatcccggttccggcagaggatattctcatcaaaggtgacccgaaaatcactgccgtcagtcatgcggaaggcctcccgttcataggagaggaaggcagtgggccgcaggggcgaataatagctccggaagtattcgatctcatcggcgatctgggactgaagcggcagaggggtgttctcccgaaagctctggagggcttcctgttcgggcagcaccacccgccgtttgtagaccaccgactggtatttctttttcagctccacaaacaccggatcatccggacaggccggctgatagctccggattcgcagtttttccttataggctggtttttccagcgaacggcggatcagacggaaggagtccgtatcaaaatagacattgcggatggtggtgcgtccatactcatccagctccatatagggactcatcgcctggaggaccgcctccttttcccgggcaccgagcaggtatttgatttcatatcgctgcatagtggtgatgcaggccatggcgggtcgcctccttgtgttttttggaatgaggttattatagatcgctaaccctaaccaaacttaaaatcagggcttaaatttacttaaaattccagttcagggacaaagcggcctgcccaggggcaaaaaaacagcctgctgaccaaagccagcaggcagatagatactatgcaatacaggatcagttcaccggcagggtgacggtgatccgcagggaatgcccgtcctcggtggaggcggagatccgtccccggtgggcagcggtgatggctgcggcaatggagagccccagtccatagcctccggtctgggagttgcgggagctgtcggtgcggtagaaccggtcaaacagatgggcaaggtgctccctttccatcacaggacaggtattgtacaccgagaggtgcaggtttttcccctgacgccccagttccagcgaaatggtgccgccgggttcggagtatttcagggcgttgtccagcaggatggagagaagctgccgcagggatttttcatcgcccttgtaggagagcatcggctcgatccggctggtgaaggtcttttcctgggtacgggccagggactggaaggagcgcaccatctcctctgccagatccgagatggggaattcgatcatggcaacaggcgcccggtcctcctccatccgggagagcaggatcaggtcgttggtgagttctgccagccgccgggtctgggtctggatgtcggtgagccattcattctcccccagatccatcgacaggatctccgcatcggcgtcaatgacagtcagcggggttttcagctcatgtccggcatcggtgatgaaccgcttctgcttttcatagctttccgccaccggcttgatgatccgccccgagagcaggatcagcaggagcagcaccgccagcataccgccgaagcagactccaatgccggtgagcatgaagttgcggtaggaatccagattccgtccgcagtccaggaagatgatctgatacccctggtcgttggcgtgaaccaggtagcggtaatcccccagaaagccccgggtactctgtttttcccagatggtgcgggcgaattccatggcagtttcgctgtcaatggcggcgatccgtccggtgttggtggacaggattaccccttcttcattgagctggacggtgaaatagcgggtttcataggggagttccggagagaactgccggatcttgtccggtttgccgggaacccgtccctccaggataaaatcctcggatttggggaacatgccgccgttatcctccagaatggagagggtgaaatcggcattgtcggtgagattctgccagctgaccaccgccatggttcccatgatgactgtcagtacaatgaagagcgatagcatggacactgccaccagccggatgcgcaggcgccggatcatgcgatctcctccagacagtagcccacattccgggtggcacagatctggatattggcgcccagggccgagagcttcttgcgcaggtaggagatgtagacccataccacgctgatctcggtttcgctgtcatagccccagatcttttccatcagccgttcagcggagatcaggttgccgggattctgcatcagcagctccaggatctggaactcccggttcgccagccggaagctgccggtgggggacgagagctcgtaggtgcgctgatccagggtgatgttgcccatctgcagcaccgagctggtctggctggactgggcccgggtcatggcccggatgcgtgccagcagttcccgggaatggaacggcttggtgagatagtcattggcaccgctgtccagtcccagcaccttgtcgtccacctccgatttggcggtgaggatcagtaccgggatcttgcttccccggctccgaagttccttgagcaccgtgatgccgtcctttttgggcatcatgatatccaggatcacaccgtcatagttatccgccgccagatattccagagcggcttctccgtcatatactgtgtccaccgaataattgcttcgctccagaatggtggcgagcgctttggacagggctctttcatcttctgccagcagcagccgcatatatatccctccagtcatcagtagtctccgacatggagccggaatttccagtttccagtatataccgtccgctttaattgtagttaaaaagtggattttcggctctgatgccttattttagcacagtttcgccgggatgtcatgcggtgcggggacagctttccttttgggacgatccgctgtataatggacatagacagatgccgctgcacgggcaaggaggaagtaccatgaaacgaaagctgttctgtgaaatatccccgctgacctaccgcatctccaccaaaaaggagattctgatgcggaaaatccgggatctgccgctccgggggaagtttgcccgggtcaagcaggaggaactgctgccggtgcggatcaaaaaacacgcctccctgatccggcggcggctgggaaatgtggatatgcagctgcaggagaacaaggcggtgaacctgagcctggcagccccctgcattgaccgggtgctgatccgtcccggggagatcttctccttctggacgctggtgggcgatccctcagcccggcgtggattccgggacggcctggtgatcgccggcggcaagaccggcagcggcgtgggcggcggcatgtgccagttcaccaacctgatccactggatggtgctgcacagcgatctggacatcatcgagcatcaccaccatgacggcatggatctgttccccgattacggacggcagatccccttcggcaccggcacctcc

SEQ ID NO: 939 - DNA, 17001 bp, Unknown
  16S sequences of unknown bacteria
aacgaggatttggcacggcagtgccaaagacgacgattgaggttgcggaacggagactcagtgccttatgccgcagcactttccccgcgaaccagcttaagggtgcgcagcaccgaggacgaggacagccctgaaagggctaccgcagtccgaagcccgcgccccgtaggggagcgggccgcagagcgctgttcgcgggcaataacggccaatcagtttttttcgacagtctgaggcgcggaaatacacgcgccttttctttattcaacagcgctttgcagcccaagtggcctcataaagcgctacagaaattcacctcatgaaacatgtcatcccatcccaaggcaatcacactccccatcattaccgcatttcatcgctccattactccaacggagtctcccactttccctcctatcaaaaaccccggtgcggcttcatatccgcaccggggttttccatgtgttcattagatattgcagggaatggcgctggaggagaacaaaatctgctgagtctgctggcccgcaatgccgtccatttccagtccgtgcacctgctggaaggtgagcaccgcgttggtggtggcggtgtcgtaggtgccggtaatgtcgccgtcgtagtacttcagctcgtacagcgcgtactgcagctgctttaccttgctgccggtgtcgccctgctgcagcttggagtagctgccgctggcggaagtgccgccgtagagcaggcgctgggtggtggggccggccatgccggtgacccgcaggcccatggccttctggaagtccttcaccgcctgctcggtgccgctgccgtagctgccgtcataatcgccgttgtagtagcccttggcggacaacgcgctctgcacagcctttacattggagctgttggaaccggaggtggaggaaatggtcgtgtaaccattgctggaagccttcgcgccgtagctggccgggctggtactgctgccggaagagctgccgccgctcgagctggaaccgccgttgatagcggcataaatagcgttctgagtcgctttgcccgcaatgccgtccgccgtcaggccgttggcttgttggaaagcagtgaccgccgccgtggtgccggagccataatcgccgtccaccgagccactgtagtagccaagcgttttcagctgctgctgcagggcgcgtaccgcgctgccgttggtgccggggcgaatggatccaagattggctactacgctgctggccttcttcgcggaggaagaatacagcttggtcagggtcgttggcccggccacaccgtcgtcataaatgctgttgcgcttctggaaggccttcacagccgcttcggtggtctcgccaaactcgccgtccgccgtgccggtcagatagcccagcacgatcagccggttctgcaaaatcttcacctgcttgccggaggagccgatctgcaggtacacatccgtccggccgttggtgtagctggaggacgtggagctgctggaagaactggagctgctagaactgctggaagaagacgaactgctgctgttggtggcagaggccttcacggcgttcttggaatacagcgccgtctgggtgttcttgcccgccttgccgtccgccgtcagcttgttggcccgctggaaagccttcacggcttccgccgtgccagcgccgtacttgccgtccaccgagcccttgtagtagcccagctccttcaaccgctgctgcagcgtcttgacctccgaaccggaggagccttccttcagcgtggaggaagcggcggcggaagaggtcgtgggcttgggcgtagccgtcgcggaggccgaagaaggccgcggcgtggcggtggtcaggcccacggtgatggtgccgccggagggcgtgctggtagcggtcacgcccgacgcatcggtgctgctggcgggcggattggtggcgttatcatcgccaaaagtccacgctgaccagtccatctgttgcccgctggacgaagtaggagcgggcgtaggcgtgttggtcggggcaggggtgtcggtaataaccgtctggaaatcctgctttccgctgttatccagagcgttgcccgcatccaccacacggtcaggctccatatagcaggccgtcatcagcgcacaggcgacgatcaggatcagcgccagcgccaagcgtttcgcggcggacgctccccctttgcggttatcgctgcggaattgcttcattttatccacacctttcattgggcggttctgaaatgttacaatcttgtaacgaaacagcagtggaataccactacagtctcaatgggattataccgtcaaaacccaactaaatcaatacccaatattcttgtaacaatcatagaaacgaatgggattccgtttttcatgcaggaaagtgaaatatttttgtcatattttagcattccggcaccgtcactgactgatcgagtcgaagagaatataacgcgcattcccgcacggggtaaggggtggccttttccagtgcctgccggtacaatgacagctgccggcgataacggggaatcagctcctccgcgttttccacatggtcagtcttgtaatccgccagcacccagccgccgtcctcccaaaagcacaggtcgatcacgccctgtacgatggtgtcaaagggttcagtaatatgcagattgaagttccactcccggcggacgtttgtcgaacgcagcatccgctgacccagcgtcgaaaggaaaaacttttccacatgggccagaggaatcagcgccgcgtcctctgccgtcagcactccgcgtgccaccagtgaagccgtttcttcctttatataagcgtacagctcaccgcagtgcgctcgaacgccgtccagcggcagcagacccagcagtttatgggtcagcgtgccccgcagagctccggcgttttccacaggggttgtgagaaacgccggctcctgtgcaatggcgctgagcagtcttggccgctgcaccgtcaggggaatgcgtttgctttcagcggtctcgatctcctcttcatctgcggactggggctgtccctgctccatagcgcggcacagcgccgtcacgcccagcttcaagggcaaatgttcatattccggcaagggggaaagagggtcgcccaagctgggcagctgggcatcctgcttcgatggccacaatttttccaaatcgggcacttcattagaggaatcctcctctttttccatatcctgtggactcttttccgcagggatgtggaaaactaccctccaaggggcacttttatgtggaaaacctgtggaattgtcgaaaagttctggttgaccacaggtttcccataagaatgatgtgggaaactcatcgcccacctgctggttcaattcatcccatggcttgatagactggatcagccaatccagatagcaggctgcggaacggacagacgccaaatcgttgatttcaaagggtttgcgaagcacgttttccagaatcgattctaaagcatttttttcgtccgtagacgaaccaatcatcactaaacgatttttcggccgtgtcatcgccacgtacagaagacgggctttttcggcccgttcctccgcgccgagacagagctgaatcccgctctgcataagggtttgccgctttgtgcgcttttcctcattcatatacagaagggaaacgcccagccggtcgtgcaggctgacggtcctggtctgccgcttacggctcaaacccgtccccatccccatcacatacaccgtgggaaattccagtcccttggatttatggatggtcatgatgcgcaccacgtcctcccacgggttgaccaccgtgggcgagctgccgtcccccacctcccgctcccggatggagtccagaaatccgccgagcccctcctgatgaagctggaagtactcctccaatttcagacagagcatccgcaggttcgcctgacgcagccgtccgccgggctgcgcgccgtagtgggcatacaagcctgtgcgcatgagtgcatcccaaagatattcctgagggctcatgtgccgaaacaggaaccgttcctcttccagccgggtcagcaccgcccggcagcgctcctgcatggggtcgccctgcaagtccgccgtgccctgcaccgcgtcatagaagccgggcgcgtccgggaagttcagccggatatgggccagctcctgctcaccgaaatcgaacagcgggctgcgcatcacagaaagcagggacgtgtcgttccgggggttatccagtagcatgagcagctgcaccgcctgaatggattcctcccccgccagcgggctttgccccgcgtcggaatatacgggaatctgatgggcggtcagcaccgcctccacctgatcggccacgcccttgctgacgggcagcagaatagcgatatcccgatagtggagcacgccgccttcgctgccgggggacggcctgccaaccctgtccagaatatcccgggcgatccactcggcctcggtcttgggggcttctttggttttgcccacctgacacagatgcagctcggtcatggggtctttctccgatggcacgccgggatagagcatggcactgcggtcgtaatcgatctccgtcacccggcggtccatcacgtgcaggaaggtacggttcaccgcgtccagcacgccctctcggctgcggaaatttcggttgaggatgatcttccgcttttcggcagtttcctctgtggaaaaagtctccagcttgtgcagaaacagccccggttccgcctgacggaaccggtaaatgctctgtttcacatcaccgacgtagaaatacagctgaggaagcttttcgtcctcctccggcggacgcttgagcccgttgaggatgctctcctgaatggcgctcacgtcctgatattcatccacgaataccgcgtcgaaccgggcggattccaactttttcagctccgggtcgctgagcacgcccagcgtgaaatgctccagatcgttaaagtccagcgtggacgcgtcggtctttttctgctgataggtcaggtgaaaggtttccatggcccggtacagaccccgcagggccggaaccatggcgttcatatcgtccaccgccgtttccagccgaatgggcaaaagtgccttcagggactggatgctgtccttgtagctctggcgcagggccttgtaccgttcgacaaggcgcacctcgtccccggtgacgggcttgacccgggcaatggtgacgaaccggcactgctgcagccccgccaccatggaggaaaagccctcccgcattcgttccgacagggtgttcagcgtgtccagatcggcttcgatggttcggttcagcccttcggggaagcagctttcctccgacaggcggcggctttcgtcccagacccgcatcacgccttccagcatcagcgaaccttcccgaagaaagacctgcgccagcgagtcgttttccaaattgtccagcgtccacgttttttccgtctgctccttcagccatcccaacgggtcgggccgggacagcaggaacgcatacacctgctccatcacctgtaccagctgcttttccggcagcttgtgaagcagcgctgccagctccccctcggttttggcgcgggtgtacagggcttccagcgtttcctcctgcgcgtcccggtacaggctttgcagcgtgcgctcgtcccccagccggaactgcgggtcgatctggcagaaacggaaatgctcccggatgaccttctggcaataggaatgaatggtggaaatttgggactgccccaccagctccgcctgacgggccatggcggggtcgctgagcgccgcgtcccgcatggcggtctccagccggtcccgcagctcagcggcggcggcgcgggtataggtcaccaccagcatccggtcgatggaatagtcctcgtcccggatcaaatgaagaatacgccgcaccagtacggcggtcttgccgctgcccgccgcggcggataccagcagctctcggtttttcgcgtcgatagcgctttgctgttcaggggtaaaattcattccggctccgtccttccgaatgacgataaaactttccccttcattgtagcgcaaaccgcccatgggggcaatgagaaatcatattgcccggcttcctcccttgccaaaatgccccggttgggataaaatcatgacgagaacttttagattatttcccgatcatcatcaggaaagaaggaacgcacatgaccatcggcgcattggaagccggcggcaccaaaatggtgctggccgcctttgacgagaccggcaaggaactggaacgaatgaccatccccaccgaagaaccggcggtgacaatgccgcccatgcagcagtttttcgaccgctggaggatcgacgcgctgggcgtaggcagcttcggcccgctggatccgaacccggattcccccacctatggctacatcacctccacccccaagctgaaatggaaggattaccccctgctgccggagctgctgcagggaaagaacattcccgccgccatcgacaccgacgtgaacgccgctgcgttggccgagctggaaatgggcgcggccaagggctgcagcaatgtggtctatgtgaccgtcggcaccggcatcggcggcggcgtggtggtgggcggccataccgttcacggtctgctgcaccccgaagtggggcatatgctgctccgtccccatcccgaggaccccattccccacggcgtgtgcccctatcatgacggctgtctggaaggccttgccgccggccccgccatcggcgcgcgggtgcagggcgacgcccgggagctgccggacgatcatcccgttttcaagatcgaggctcattatctggcccagatgtgccagaacctgatcgtcaccgtcagccctgaaaagatcattctgggcggcggcgtgatgcagcgggagggcctgttcccgctggtgcggcaggagaccctgcgtctgctgggcggttacgtccagtccgaccgcctgttgaaccataccgacgactatatcgtttccccggcgctgtaccccgtcagcggcctgtggggcgcttatctccttggcaaaaaggcgctggaaaacgcctgaaatcttaacggcttctgaacgcccctttcactctgaaaggggcgtttttggataaaaatagatatgtttcagacattttttgcttgccaagggaggagttttctggtaaaataggaattgccaaaaggatgagatacaactcgataacccccttatttcgcgcgcttttttactgtaccctacattggtacgccaatgtaaaaatagaacttcacgaagttaaaggaggaacctgtctcatgaagaaaatcgtctctctggtactgtgcatcgccatgctcctgtgcgtcgctcccgccgcgctggccgtgaacgaggacgtgaccggcaccgttatgatctacacctccatgtaccagttcgtcatcgatatgatggacgaagccctgaaggccgaattccccaacctgaccccgggcaacgacggctccttcttcttctatggcggcaccggctccctgcagaccaagctggccggcgaaatggaaaccggtacgctgggctgcgacatgatgctggtggccgagcctgcctacagcctggagctgaaggaaggcggctggctgcacagctacgacacccccgtcaaggaaaacctgcgcttcccctatgacgaggaaggctactggtaccccgtgcgcgtgtgcaacatggtgctggcctacaatcccgagctcaagacccccgaagagctgcccaagaccttcaaggagttcgccgaggacaccagcctgaagggccgtatctctatgggcaaccccctgacctccggcaccaccatggcggccgtggccagcctgagcgacaagtacggctatgagtacttcaccgccctgggcaacaacgacgtgatgatcgaatccggctccaccgctctggccaagctgcagaccggcgagtgcgacgtgatcatgattctggaagaatccgtgctgaaggagcgcaaggaaaacggctccaagatcgcctgcatctatcccgacgacggcgttatcctgatcccctccaccgttatgaccgtggcggaagaccgtagcgccaacatgaacatcgaggcctgcgaagccatcaccgattacctgctgagcgaagaaggccagaagttcatggtggaaggctatatgcactccgtgctgaagggcttctccgaggttcccttcgattccgtggacaccgacggcctgatcgagaaggacatgggcgttgactgggtgcgctgctacaccatgcgcgacgagatccgcaccaagttccaggaggccgttaccattcccgaaaagaagtaaatccggttaacgcaaatcgcaaagggtgaataaggcgccgccgctgcagccgacgaccgatgcggctccgcctgatcctaccgacatgccaaatgggggaagttgtcctgacggcggcttcccccctgtcgtataacgactaatcaacatactggggagtgctgttcatgcagacacagcttcaacgaagcaaacatgatccatccgaaacccggtgtaagctgacgctgctgatcctgttttttctgggcgccgcgctgattttgggcggcttctggggaatccggcagtatcagcagtctggcttcgatcaggaagtaggctaccggtatatccaaaagctgtccggcgaagtggaaagcctgtatacccagtccatccagccggtcatggccaggctgacggacgcggagcgggagtccctgaccctcgaggccgccgccctgctgaaggaaaactggacggctgccgtcaaggccgaccagagcgcccgcacggacgaaatgctggccgggctggaaggcgataagctccagcagaaaaccatggagctgctttccatcacctactccctgaacgggcccaaggtggcttccgccgaaaagaagcagctggcccagtggacggacgcggagcgtgaccagaaccgggaagccctgcttcgcgcggtgctggacgaaaacgcgcccgtgccgcaggcggctgcttctgccgtgggcgagctcacaggcagcgaacgggccgccgcgctgatgcagctgtttctggtcagcgccaacgctcagaacgagcccctgcctaccgaccatgtgaacggcctgaaaaaagcggcccgcaacgccgaggcccgcatttccgcctacgaaatgacggcggacggttccgtgaccctgctttcccaagtgctgatctcccacagccgcacggccattctgctgggcattttgctggcgctggacatcgcgcttctgttcctgatgctgtataaggatcacagctggcatctggatttcaagtgggccgtcatcctcatcattgtggacttcatgctggttttccaggtgctgcccatggtgtatctgatcatcaaggccttcttcccggagggcagctttacctttgaggtattccagcggctgtacacctaccagatgaatctgggcgcgctgaagaacaccctcatcgccgccaccgtcaccatggtgctgggcacgctgatcgccttcccgctggcgtggctggtgggccgcaccaatctgttcggcaaaaagttcttccgttccctgttcgtgctgacgtacatggtgcccccctacgtgggcgctatggcgtggctgcggctgctgaaccccaacgtgggtaccatgaatcagttcttccgcatgattttcggtctgggcgatacccccggcccgctgaacatctacacgctgggcggcctgatctgggtgctgaccacgttctattatccctacgccttcatcaccatctcccgggccatggagaagatggaccccagcctggaggaggccagccgcatttccggcgcgtcccccctgctgacggtgttccgcgtcaccctgcccatgatgacccccagcctgatcgccggcgcgctgctggtgttcgtggcggccatgagctgctacggcatcccctccattatcggcgcgccgggcaaggtgcataccgtcaccacccgcatcatcgagtacaacggtctgggggcgcagggcatcagcgatgcgaccggccttgcggtcttcctgatggcgctggcgatcctcattctctacctgagcgacttcgtagtggcccggaagcagtacatcaccgtatccggcaaatccacccggcccaacatcgtggatctgggcaagtggcgcattccgctgacggtgctggtgagcctgttcgccaccatcgtggtgctgattccctttgccaccatcctgaccacctccttcaagatcgacgtgggcaagtccctcttcgacccggagaacttcaccctgacccagtggcagaccatcttctcccgctcggagaccatgagctgcctgaagaacagcctgatcttcggcgtggtcaccgcaacggtgggcatcgtggtggcctgcaccatgtcctacctgctgcagcggacgaagattcgcggtcgcaagctgccggacttcctgattacccttggttcgggcactccctccgtggttatcgcgctgggcctgattatgaccatgaagggcgacttcggcgtgaacatctacaacacggcctacatcatgatcgtggcttatctcatcaaatacctgatgatgggtatgcgtaccgtggtcagcgccatgagtcagattcacgtctcactggaagagtgcagccagatttccggcgcaagctggacgcgcaccatgcttaagattaccggccccctgatcttcccctccatcgccgcgggctggttcctgatcttcattcccagcttctacgagctgagcatgacgacgctgctctactccaactccaccaagaccatcggcttccagctgtacgagtactggacctttaccagccagcctcagagctgcgccatggccttcggcatcctgatgatcgttgtcgtcctgaacttcctgctcaacaagctcaccaagggcgaattctcgatctgatttacgtcagccgttccatcccatcttaaaacaccccttccgattgatatgacccctcttgccgccggtcgacaaggctcgaaccaagtgcaaagggatttcccacaaaaaggagttggaatcatgtccagcgtaaccattcagaaagtaaccaagaccttcggcaacaccacggtgctggaaaactttgacgccgtgtttgcggacggcgaattcatcaccttgctgggcccgtcgggctgcggcaaaaccaccatgctgcgcatcattgcgggctttgaaaagcccaccagcggcagcgtgctcttcgacgaccgggtggtctcctccgacaaggtgttcattcccccggaaaagcgggacatcggcatggtgttccagagctacgccgtatggccccacatgaccgtgtttgacaacgtggcctaccccttgcagatcaagaaggtggacaaggccgccattaagcagaaggtggagcatgtgctggaggtcgtccatctggcccagtatcgggatcggatccccagccagctgtccggcggccagcagcagcgcgttgcgctggcccgcgcgctggtggccgaacccgccctgctccttctggacgagcccctgtccaatctggacgcaaagctgcgcgagagcatgcgctttgagatcaaggacattcagaagcagtacggcatcaccgtggtgtacgtcacccacgaccagaccgaggccatggccatgagcgaccgcatcgtggtcatcaaccggggcgtcatccagcaggtgggctcccccaaggtgatctacaatgagcccgccaatcccttcattgcggactttgtgggcaaaatcgagtttttggagggccgcgtagaggcgggatacatcgccctgaacggctgcggccagaagctgccctacgaaggcgacgcgaagggcgacgtgattgtgggcatccgtcccgagcacgtgaagtacgccgaggcgggcaagggcacgctgcacggcgtggtcaaaacgcacttctatctgggcgacgtggacgactgccgcatcgatctgggcggcggcaaggagctgcgcatcatcgccgacccctacgagagcgttggcgtggaagcgggcaaggccatcgagctggacgtgcgcaacttcctggtctatcccgccgagcagcccggcgaagacttccgccgcatcctcacctaaggcaggggcagtgcccctgcaccccggactgcgcgctatgcgcgcaggggcgtagggggaaagccggttggctgcggagttaccgccgctcggcgacgggcctcgcggctcgcgggcaggggtagtacccctgcaccccataccgcgcccatagagcgcggggctgcttgagggaaagcgggttggctgcgagttaccgccgctcggcaacgggcctcgcggctcgcgggtctggcaggctcccttgtaaattggatgacatagaccgccgtggcacgacgggtgccacggctcgctgaacagtcgctgttattttcgaaaacaagccaaaagataaagaagcagggaatgctttccgaaggattggaaaacattccctgtctttctattgttggataaaccagagcctattgaggggtatgccagccatgaggcccgtcgccgaatggcggcctatactcaccacccggcagggagccgcactagaccggcgagccgtggcacccgtcgtgccacggcggtaaaaccccggccaactcgcatgtcccccgacgcccctgcgcggcaaagccgcgcagagatgggttcagggctttagccctggaagtcggccaggagggaggcgaaaacgtccagagccgcttcgatgggagcgggtgtggacatgtcgatgcccaccgtcttcagctcttcgatggggctcatgctgccgcccaaagtcaggaaacggcggtaggccgctacgtcctcgggagtgccgtgcaggatcttgtccgccagggccacagccgcgcagaagctcgtcgcatacttgtagacgtagaaggaacggtagaagtggggaatgcgcatccactcgttttccaccaccttgtccacccggcagccgccgccgtagtactgcttgttcaggtcgtagtacatggcgttcagggattcccgggtcaggggctggcccgcttcttccatggcgtgagccttcatctcaaattccgcaaacatggtctggcggaaaacggtggtgcggaagccttccagcagacggccgatcaaagcctgctgcgccgcctgattgcccgcaaacttcttgcgcagggcgttgatggtcagcacttcgttgcaggtggaggccacttccgctacaaagatggtgtagtcgctcttgatgaagggctgggtgtggttggaataatagctgtgcatggcgtgacccatttcgtgggccagcgtcagcagaccgtccagctcaggccggaagttcaggagcacgtagggatgcacgccgtaggcggagccgttggagtacgcgccggtggtcttgcccttcgtctcgtaaacgtcgatccagccgccgtccttggcggaacgcaccacgtcctgatagtccttgcccagcggggcgacggcttccagcagcagctcataggcctcgtcaaaggtcagcttcatctggaaatccttggtcatgggcgcgtacaggtcgtacatatggacggtgggaatgttgaaggcttccttgcgcattccgcagtaggcgtgcagcacgggcagcgcctcgtgaacggccttgagcaggttgtcgtagacgctgacggggatgtcgtccgggtacaatgccgcttcccgggcgctctggtagccgtgggccttggccatgaaaacgtcgctctttacattacccgcgtaggtggcggcgaaggtggagccataagcgccgtaggccttcatcatgcgctcataggcggccttgcgcacagagcggtcagggctttccagcatagagccataacgggcatgggtcagctcgaccatcttgccgtcctcacccttgaccttgccaaggctcatgtccacgtcggtgagcatatcgtacacattgcccgtagcgccaaagacttcctgaccgctggccagcagggtctccacctcggaggacagggtgtggggccgcatccgctccagatccttcaggaaaacgtcaaaatccccaaagtccgggtcggcgatgtagcctttcagggtagccttgggcagcttcaacagctcgggggacagaaaggccacggcggcgctgtactgggcgtacagggactgggcgcgggccatcacgccctgctggaaggaatcgccgttgtccacgttcaggttgcagctggcgtaggtgtacaggcggctcagatgctcgctggattccgcataggttttcagcagggaaagcacgacgtccttgccgttcttcagcgtaccggcataggaggccagctcccgggccttttcctgaatccactggaaatccttttcccaatcctcctgagaggcataaatgtggctggtctgccactgggcctgcgcgggaacgtccttgcgcagcaaaacttcgctcatgatgaaatcctccttgccgccatcaggcggaatttgttcaaaagtattgtagaccaaaggcatggaaagaatcaaggggaaaaggcaaaaacaggcaattacagccggtagcagcggtagggaacatcgtcccgttggcgggtaaagcggctttccttcatgcagcgaatagatcctgccagctcccggcgctcaaacagctccgtcacccccagccgggccagctccccggcaaaggcgtcgatgcgctcgcttctgccgggcgcgtccatgggcaggcgggccagccgcacgtatgcaaagctcaggcgctcccgctccagccgctcccggcgcaggggatcggcggtcagcgacagcgcgtccgccagacagccgtcggcctgctcgatgagcccttcgtccagataagccgcgtcgggcatgtcataaatgcccatgtgggtctgggaggcggcgttttccatcagagacaggcattgcagcacgccgggctccgcctccgggccgtagtagccccgcacaaaggagcggatcagaccgtccgtgtccgcgtccgcgttccagagcagccggctcagcagataaatacgcagcggcgcaaaggcgctggctttcccgggggcgtagttgccctgctccaacaccccctccacgccgaggcgacggaacagacgcaggttttccccgatcacatgccagttggggaagggctgcaaataattgctgaaattggtggtgtaatcccacaggtacagatggggcgcgattttggcccagtcggccagatcgtcggcgaaggcctgtccggacagggcaaacccgtcggcggcgttgttctccacgtcgatgccgtcgatggcctgacggcacacggccatgggatggctctgacagcactcgatgctgcacagccggacgatcacgttttcccggggccggagataccggggcgctttccgagtatacagataggcgaaggtgtgaatgcggttttccgggaattcctcccggacagcgtccgccacggcgttgacgaaggccagcatggttccggcgtggctttcctcccgctgatccacggcctgacagcgctggcactcacaatagccgtaccagtcgttctgggccacggaaaaaatccggcagtccggatgctcccgcatccagcggcccacgccctccacgcatattttcagcacgtccgggttggtcaggcacagctggctatgctcccgccggcgttttccgttcaccagcgagaaatattccgggtgagcgtcgaaccacttttccgggggaaccagctcctcaaaggtatgggagtagcgatagaagctgattttgccgcccatttccggcgaaatctccgcccgggcggagttcagcccgcattgcagggcgaaccgcccgttcagcgcaccccgccagtacagatcccgataggcgaaatcgggccgggaggaaaagctcatgggcttccactccgtgacggaaggcagaatttcacagtcctcggccagaaactgcgcccccagccgctccagcagggcgtatacgccgtagaccgccgcccgggggctttcgccctgaatatcggtatgacgtccagtcacggacacgcggtagccctcgccccggccttgcccggcggtcacggtgaagggatacccctccgggcgaagctccgcgccggtcatggcggtcaggcagcggctgagctcggattgggcgaagggcatattgccggtgataaagacggactggggaaggcgcatggaaaaactcctttttttggctcaatcggtgatagaaacgggcggatggatggcggtttcagtatagcagaaaggtggagagaagggaagagggaaagggggaaaagccctttggtgcgcccgcaggcgcaggccttctgccggtggggactgacgcgccgactacggcgcggaagtgggacttgcagtcccaaggggcgttcatacttttctttcgatggcgaaagaaaagtatgcaaaagaaagccagcggcacggcgactccgggaaaaaggctcctattgcccattttgacggcgggcctttttccctccgctgcctatcgccgctcggctctcccgcagttggcactgggcagactcaaccaatgcgagttgggatgttgcattgcagcttggatggcttcgcagcacagaaaacagtattgattttttcttctgcgcttggcactatgcccactcaaccagcgttgcttaggatacttcgaagcattttggatattttggcaacacaaaatgccagcgcggaatcaaatccacgctggcattttctgcgagccggagggc

SEQ ID NO: 940 - DNA, 32759 bp, Unknown
  16S sequences of unknown bacteria
tactcttcctgcctccttatacctctctgcgatgctcagatactccgcctgccgctccattgagatccccgtaaagcttccgccgtaaaaagcgatttcgatatgagaaatccccggatttttcccgatctgttttagatgcgattcgatgatccgcaccgtttccgctctgtccggcgccttctccctcgcggtgatcactctctgattacagaaaacacaatcatttggacagccctcatgaggaacaaatatcggtataatcgcatgtgtcttcattcacattttctctcctgtatcttcgttcgaaaaccttttatcaagctctgcgttttcgcgtttcagcttccggctttcatctgtgacgaaagaaaagctgctcttatgaaatcacggcagataaatgacagagccgatgtcagtaagaggctcgtcctcgaaataaatcgtgcggtaaccgcggcgtcccagaaacgcccggatagcttcaaaatccggatgtgcggacagatcgccgttaaagtacaccgcatcgccgatgcagccggaggcgccgccgagaaaaccgtattcaaaaccctctaaagccacaccgcctttttgtacggcgaggagatcgatcagaccgtcttcccgcacatcttcttgcgcgagatcgctttgtgtcagcacacgagaattcgaagaatcacagataccggatcgctccccggagctctgctgatctcccgccgctttgaaagcctgtctttcccggatttcttccctcagtatctcattgtatcctgtgatcgcccggatgattccctcatctgcggtgatcagcgcattgccgcccgccgtcacacaggaacatttcgtatacccctgtctgacggagataatctccaggccggcacctctggcacgatccagcagcgccggagaagtccactttgtgttatgtataaaaaaacgctccgtcaccgccgcattatatgctatgtcaaaaggatattcataaccgatgccgcccatctcaaagacgatatatcccccggaatctttggggcgcatcaccggaatgatcggagtttccgaaagatcatcgctctttcgttccagctcttccatataaacccgcctgagatccggctccatcacaattgaatcgtctattaccaatacattatttattttacacatataaatatccggatgtgaggaaatggcatcgtataccacatcggaagatttcaccgtataaatggtatgtcccgtttcctccagcgccgttcgaagcggcgcacacgctttttccgagataaaaatacttcccactgcagcctcccttttccatcccgtccgatctcgtcatccgagccgtcatcttcagctgtctggccggcgtctgcaaatgagagattgcaattccgcggtctcctgcagaaagccgcgattcccggaatcttacgattccgggaatttattcagatcgatcatatttacctccggcggcgatgcaaaccgcagcggaagcttcgtcattccgatgccgcctgtcacatacagcgacagatcgcttccgtccgaagccggcagcgtataacggcctttgatatatttctttccgtaagcgggaagaatataatcgtcaaacagtcggagattgatctgccttccgtgggtatgtccggacaacatcagatctacagagtaagttttcagttcatccgccacgtccggctcatggcagatagctatattataccgatcgtctgtcagagaagccgcaaaactgggatccccataaccgatcaccacgtcgtcgatccccagaatcgtcatattaaattcatcaaaatcagctttttcgtttaccaacagctggaatccgccggcctccatcacgtcgggataatcgaattccatctctccgccgtaatcgtggttgccgaaaacagcgatcttagccacctttgccttcagagacgcaagcgccgtttccacctctcgtatatcccctttataagtgctgaaatcgtcgatcagatctccgagaaaaaatataaaatccggattccggcggttaattttctctgttactttcttaaaatcttcgggtgtatagtactccgaaaagtgagtatccgcaaaaattgctatttttactccgtttggcagaacggtcagcttttcagactgatacgtctccgttttctctatcagcattttcggctcgatatacctggcgtaccctgccgtcaggaccgcgagaatcagcagacacagcactgttttcagaaacaggtgtcttccgcgccttcctcctctctttttcccagcccttcttctctcactcataccttttctcctaactgaaaatataacacagcgccgatgccccctgcctccgggagagacaggtttcgtttcagcagttccgcaaaagccgcggattgcacagaggccgaagaaacagataccgcccggcgctgtattgaaatcggcctcacgctccggtcaaaccgaccggtcagaactctgtttcgatttgaaccaatatagtttattctatgtttccagctaagtaaagaaatctatcgggataaaaatcttaattttttctctgattttgtcacttttcgtgcggttcaccggaggtttccgcttttctttgatcgtttatcgtcgatattaaatcgatcagctgtcccggggtttccaaacagtaatccggcacatactctcccgacgcagttccctttggaatagccgcgctccagttcaccaggacagccggtactcccgcatttttagcacagagaatgtcttgctttgtatcgccgaccatgacagcctgctctctcgatgattccagatttttcaaagcgatatcgatcggctgcggatcgggtttatgcttcgtcacatcgtccgccgtgatgatgacatcaaaaaatttttctattccgaatttatccagtccctgatatgtggtaggcttcagtcttgaagttacgagagccattcgaaaacctttttttcgcaattcttccagcatctcatacacgccgggaaacagctgaatcagatcaagaaaatgctctttctgatagcttctgtaaatttccacatttttttccacctcatccgcatctccgccgaaaaaatgatgcatcgtcattttcagcggttctccgaacgtggccagaaggacgctttcctccgcctttttcccccgcagctgctcaaaagtatactgccaggatttaatgatcatatcattggtgtccatgatcgttccgtcaaagtcaaaaagaatcgtatcgatatttttcatttctgtactcccatctgcacggcgtatccgttctcttgacagttttatgcttttttccgcccctttttcgccgatcccccggaaaaacttagaactccagagacttcggcgtcctcgggaaaggaatcacatcccgaatattcgccatacccgtcacatacatgaccatacggtcgaagccgagaccgaaaccggcgtgtttcacaccgccgtatttccgaaggtcgagataccactcgtagccttcttcctccattcccatctctttcatacgggccttcagtacctcgcggcgttcttctctctggctgcctccgacgatttctccgattcccggcgtcaggagatccgccgccgccaccgtcttcccgtcatcgttgagacgcatataaaacgccttgatttctttcggataatccgtaacaaaaaccggccctttaaaaacttcgtctgtcagataacgttcgtgctccgtctgcagatcgatcccccactctatcggatattcgaaagcttttcctgatttttttagtatttccaccgcttccgtataggtgattctggcaaaatccgcatctacgacagaaatcagacgctgcttcagaccctttgccacaaaagaatcgaaaaaatctacttcttccggtgcgttttccagcacataagcgatgagaaagcgaatcatatcttccgccagatccatatcgtcttttaaatccgcaaaggcgatttccggctcgatcatccagaattcagaggcatgacgcgccgtattggaattttccgcccggaatgtcggaccgaaagtgtagacgtctttaaacgccagcgcaaagatttccgcctccagctgcccgcttaccgtcagagacgccggttttccgaagaaatcccggctatagtccacggcaccgctttctgaccgcggtaatttccccagattgaaagaagtcacgtgaaacatctctcccgcgccttcagcgtcgctgcccgtaataatcggcgtatggacatagacaaatccgcgctcctggaaaaatttgtgaacagcatatgccagcagggatctgacccgaaaaaccgctgaaaaagtattgcttctgggacgaagatgcgcgatttcccgaagaaattccatactgtgacgctttttctgcagaggataggacggatccgacagcgcctccacttccgcactgcgcgctttgatttcaaaaggctgctttccctccggcgtcagctctacgatcccccgcaccgtcaccgcagaagctgtaagtacccgggagatctcttcaaagttctccagaaacgctttttcataaaccacctgaaccgaacgaaaaaacgtaccgtcatttaattcgataaaaccgaaggatttcgacgcccggtttgtccgcacccatccgcttatctccaccgcattgccggagagagatgcgtattctctatataaatctctgatattcaagaacatcaacctcctattacctgaaaaatcccgcaccatcgcggccagacagatcctgctgaaacagaactgcgacaaactccccggatcatatttccgcagagatctccgcacagcgccggagaatccctctcctttgcatttcccgtatccggtccctgccgccgtaaccccggatacattgtcgggatgattgtactatgccggctacggcgcagccttcgtttttccttcccgcgcggctcacctgccgtctgggaaccgaccgctgcgtgtccctcaaaaacccggcctccggaaacacctgtataaaaaccgtcttctgtttgcgacgagagctttgcccgttcaactatcctgtctcgcttttctcccgtaaatcgctgagttgaagctattataccataatcttccctgcggcgacgccgcaaggtcaacaatcagaattattataccataccggctgcagcgcagtcttcgtctttttcctgtcacgactcgcctgtcacggagagacaggttaatgtgtttttgttttatgctgtgcgatttttttgaggcagcagacgaggttccgcctccggcagagtaaatccttcgcttaaataagtgatcttattcgccagatattgaaactgttctctgttctcttctgaaaagccgatggtcacttcgtgagaaaacaaccgatcgattctcaaatcggcacacattacatctacagacagcgtaatcgtgccgtcctgattctgccggcagctgcgaacctccggcaccagtgaagaatattcaggaagatggtcgccgtaagacgactgccagggatagcttttatttctgctgtcgtacagcgtcctttggcgaaattccggcagtgaaatatcaaaatacggcaaaatagtacgttcaaatatcccttccggaatacggtaataatagtacggatctgtaaaagacgggtatgttttttcatcaaaagaactgccagtcttcatctcatacagatactccagcagatcattgaaacagagatccccgtaatctgaagaatcccagctgcagagaaacagatttgctccgctgtatcccaccggactgatatattttttgcggtaatcgcccatctccggatcctccggctccagacgaatcattacatagtcatctgaagcaaacgaataggaatcctcgaaaccatagtaaaaatgtttccgttccgtcagctcccagccgatgacagtattttttccaaagccatcgatttccatcccacccttttcatcaaaagataccgatgctgtaatgcagtatttttcccctttgcaaaatctcaagctgcaatagtaaaaaccgccggaaggttttacccagattaaattctgctccgccgtctccttcccgctcttcatcgattcccaaaattcgaaaatctcttccggattttcgagaaaaggagggcgaaccggatccgtattgagaacgggaaatccccgttccgccagccggtcctcaatccggtcgatgagatcccgattcggattgccttttctgtttccgtctccgtccgcgcccttttctcccggatagatatcgcaatacatcgagaccactgcttcacactgcgctgtcagatcggaaatttccttttcatcgattttttccgaaagattccccctttctgcattccctttgtctcctgccgaatcgctctctcctgtctcaccccgccagtcggcggaaaacgcgctgtcagctgtatcacaggccgctgtgaaaattataacggcagcgatcagagctgccgcagcaataaattgtctcatccctcgtcttctttctttaaaattacatttgtagtattaaattttaaaataccggggtgtttccgaagaacagatttccgactccggaacacccccgttttatcacgatgataccatatcctgcagatcatacggtgacataaattcccttctcccgcagaatttcacaggcgatctccatcgcccggccgccggaagcgccgtcttcactctgaagactgaccgcaaagaaaagtgtcttctctcctttttccgcaaatccgacaaaccagccgttctgcacctctgtgccgcggctgcctgttcctgtctttccgtagagtctaacgtcccctgactgagctacgagcatcgcttctttcaccgcagagacattctcttctttaaagccgaattcattgtgatagaattttttcagcagctcggtctgctctacagcagaaatcttcagtgcggaaccgttccaataagtttccgtatcttttcccacatactcattgccatagccgattttccggtaaaattcttccagtttccgaattcctgaccgacggtccagttcactgaaataccagtttaccgatcgctgcatggcggaggacaggttctgctcctgattccaggaagaaaaagcgtattttgttccgttccacgggattacactgtgatccggcgagatcagaccttcttccagtgcattgagcccgctgtaaatcttatatgtagaacacggagacactctctgaaaagctttccgacggtcatatacttcatatctgtcggcttcctgatcatagacgaccgcgcatcccggcacatctgaaaaatatcggctgaagtcatgatcgatgacagtcatcgaatcctccggccgataaacatcttccctgtctgaggaaaatgcggaaagcaccggaagctgaaaaattatgacacacgctgcgacacacagtaccgacactcctctcagcgatgttctccgactttcccgtctgaaattcgtgatgcaaagaatccggcgcttcagtccttccctgttgccgcacagtccgctgacagtgtacagattctgcatccgatcccgggccgcaaaccgcaaaagcgtctgaccgtaatccctacgcgcctcatcatcgcgcagcaggccgaggaccgaccagtcacagtagatctcacgatcctgacgcatctgcgccacagctccccacaaaaaaggatgaaaccagaaaatcgcctgcactgcacaaaacaaagaattgaccagattatcccgatggcggacatgcgtcagttcatgaagcagaatatgctctacttcccgctctctcagagattccagacagaatcccggaacaatcacatattgcttcttaacaccgaagctgcatggaacgctcaaaagatccgactgcagaaaaacgatattttcccatttctcttccctgatccctactctgagacagcatctctgaaagagttctttctggtgccgcggcggaaatacaccctttcggtgaattgcccgcaaccggatgaaaccgtgcagataaatacctgcggcgatcagaactccggccagccacactgcgagcaaaaaagcacaaaacgccgaacgatccgcatcggtaagagtgtccgtgatatcttccgctcccatactcgctgaaaaaccgaggtgtgtatcatcagttccccctctgacagaagatgctgcgataccttcataaagcatcgccggtgcagaaaaattccgcaacacagaagagggaaccagaaccattccgagagacggcagcagaaggaaccagatataataatgatattttgcggaaagtctttcgcccagcagccgtttcgtcagaaaaataagacagataaacaaagctgtgaaaagattactcacgatcaaacgcataaccagcataattaccgcctctttttctcacgcttttcattcagaatcgcctgaagttcatcgagatcgctgtcactcagatcattatcattgagaaaactgaccatcatctgattcagcgctccatcgaaaaaacgatggagaaacgtgcctctctccttttggagataactctccttcggaaccgccggcgaatagacgaaaatacgcccctctttctcatgatacagcgccccctttttttccagccgcgataacatcgtctgaatcgttctcggactccagtcactttccttcgacaacctgtccacaatatcatttgtattgatcggcgcgtatttccatatgacattcatcacctcaaactccgcatcggaaatctgcggcaattttttcatttatatcacctccctgacagtattttcggcaaaagaccctgccgggcttttttcctgccccgcccatatttttgaagcctctgccatcacagccaacggctatcgtgcatataaatcttacatttgtaatacttattttattcctttttctctgtgaagtcaaggcaaaactccgcaagatcaaaaaacaacagttgcgggatcagcgataccgctgatcccgcagctgtcatactcaaatcattcccaaagactacgctgtctttttattctgcttcaaaccccagatcagagcgatcacagccatgactgccgtcaggcctgcgcccaggaagaaagagatctgatttgcattcgttccgtcgctcagagccgcagacaccgggttgacgatgtaaggacagaggaactgagcgaaattctgcgcgcacatagtgatggaaatcgccatagcggaagaaaaggcgtttacagaacccgccgttcctacgatgacgcaaggcatgcagacggacagagaaacaccgaacaggaatgcgcccagataaatcatcggcatcatgcccgcaaaagcgatgaccagataagagataataataccgcaaagacctacaaataatgtgagccctctcgccgcgccggataatcttccgaataccagacccagcaggaatcctccgatggcgaagaacgccatagcgttgccggactgtgccgccgtacccagacccttttcatctacgataaaggacagagcgatagaataaatctgcgctccgataaagagaacaaacatcgtcagagcccagatccatgaacccttcgtaagctgtactttctgagccggagcatcggaaactttagccgcggacggtttcacattaggaatgcacacgatacagagaacgagtgaaataattgcgagaagatgtacaaagaatgcgaaattccaggaaatatccgccagccagccgcctgcgaataccatgacacagatacccagcatctgcgcggaagtcagattgccctgaaccttatcgcgttccggaccttcaaaattttccgctaccagagcggaagacacgcactgtacgataccgataccgatacctaagataccgcggagtaccagaattacagtcagagaagacatcagcgccggcagaaatccgccgataagaaagcacagaatgcctatgatagataagagtttcttggatacggaatccatcagttttcctacgatcaaagtgaccggtatgactaccagacacggaattgagatcagattctgaatcatcgtctgagaagcgtcagggaagtgtgcaccgatggcggtgagggctccggaaataccgataacacccatcatcagaataccgatgccgtaaattccgattttgatgcgggatttgttttccataattttttctccttatgttacaagcctgcagatgcgcttagtccatctgcggacttctctttgggggcagcgcagagaaccgttttaccgcctctgcgctgtatctgctgcagtgcccggacacggaataatcccgcgccggcagccgcttcttccatttccccgcatatcgcttttgccgtcaggcggacaaaatcgatttcgccgtgttttttccatcggtctgaccggaaacagacccggttcggccgaaagaaaatccgtatctgccgattactgatctttggcgctcatctttcccggaactctgatcaggagcaccatgacgagagcgacggcggacagtaccagcatgtaataaaatgttccgttataactgcctgtcatatcctgcagcttcgacgccacctgaggcagataagaagctacgaaaagattcaggttgataatactgaaattcagcgcataatgctgctttccgtagaacttcgcaatgaacgcggagtttgtaggcgttacgcctccgtaggcaaagcctaccagtgcataggacagtaccagaacggcaaagttgcccgtaaaggatgctgccagaaggataactgtcgagatcacaaacagagcgacggcagacatcatcgtcatacgatagcccttcgtgtcaaacatcgtgccgaagatgacgcggccgataccgttgcagacagaaattacgcccgctactgtcgccgcagtctccagatcgttgcagatcgtatccgcaaacgtggtggaattgcccacgatacacagtccggcagcgctcagcattaccgcccagataaagaagaaccagaaattcttcgtcttcagcatgctcttggaatccagttcagcaaaaggttctgatttcttgctggacgccgtctgcagacccgccacgtcggaaggagccggtaccttgagaaagaaagaaagcaccaaaacgataattccgaaagcgataccgaaatacatgaatgtatctctccagccgatttctccgatgagacgggcgcctacctttccgacgatcagagagctgatgccgaagcccatcagaagtattccgctggccagaccggtcttatccgggaaccatttgacaatcgttcccatgatagcgttatagcccagacctacgccaaatccgtacagcacgccgtacgccagatacagagccggcagcgaagaaatcatcgaagaaagaaaaagacccgcaaacatgagcgccgcgctggcgacagccgggatcttaggtcccgtctttccgctgatgacgccggacaccagtcctccgatacagaaagtcatcatagagatagaaaatgtaaactgcgcggaagaaatagtccatccaaattcgtctaccagtgttccccggtatgtcgaccaggcatacagagaacccagaaccagcagaatgatcgttcctacaatcagctcaatccagcggaaagaagaactctttgacttattgttcgccatctgttccccctcctaaaaattcttccggaatgtcatcgcctcttcctcacctctgaggacgcgaagcgctccgtttgccagcgcatccatctcgttttctccaggatagatgaccacaggcgcgatgaaagaaacacgttctttgatccagtccgtgaaaaccttagaataggcaattccgccggtgaggacaatcgcgtcgacctttccgtttactacggtagccagctcaccgatcgccttggaaagctgataagccatcgcctgatataccgtcttggcattttcatcgccgtcgtcgatcatcttttctaccgttctcgcatcttttgtaccgagatacgcctgcagtccggaactgttcttcaatttctttttcagagctttaatatcgtattcaccggagaatgccatatcgatcacctgcggcgcaggaagacctcccgctctttccggagaaaacggaccttcttcatcattgatgatgtcgataatctttccgttctgatagacaccgacggtcgtgcctccgcccatgtgcaccgtaatgacagtcacgtcttcaaactttttcccggaatctgccgcataccggtgtgccatagcgcgcatgttcagattatgtcccagacttcttctgcgcatctccggaattcccgtatactttgcaagcggaatcatttcatccaccgtcaccgggtcgtagataaatgccggaatatcgttttcctccgcaatggagaatgcgataggcgcgcccagattagacgcatgttcattgaccggatgcaggcgaagctgatcgcacatatcctgattcacgcggatcgcaccggcaggcaccggcggaagcagtccgcctctggacatgacgcatgtgagctcggaagccttcacgccgttcttctccagttcctccagaaccagcttctttctgaattcatactgatcataaatcgcatcgtatttttcaatctcttcatccgcatgctcgatactgttgacaaagagctgcctgtcatcctcgtagacggcgatcttcgtagaagtcgaacccggattgataactaaaatcttttccatattttccgcctctcctttttaccagaacttaagacctgtaagatccgccacctgatcgtttgtgatattctcacttcctgcggccacagcagctgccaggacgatagaattatatttctcttcggaagaagagcctctcgatgtgagaatgataggaacctttgctcctacgatgaggcccgccatcttcgcaccggccatctccaccagagatttgcccagcgtattgctggtaaaaatattcggagaaagaatgatatccgcatctccggccaccggactttcaaaatgcttgacttctgctctttcttttaccagagcgatatccaaagccaccggaccttctacgatacagtttttgatctcgccgccggtatacatatctttcagctttccggcttccacagattccggaatcttcggatctaccttttccgcattggcgagcaccgcgaccttcggagcttcatagcccagcgcgcgaagggtattcacggcattgaccagaattcccagcttcatattgaaattaggcgctacattcatgccgccgtctgtagtgagtagaaacttgtgataattcggcacatcattgaccgcaacatgagacatgacgccgcccattccgagaccgtgctcttcgttgaccaccgctctcagaatctgagaggtttccagctttcccttcatcaggaaatcgccttttccttctctgatcagctgaacgcccagagccgcagctttatcaaagtccgcttcctcataaatttcaaaggcttccgcgtcttcaccgatttctctcagcgtgtttttgatcgcttctgcacttccgatgaataccggctccacaatgccgtcttttgccgcttccatcactgcctcgagagtatgcgcgtcgtctgcggatactactacgatctttttcgtgatgccggaagctttgactttatcgattaaatctgtaaagttttttaataccatgtctttctccttccgagatttttcctttattcagataagccgcaggtgcaaatcacacctgcggcttccgtccctatgagagcccgacgaatttattcgccgcaattcttcgttatttcctttttacacttttcctgtgcgtctgctcccaggcagtacgttcggatcaaatccgcgggaaacagagattccggatttttccgtactctgttctggcccatcgttctgtcagaaaactcttttttccacaatatcgctctttggcaatcagtctgcgaaaatttcttccggagtcatatcgtgaccaggcatcggatgttcgtaagcgattctggatacgttcatcaggtgatgatatgtgaggttctcagagatgctgttgccgccccaagagccgcagcctaaggaaaccgtaccttcgagaccgttgcatctcgcgtctccgcctgcagcgtgtcccggctgatttacgagaatacgtcctacagggagtttcttcgctgccgcgaggatcttgtcgtcatcgttggaatacataacagcagagtgacctgcaccttccttatagaggttgatgcaagcgttttctaccgcctcatcgaattccttatatgtaacgatagcaatagcggttgtcagtttttctaagcaaagcacgtcttctgtgccggttgccttgatcatgacagcagctctgtctgcagggatttccacgcccgccatcttgccgatcgtggcaggaacctgaccgataacatccttattgagcttgccgttaataaagagcgtatctctgagctttgcaacttccgcttcatcgtctgcccagtaagcgcctgccttgatgcacgcagccttcatcgcttcgtagtcgtcctcgtgaacgtggatgcactggttgcccgcacagataactcccaggtcaaaagttctgccgtcgatgatctttgcagctgcatcgtcgaagtcgatacctctgtcgatgatggactgagagttaccggcacctacgccgaacgccggtttgccggatgaataagcagcctttaccatgtcaggaccgcctgttgccagaattacgtcaaccttcttcatcaggagaccggaaacgtctacgtcaggctgatcgatgcagagcaccagatccgcaggaccgcctgcagcgatgatcgcttcgttcatcagttccaccgtcttcatcgtcgtctttttcgcacgaggatgcgggcttacgacgagagagtttgcacacttgaccgcacacataccgtttaccagcggagtgatcgtagggttggtcgtcggagtaacacagcctaaaacgcccatcggctttgccagtacgataacgccgttttccggctcttctctgatcacgccgatggaaggcttgcctttgagttccgcccaagtacctgtggacttgccgatatttttcatgaccttatgttccggatcacccatgccggtctcttctaccgccatcttaccgagctcttccgcattttcatagatggcaaccgccatagcctttaccagcttgtcgacctgctcctgtgtaaaagtagctaccgtctgctgcgcttttctggatctttcgatgtattcgtctaccatcttttcctttttcgcatagatggcaggaagttcagaaaacgggtcaaacgctctttcaacgacttccttgataaaattaatatctggcattttaaaaacctcctgattttttcttgaccgacatacgcaaatgtatgtctattggtaaaaaatatattacttcggagcggctctctgagagagccgcttcctaagaaaatgctgtagtttcaaaattatgcgtacatttccttcagaatcttgagcgcgtcttccggagtcatctttctcgggttgaacgcctggaagaattcctcggaaattgcctttgcaatctcttcaaatttggattcatcatatgcgaatgtcttgatggaaggcatcttgcacttatcgtagatgaaagtattgagagcgtccttcgtcatctttccgatttcctccggtgtttcgctgccggtgaatttcacgccgaatgccttacctacattcttcgtcagttccggaaccgcaggagcgttgaattcgagtaccagcggaagtgcgtatgcacatgccgttccgtgcgggatatcgaaatatccgccgactgtctgaccgatagagtgacccgcatgagtatgaccgtagatgagaaggaagcccgcctgcgcagctgcgactgccatcttttctcttgccaccatgttggaaccgtcttctaccgcctgcgggagatattctgcgatcgtatccatgatcttctccgcatagaagtgaatgaatccgtttgtcagcgtacccgtataggattccaccgcatgagctaatgcgtcgatacctgtggatgccgtgagcttcggcggcatgcctgccatcagttccgggtcgacgatcgcatactctgcgaatgcgccctgatcggaaatgaagttctgcttgatgtgattttcatcggaaaggatggaaccgtcggacatttcagaaccggtacctgctgtcgtcggaaccatgatcaggccgctgccgcattcaaaatgctttgcgccgtttgcgtactgaaggagaggaccttcattgaaacggaggatgttcacacccttcgcagcgtccatgttgcttccgccgcccacgccgatgaccatatcacattcttcctttacgaggatgtcgtatgcttcttctacagaggcgagctgagggttcggcgttactttgtcataaacgacataagggatattttcattttccaggccgtgctttaccttatccaccgtacctgtagcgatcatgccggcatctgcgacgatgagagcttttgttgcgcccatgaacttcgctaattcacccagctgattgattgcgccgtttccgtaaacgacttttaccttttcatacatctgaaaatttaacatttgcaacctccttgaaagtctggaatgtgttaaaaaattaaaagtattttaattaagcgtaaacatttttagaaaaaaaccggaaacttccgtataccgcaaagaatatatgcaattattccgaaggtacagacatgtctattcgccatcttcagataatttctccctgttttcgtccccgttcggagtacaggtgctttcactaaatacacctgtacgtctgaaacgaaggacaaaattggcttagaatttatttttcggcggattcctcagcgctctcgactgtggcatttgtcgtattgtttctcataatggctgcggatattccgccggaaaattccactcaaattctccgacggctttgccctaacggagaaaatgcttcattccgtagcggtttgaaaaaagacatcacgaaatatacatactcgaatgtttgtttttgagtaatgaattttccgatatttatttttttgcaatgtcgatattcaacgaaatctgttgaaatttcaacatttatttttcttgttaatcactattattgctattgtttctattattttctctttcagaattgtatttgcatacatgagtgtacgctatatctataaaatatcacgacaatcgagctttgtcaataatgccaacaatagtaatttaaatatcaagtttccgctgattttcctataattttgttaaattcttatatattattttgtggtttgatcgaaaatcaaaaaaattataatactcgtttggattgatattccaaatgttttaccaattcttcaccttttcttcacatactttactgaatgtatatgtttttgtaccaaactgttataaaattaacatttctgctgtttcaggaatatttttaagagattttatggaaaaaaatgataaattttaatgtgcgacaacacacgttttgtcaaattagaacaaaacccggcgaatccgtttgatcggcgctcaacaactgaacttcagcacagcgctgtctccgcctgactgctgaccgaacgagaaaaacaggtatctttcgagatttctcaccacacaaaaacagagcggaagccgggagtgattttatgtaaaatcactcccggcttccgctcaattacgatccggcgaatccggccggtttaaagatcaaaacagaacggtattttgccggtacgcgccgaaatatttcagtacagcttcgcacctgcaggaatactgtcatccaccatcagaagattcagaccttctctgccgtcgacctcgtgtactgcagagatcagcatcccgcaggaatcgattcccatcatcttgcgcggaggcagatttgtaacagcgatgcatgttttacccaccagttcctccggctcgtaatattcatgaatgccgctcaagatcactctgtctgcaccggaaccgtcatctaaaacaaatttcagcagctttttgctcttggcaaccgcttcacactcttttacttttacagctctgaaatcggactttgcgaacgtctcgaaatccacaaattcctcaaacagcggttcgatcttcacattggaaaaatcgatttccttcgctttggaaacagagctgtctttcgctcccccgttcaattttcccgtttttttcggcaactccgtcttttccagcggcttcatcgtcgggaaaaggagaatatctcgaatcgacggctgattcgtaagaagaataatgagccgatccacaccgattcccagtcctcccgtcggcggaagccccacctcgagggcattgacatagtccatatccatcggatgagcttcatcatcacctgcttccaactgctcctgctgcgccttgaaacgattatactgatcgatcggatcattcagctcggagaaggcattggcgatctcccacttgttaatgtaagcctcaaaacggttagtaatcctcggatcctccggattcctcttcgccagaggagaaatttccaccggatgccctgtgacgaaaatcgggccgtccagtttatcttcacagaattcttcgaagagttccgcgataatcttgcctctcgtcatcttttccgcatcttcaagatgatgcttcttggcgatggcctgcgcttcctcgtcggttttcacctgggagaagtcttcgcccagccagcgcagaataccttcctccatgctgattctgtcccacggaggagtcagatcgaaagtcttgccctggaattgcagttccatggttccgtagagttcctgacacagagaagccaccagattttccgtcagctccatcatgtcattataatctgcgtacgcttcgtaaagttcgatatttgtaaactccggattgtgacgcgtatccatcccctcatttcggaacattcttcccagttcatagacacgatccagcccgcctacgatgagtctcttcagataaagttcgttggaaatacgcaacttcatatccagatccagcgtgttgtggtgtgtttcaaagggtctggcgttggcgccgccggcgatcacggtgagaatcggagtttccacttcaagatagccccggtcatccaggaactttctgatgcctttaatgatcacagctctcttgcggaatacctcccgtacgtcttcattcatgatgaggtccacatatctctgacgatatctcatgtccgtatcggtcagaccgtggaatttttccgggaggacctgtatggatttagagagaagcacgatttccgccgctctgacggagacctcccccgtcttcgtccggaataccgcacctttaattcccacgatatcgccgatatcataggtcttaaaaatcttatattcttccggcgtaatattgtctctggccacgaagctctgaattctgccctgcctgtcctgaatgtcgataaaagatactttgcccatgacgcgtttcgccataatacggccggcgatagacacgtctttttcttccagctcttcaaagttgtctctgatatcggcgctgtaatggctcacgtcccatttttcctgcagaaacggatctcttccgtccgctctcagctgttccagcttatctcttctgatctttctctgctcgtttaattcctgttctgttttctccggtgaaacgttgttccgctcttcgctcatattttcctctcctgatcactgctttttcaacaaatgccaggcagcagccgtcccgatccacagctgctgccggtattttacttcctgtatatgccggaattaatgtctggaaatttccaaaaccttcagatgaatgattccatccggaatttccaccgtgacctcatcgttgacgctggttccgatcagcgcgctaccgatagcggattcgttggaaattctcccttcaaacggatcggattcatttgaacccactatggtatattcctccacctcgcccgctccgatgtattccactctgacggtatgaccgagattcacccggtctgaagtgatttcagattcatcgatgacctttgcattccggatcatcgtctcaagcttgagaatcttttcctccagttccgcctgctcatttttcgctgcatcgtattcggcgttctcggaaaggtctccgtaagagatcgcttctttcagacgttctgcaacttcgagtctgcggactgctaccagttcctcatgctctgcaaccagtttgtcataaccctcctgggtaagtaacacttcatctcttgccattttttcctgtcctttctgcgccgctgcagcagcggtgactccgatattctctctattcttcctgagcgcggctgagaagatggtccagtgctgcaaagacctcttccggatcctccatcgcgttgatttttctccgcatctccgccgcgccgtgcattcctttcagataccagcctatgtgcttccgcataatccgcacgccggcatacgcgcctttttcttccagcacgctggtgaaatgttctttcacgatacttattttttcttccgcggaaggaacataatcctttccttcacacagagatttaaaaatccagggatttcccagcgcccctctcgccaccatgaccagatcgcagcctgtctcttcaaacatggatctgcagctttccacatcgaaaatatcgccgttccctataactggaattttcaccgccgctttcacctgacggatgacatctctgtcagcggttccgctgtaaaactgttctctggtccggccgtgaacacacactgcgctcgcgcctgcggcttcgattcttcgtgaaatttccaccgcgttgatatttttttcattccatcccgcgcgtatttttacggttaccggcttttttgccgcgcggactgtcgctgagacgatttttgaaaccttttccggatctttcagaagcgcagagccatccccgccttttacgattttcggcacgggacagcccatattgatatcgatcatacagtttcttctcgaggaaagcgcgtctgctgcataagccatggtttccggatcagagccgaagatctgataaaccaccggcatctcctcttcccggattgtcagcagtttttccgtgattttatcattgtaatacattccctttgcgctgatcatctcggaatagaccgctcccgccccgaattttctgcagagacgccggaaaggactgtcggtaattcccgccagaggagccataaaatacggcgtatcgaaaaatatgccgccgatttcatatttcttcattctgcgcggccgcctattcttccgcatgcagctgaatattttctctgctcatattgctgcggtttccaaaattgtttttattcttttcataaatcaggctgagaccttccagcgtcagcaggcgatccacatgatcgatcgcctttacgcctttcgaaaccatagtcgccagaccgccggtagcgactacggtgatatcgtcagcgctgctgccggtcatttcctgatactcttccttcatcttgcggatgatataatccactacgcccatatggccgtagaccagaccggactgcatgctctcgatggtattgcggcagatcgtatgccccggctccaccagctctactctcggaagtttcgccgtcttttcgaaaagcgcatccgatgagattttaatcccgggagcgatagtgccgcccagatactcacatttctcagaaatacagcaaaatgtagtcgccgtaccgaaatcgatgacgatcagaggcccgccgtatttggaatatgctgctaccgcgttgacgattctgtccgctcccacctgcttcgggttatcatatttgatgatcatcccggtcttaattcccgggccgacttcgatggctctgatattgaagtacttgattgacagatgctgcagagtataggaaatagaaggaaccacagtggagataatcgcgtcctgcacctctgtcatatcaagtccgtgataatcaaacagactttgaatcagcattccgtattcatctgcactcttattcttatcggtctccattctccagctctgaatcagtttctttcctttaaaaacccccagcacgatatttgtatttcctacgtcaaatgcaagtaacatatcttgttttgtcctcctacgttcgggcatattcgcagttttctactgcttatcggactcgttctccttcgaagttctatccgacttttctccttcagttgcgtcattagcaaacttttcttccgcctgcgcgtcatgttttttcttattttcaaatacgatattctccgctttcatattttcaaagcgcagatgaagagtattttcctgttcctgctcagccgccgccttctctgcagcgtattccttcgctgcttcttctttctgacgggcgattttttccgctttttcgtctgctctgctgcgggctgcggacacgatctcttcccgtgtcttttcgccggtatagagagattcgaactggtctgcatccagagtttcgatgtccagcagcgtctccgctacaagagtgagtttatcgatattttcttcgagaagtttgatcgccttttcataagcgtcatccaaaagacgttttacttcctcatcgatggccgtagctgtggcttcggaataagcggcccgctttgacgtaaaatcattgccgataaatacttcgccggaatcgctgtaattaacggtaccgattcgtttgctcataccgtattttgtcaccatatcccgtgcgatggctgtcgcacgttcgatatcattgctggcgcctgtgctgatatcgtccagcacgagggcttccgccgcacggccgcccaacaggtgaacgagagactccatcatatgattttgggactcataactccggtcctcctgcggcagaaacatcgtcataccgcctgccatacctctcggaataatcgtgacctgatgcacaggatcggaatttggcagattgcggataagcacagcatgacccgcttcatgataagcggtgagttttctctctttctccgtaacgacgcggctctttttggccggaccggccatcactttcgtcaccgcctcttccagctcttccatcatgatcgtctttccgtctctgcgcgccgtgagaagcgccgcctcattgagcacgttttccagatccgcaggagaaaatcccggcgtcatctttgccagaacgctgagatctaccgtctcatccatcggtttattcttggcgtggacgctcaggaccgcctctcttcctctgacatcgggcagaccgataacgatctgacggtcgaatcttcccggtctcagaagcgccgggtccaatacatccggacggttggtcgccgcaaagacgattacgccttcattcagtccgaatccatccatctccaccagcatctgattgagcgtctgctctctttcgtcatggccgccgcccagacctgcgcctctgcgtctgcccaccgcgtcgatttcatcgataaagataatgctcggagaatttttcttcgcctgttcgaacagatctctcactctggaagcgccgacaccgacgaacatctccacgaaatccgaaccggaaatgctgaagaacggtactccggcctctcccgacaccgcttttgtaacgaaggttttacctgttcccggagggcctaccagaagcacgccctttggtattctcgcgcccagagccgtatatttcttaggacgacgcagaaaatccacgatttcctgcagctcctctttttcttcttccagaccggcgacgtcgctgaacgtgaccttttttccgtcgctcttgtacattctggcgcggctcttgccgaaagacatcgccttgcccgctcctccctggctggaattcatgaagaccatccagatgacgacgaatatgacgatcgtcagcagatacggcagcatgctgacataccacggagtcgtcttcggcggttcgctggtgaccaccagcttgccgtcatacacctgcggcatcaccagatcattatttatcaccatcagctgcagactggaaggcgcataggcatggatgatatctccatttttcagggtaccctgcatatccgtctcctgcagcgtcagttcctctacattttcatttctgagctccgttacaaactctgaaaattcaacctccttgatctcctgttctgactgtgaatccataaaaaaatatgccataactatgacaaataggaaaatcagagcataaatcgacagagttttataccatttattcaattcaagcctcctttacgcaggttcaaaaacccaattatcatcgtattttaccatagtgcctgtcaatattcaatagaaacaatgctgatgctgtcaggcttttcacagcattccgccgatacctcccggcctgcggaaaggatctcctccccatcggctaagagcagaatttcatcccgaagatgacggggaattttgcggtctacaaaaaaatcctgcaatttcttccggccggtcatgccccggagacgtatcctgtcaccgggatgtcggaatcgaaagacgagaccgcggcgctgtttcaaaagctcccagtcgaaatacagcctgattttccgctctgtctcccactgttctgaaccgccggcggcggagtcttcttcgccgccctctttttccggttttcttgccagtttcagttcctccgcgctcattttacagagcgtaatcctgcttccgcaaaaatcaagctccgcccttccgtacgcttgaagctcggcaaaaggaaacgcggactgcggatcatcgccgttttccggaaaacggcgcagaaaccagagttttccgtaagacagacgcacgtaattcccccggaccagatcagcctcacggttttcttttttattcagcagatccagcaccgcattgacccgggattcatccagatcctcgccggcgtccgccttttttgcagcctgcaggataacccgcttcagaaccgccggatgaagcccttccagttcactgatctgcagggatttttccttttcatcccagcgcttttctataatcttacccgctgcggacatgagataatcatcatcttcccgtgcgaatttgcccagccggataagagcccggtccacggcaggattatatatacttttcaaatgaggaaggagttccagccggatcttatttctcgtataaaccggtttgtcattcgtgctgtcctgcatgggagacagaccgttatcccggcagaaatcttcaatttcccgccggctcatatccagaatcggccgtatgatctttccatatcccgcatcccggacatactccatgcccgaaagaccggcgacacctgttcctctgagaatccgcatcagtatcgtctccgcctgatcatcgctgttgtgagccaccgctgtcctttccgctccgatttctctgctcactctttcaaaagtttcataacggatccgtcttccggccgcttcgcttcccgtcctccaacgttcggcctctgcagatacattgaaacggtaggaccggaattccgttccgagagcttccgacagacagcgtgaatacgcctcgtcccggtctgcctcttcacctctcagcccatgattaatatgaaccgcacagatccggcggattccaagttcttctctcagctgaaccagaccgcacagcagacacgccgagtccggtcctcctgaaagtcccacaactacgctgtcgccgtcagagatcatgtcataacgcaatatcgtctctctcattttttcaagatttgtattctgattctgaagactcatgaaacttcctttcacatattttttctgatattcttcattttaatccgcaatccggatatttcacagcctgcgcagacctcagattctgtcgcaggacagagaattttgtcgtcttcttcccctgtcccgcgccccgctttttccgttaagattgaaatatattatacgacgaaatgattcatcggaggtcgaaatgctgcaaagacagaaaaataaaaatgaaaatagccgcggtgcggctcgtaccggtttccccagttcgaaatttgcccgccgtatcagggacgtcggaatatcatccgaagccgcgcccgccttcggtattctgtccggagcctgcggtctgccaaaagccgtcggaatttccggagacaatcatatctgcagaaaactgacaagatccacttatgtcgtagccgtcgccgacggcatgggcaccggccgcatggcgtcggagtgcagtaagttcgtattggagagtctctatcagcttctaagagtcggtctctctcctctggacgccgtctcatcgatcaatgccgcgatcccactcagcatctcgtcggaatgtttttccacggtagatctggcggtcttcgatctcagagaaggaatctgcagcatctataaagcggggggcgcgccttccatcatccagagaggcgaagaggcgggaatattaaaaatgccggctcttccaatagggattatagaagaaccggacataaagtatacgacatttgcaatcgagcggggcgacagatattttttcatgtcagacggtgtcacggaatcacctgtccctgacagacatctgtcctgggcgaccgaactgatcctcgaacatcccagcgaaccgccccgcacaatttccgagcggctgctctggggcgccacacttcgctacggtcagacagaacgggacgatatgactgtcgtcaccgtagaaatcgtctgatcttctctctgctccgttattcgattccatagaatctttttgccgtctcacaggtggcgcgcgccacttcctccagagatatgccttttaactcagcgattttcatagctgtgtatctgacataagaaggatcgtttctccttccccggaaaggcatcggcgtcagataaggcgcgtcggtttcaatgcacatgtgatccaaagggatcgccgcgatgatttccggcgctttttttgcgtttttgtaagtcacaggccccgcgatggaaaaatagcatcccatggtcagatactgtcgggccatctcagcgctgccggaatagcagtgcatcagtactctcgtattttcaaacgctttttcttccttcaggatccgcatcacgtctccgtgagcttctctgtcgtggatggcgatgggtttgtccagtttcaccgctaactgtatctgacggcggaaccagtattgctgcacatcatggggaacggttttccagtaataatcgagaccgatttccccgatagcgacgactttgtcttttttcgcaagtccctccaaaagaaaaaatgtgtcttcgtccagcttatctgtcttctgcggataaaatcccaccgcggcataaatccacggatatttctgcgccagcttaaccgcattgctggaagtctccagatccacgcccggattgaccacataagaaatatcgcattcctttgtcagccgatccagcaattcatccctgtcttcatcgaactcgggcacatcgagatgtgcatgagaatcaaataatgtcaatttcatatctatttcacctgatttccgtccggcgcttctgtggttacgatttccaggcgttccccgctgtcggcgaagagaatcatccctctggactcctgtcctctcagcctgatggacttcagatttgccaccacaatcacatgttttcccggcatctcttccggcttgtaatatttcgccacgccggagacgatctgccgtacttcgtcgccgatgcgcacctgaaataccagaagtttatccgccttcggatgcttttcgcaggctaccacttctcctacgcgcagatcgattttctcaaaatcctcgatagtgatctccggtttgatttccggagaaccctttttctccgccggaacattcgcggcatccttttccgcttttgccttcgcctccgccatagaagccgcagtcatggcctccagctctgcaatctccttttcgatatcgagccgcgggaaaataggatcccctctgcgtacttttttgccttccatcagatcaaaatgtccggcatcctgccacctcacctcctcttccgcaattccaagctgaatccggattttctcggaggtattgtgaagaaacggatgaatcagtacagagatcacgcggatggattccgccagatgatgcatcacggtatcgagacgagacttcgaagtctcgtccttcgccaaaatccagggagcggtctcgtcgatatatttattggttctccgtatcagtttccagatctcttcgagcgccagattgaagctgaacttgtccatatacgcttccactctgcccgcagtacttttcgccatttcgatcagttctccgtccggatccgccgccccgccgggtgcgggaacaatccccccgttatatttctcgatcatcgccaccgtacggctcaccagattgcccagatcgttggccagatcgtaattgaggcgattgagcatcacttcgttggtataaagaccgtcctgcccgaaagcatactctctcagcagaaaatatttcagcgcgtcgatgccgtatcgttcgatgagctttaccggatccaccacgttgcctctggacttggacatctttcccccctccaggagaatccagccgtggcccatcactttcttcgggagaggcagttccagcgacataagcatcgcaggccagatgaccgagtggaaccgcacgatctcttttcctaccagatgcacatccgccggccagtaccggccgaaaagttccgtatcctccgggtaacccagagctgtgatatagtttgtaagcgcgtcaagccatacatagatgacgtgtttcggatcgatgggcacagaaatgccccagtcaaacgtactcctggagatgcacaggtcgtccagcccctgacgtacaaagctgagcatctcatttcgtctggattccggctgaagaaaatccggatgattttccagaagatcgatcagacgatcctgatatttggagaggcggaagaaatacgcttcctctttcgccttttccaccggcctgccgcagtccggacatttgccgtccgccgcctgaacctccgtccagaaagattcgcacggagtgcagtagagcccttcatactcgcttttataaatatctcctttttcgtacatcctgcggaagatatcctgtacgcgcttcacatgtctgtcctgtgtggtgcggataaaatcatcataggaaatttccatcgtatcccataatttttcaattcttccgacgacatcatccacatactgctgcggcgtcacaccgtttttcgctgccactgtctggattttctgaccgtgttcgtcggtgcctgtcagaaatctgacatcgtatcccgtagctctcttaaaacgagccatcgcatccgccatcaccgtacaataggtatgtccgatgtgaagatcggcgctgggataatagatcggcgtcgtaatataaaatgtcttcttatcctgcatatatctaaactcctttttcttatttctcctgattatcttgtatgtaaaatccctttgcggagaactctgttcttaataaaaaatcatatcatatttatagctgtttatcaattttctcatagtaaattacccctttccgagggatcagacctttttatgtgaaagttttttctctccgtcattcaaaacagcttgccggtgctccgccgcgatattcatcaccactgcgctgatgagaaaaaccgctcccagcaacgcgaaattgcccggacgttctcccagcgccagaaatacccaaagaggattgagaactgcttccagcacgctgataagagaagcattgacaggaggcgtgagacttactccttttgaaaacatataataagccattccgatctgaattgtacccaaaaataccagcgctgcggcgatctgcggcgtaaaatggagatcctcagtcacgacaaaaggcaggccgattactatcgtcatgagaaatcccagcatattggcgtccgcattactcgctcccggcatctgattcaccacaaacatagcggcaaaaaatacaccggccagcacgccgaaaatattacccagcatctttcccggatccagctgatcgcagaaaaacagaatcatgccgaaaaaggccgccgtcagcaggatcacatcccgccgcttcggcagagtcctctctctgacgcactgcatcgccagcacaaacataggcgccgtgtactgcagcacgatagcattggcggctgtcgtcattttattggaacatgcgtaaaatgtagtgctggcaaaaaagcaaaacgcccccagcagtatagttttgttgatttttatacgaaaactccgccgcatagccgcaaaaaaaagaaatgcgaaaacagtccggaaaaaattgacgacgattccgttaaacgggacagctttcattatgagtccgccggtagaccataaaagggcggcggcgagaatataaaggttacctttgctggtgcggttcattgctctaaaaactccatcctgtttcatatctcccgtctcaaatcggaaaaaagctccaacagatccgcccgatcaaaacacgggaacagttcctatcagacacagggaatagcggcatcatactgcgagaagaaaaaaacgaaactctctttctattcctctccgcagaaaacggctgaatacggatttcccctgcctttctctgttttttgcggtactttccgcagaataaatcaatggtaacaccgcaaaagtgagatagcaagaagaaataacagatccgtccagcgaatgccggcagtgatgtataaggcgcggaacaaaaatcagaatcgcaaaaaatttgcacagttccggcgaaaaccgcccggacggctgcagaaagaagagaacatcaaaaaataagaaagcatccgctggccttcggatgcttcccccgataaatcatcggttgatatgttaagagtgagtaaatacctaactttgggatgccagagaatcgtttttctttctccctctgacaatatccattatatagatttccgtcaagaaagatatggtccaaaaaggatactatttctttatccgatctttacctcgctttccccacccttttaaaatttctcataaccattgatattacttgtttttatcgtcttcatccgatcccggcgctataaaaatttatttggacatcatttttttatatttcgcgatagcgtctgcttttttgtttacgcccagtttatcataagcggaagcgatatgttttttcaccgtggaatgagatacaaagagaatctttgaaatagcctccgcggtatgtccctctgtgaccaggtccatcacttcgcactcgcgctttgtcagaagaattctccttcccccgttattccggcagatttttctggcctccacaaattgcttggacagaggaataatccgccttgcaaacggcgtgccgatcgcctcgaggatcggaatcagctcataggcgtgttctgcgaaaatggtgacacagtcgtccggctccgctaacttcagagactcttccagcagcggctgcgcctccgccagaccgctggtatgatatttgcagatacactgaaaattgagacttaatataacgccgatcagattgcgcttttccgtatacaactggtacgtatactgacacacagtctccagctgcgtatagtctccccgttcgcagagaactttcgcgacgatgatatatcccacatcccgcgcaggcgccataagctttgcctccgatacattgccgtctctaagccatctcgggatctgatcatgccggcccatgtagctgtagacatatcccacgataaattcgtaacagctgagcatgatcggatttcccagcacttccgcctcctgcataagctgaagaagaatttcctccacttctttgatatttcctttgctcagggcgatgcgcaccatcagaaaggacgcggaaaaaacgatgccgtgctgttctctggcccgcgccttgtacagcgctttgtatacatacatttccgcctgctcgaagttagccacaaagtattcccgttcggccctggccagatattcatagcccgcgccgcagccgttggcgatatggttaaatatctcaaagtcttcttctatcagctccaccagccggagcatctgtcccggcttctgatgataaagaaacagcgtcagcggaacgccaaaagtgataatcgtgtccgaattgaagattttcgaagatccgccgttaaaatactcattggcgagtttataacattcgaacat

SEQ ID NO: 941 - DNA, 7107 bp, Unknown
  16S sequences of unknown bacteria
ggtcatcatgctcgaccgggacgaaaaaaaactcgcggaggcggcggacgaaatacgcggcaaagtcagcggggcggaaatatcggcaatgacagcggacgtgggagaacgcacctcgctcgacggggtcataagcaggctgaacgccgaaaatccggatatcctcgtgaacaacgccggcatatggcgggacaacatgggaaaattctgggagaccgacccggacacttgggtgaacaggtggaagatcaacgtcttcggaatgatgtatctgacgcgcggacttctcccggggatgatcggccggaaatacgggcgcgtcataaatatcgcgtctgtcgcgggtgtctacggcaacgcgaacatgaccgactactcgacgacaaagggagcggtgctcgcgttcacaaaggcgctcgccaaggagacggcaccttataatgtcctcgtgacgtcggtatcccccggaaatatcggtgacaccgagcatgacaacggtctgtcgttcctcggccgcggcggcagctttgacgagtgcgccgagatgatctgcttcctcgcgagcgacaacgcgagttactgctccggacaggattttcaggttgacgggtgcaggaagaaaatgtgaattaaaaaatggggctgtgtcaaaacgcacaaccccgttttcttttattcaattatcccttcgagctcagtccacttcatgggctgcggtctcgtatacggagacgtgatatccctgaattcacccttatccccgcacctgattatcgaggtcattatctcgagaacgtgcagcgtctgctggcatccggcgcgcatcgactttccggtttcgatcgactttgccatgtcggcgagcccggcggcgcggctgttttcccggtaattgaaacagagcggaatcaccttcggctcctctccgcggcggtggagaacgacgtccccgccgaacgtgttcgggtcagggcagtagagcgtgccctcagtgccgaatatctcgagcgcgcagccggcgcggtgggtcgtgtcgaacgacgtctgtatcgttcctatgacgccgctctcaaaatgtataagcccggcgatagtggtcggcgtctcgactttcgtagtctcaccgaagtgctccttgcaggtgaatatcctcttctctgacggtgtcgtcgtgagccccgcgaccttgtccgcccttccgagcatattgacgagcgcggtgacgtagtagggtcccatgtccatcatgggtccgccgcccggcttgtagaagaactcggggtccggatgccacgactcgggtcctctgccgagcatatgcgcgtggaaggaggtaggcgtgccgatgaagccctcgtcgatgagctttctcgaggtctggagacccgcgcccatgaacgtgtccggcgcgccgccgagcatgagtccgcgctccttcgcgagcttcacgagctcgacgcccttgtcaaatccggtcgcgagcggcttctcggagtagacgtgcttgcctgcctcgagcgcggctttcgtcacctcatagtgatcgttcgggcgcgtgatgttgaggacgatatcgaccgacgggtcggcgaagagctcatacatatcctgataaaccctgacgccgtactcgcgggaggcgttctccgctttttcgcggacgaggtcgcagacgcccgcgatttcgagctccttgtagagatgggtgatgttctggaggtagatgccgctgatacagccgacgcctacgaaacctatgcgtgtctttttcattgccgttatttacctttcgttggatgataaggatattatactcttttagcggaggtttttcaagccataattttgtttttacaggacatgattttgactttttgcgccatcagattctctgacctcttttgccttcgcggatgtccttcaggagccttacgacggcgtcgcgctcggttttgtcctctatcttgtagagctcagcgagaacgaggtcggtcgcggcgattcttgtgtcctcgtcggcgaggtcagcggcgtattccttcagggcgacgagcgaattcagacggttcagctcgccgagctcgccgccgccgatcagctcgtcgcgtccccttccgtcgcgcccggtgatatcgcatccgtcggtgagtcctgcgacgacgccgcgtttcgcgagggcgaggacggttttcccgagttctcccgctgggacaagcaggtcgtccgcgatcgtaccggcggttatcgtgatgtttttgtcgttctcgtccggctcgatcatctcacagagcgcttccgcggcgtcaatggtgattccggtggtcggaagcgcgcatctcacggcggcgagcaggcggacaaaaacgtcatccggtatgctctcacgagtgatgacgacgcggcgcgggcgctttgcctcgacgtccatgacgagcgcgcagacgtcctcgaggaagttcccggtgagcttcgccgtgagaacagcctcgtcgggaatcgagagaacgcgcgtaaagccttcctttttcaaccggtcgctctcctcgggtgtcccggcggcaccggtgagggtcgtcacgcgtgagaagaagtgctcgcgtatctcgcgcgccagagagcatatcgcctcctcggacgccgtcagcgcgacagcctcgcggtggtcaagcccgcccgcgagctcagctttttcgatgaccgcggtgaggtcggaggtctcgagcgcggtttttgtttcttcttttataagtaactcattctgcatgattgaacgttcctttcgtgaatctggtattatatcagtaattaatttcaaaagagatctccgtagatcggtatcagtagctgcctgtcaccgaatcgtttcggatatctgatatcgctgcttccgttgttatatgatgtggcgctcaagacgaaatccgcgcgggacgaggaatcgtcagcaatgatagatctgatacgcgacacgctgacctttgatttcggatacataaattccggcgcgtttgacagcgcgggtcatctctgggtcgagctgctccgcaagggaagcaatgatctctcgtccgagtacgcgaagaaaaaatcgtcatacgagaaaaagctcgacgctcttaacgaggcgtatacatcataagaaaaagctgagctattgtcgttttttcataaaaacaagcagaaatgggctgtcgactttgcgacagcccctatagttatgctctgcgccatatcacaggcgagagatagcgtgcttagcgtagtactacctgcgttcaccgggcagggaaatgcgcccaggcacctgcccagcctactctactcaaagttcttcagcagctcgtcaagttttgccatcacggttgcctcgtttgacgccgctaacgacgccgcgtttgactcctgattctgaaccatgttcgtcagtgcgttgatgtaatccgatgtcacgcctaaaacctgtgccgactcgagtccgtagttgtcacgcaccagctgaagcatctcaatcgaatcctcgtttctgagtcccttctgctcgactctgacgccataatagaccggcatgaccgagtcatagctctcgtgcgtcagcgcctcgatgatgtttccggtgcgcgaaagatccttcacggttacaggtatgacgagcatctgcgcactcacacctgcctgagaaatgtaatcttcctgctcttcgtcatacttcggtaacggtacaagtccataggaatcttccatgtcgcggtattcgctgagaaccgacatctgcgcggtaaggaacgccgagcgtccgtttctgaacacattcagatatccgcttggatcatctcctgtattattgtctacgtgaattattccacttttttcgtcgaacagtttggttatctttgtaagtgtttctatcagtttttcactcgataactgtactttatatccatccttatccggctcgacaaatctatatccgctcgaatatatcatcgccccgggtatactggtatgccccgcaatgccataaacagagttgcctgacgcattccatttaaagctctcatcgccgttcagattcgtacacttttgtgcgtattcatagaacttgtcaagtgtccattttccatcgcgaacaagctggtacggatactcaatcttcaggtcatcaagcttgttttcattgaacagcagcacccagaccgagtcaagtggcatgaattgcaaagctccggtagcaacgtactgcttgttgttaatattaaacgagctgttcagcgctctgtcccaccatatctcgtcaagtctgagctcaggtatggtgttcaggtcgacaagcgaaccttccgtcaggatagccggtttgaagtagggctgaatatacgcagcgtcgtattcatcgtcgccagccatgaccgaattcgttacacgatcaagcaacgctatctgatcagtttgccactgcgtgtacggcatcaaaacctgctcaagagtgaagttcagagcctgctcgattttgcggttccgcttatataccgcgtcatcgagcatatcgcctgactgctctgccaggtcaatctttacatactggttgaagtaactttcgaaattaagtaccctgaacttatacccaccgtaattggcatcgggtatccaacttgcttcggctgtctcatccaagggtgtgcctgtctgtgtggtgacgtcatgcgtgccctcgccgccgcaagatgtaatgaccgacatgagtatcgcgaggaaaagagttgcggtaatgtacttattgaacatattttttcctttcgaatatgaattttggatggcctttcagcacacatcaattataccatattctttatggaatgtcaatgaccgattcggcacagctttgtgatcgatcttgcacaaaatacattccggccgtgatccttcccgccgacttgccgctcataatgcatgtgccctgaatggcacgtgctcaagtgtgcgacgtggtcggctaggatgcatcaccacacagccaacatattcaagaacttcgcgctctcgagtggatccactccctttctgctgtacggctgagccgtcgcgttatttactttatcatccctgtaacgatattctcagcctcagcgagagccgcgtcgatcttcgacggatcgccgacgcccgccatagcggagtcgggtcttccgccgcccttgccgtctgtgagcttcgctacggcgccgacaagcttgcctgccatcactccgagcttcacggcgttcttgccgcagccggcgacgaggttctgcttgccctcaaaatcggtcgcgattatgacgacgatgttgtcgtccttcgacttcaggtcgtcgatgacgccgcgcgcggagtcgggggacattccggggacattcgccgcgacgagagtgatctctccgaccttcttcgcaccgttcattatgtcggcggtcttcgcggctgcgatcttcgcgttcagcgactcgatctcgtggtcggcggacttaagctcctccgtgatctgagcggagcgtttcgcgatgtctgcgggagcgcacttgagctccttcgcggtctcggcgatcaggaggtccttcttcttcatctcgatgagaacttcggtgcccgttatagcctcgacacgtctgacaccggcagcgacagaggactcggaaacaattctgaacagcccgatcttcgccgtgttgtcaacgtgagtaccgccgcagagctcggtcgagaagttgcccatcctgaccattctgaccgtgtcgccgtacttctcgccgaagagcgccatcgcgccctgattcttcgcctcgtcgatggtggtctcggtcgtgacaaccggctcgccgagcagaatgtgcgcgttgacgagggtctcgacggcgtcgagctcttccggcgtcagagccgcgtagtgcgtgaagtcgaagcggcagcgggtctcgtcgacataggagcccgcctgctcgacatgattgccgagaatggttctcagagccgcctgaagcagatgagccgcggagtgattgcgcttaatagcggtgcggcggatatcgttgacctctgcgcggacgatgtcgccgaccgcgatatcgccgttgactatcgtgcagagatggatataaacaccgtcggacttctttgtatcggtgacgctgatcatcgaatccgcgtcgtaaatggttccggagtcgccgacctgaccgccgccctcgccgtagaaaggcgtcctgtcgaggatgacagtgcagtcgccctcggaaacgcgctcaacggactcgtcgtcgacgatgagcgcgacgacctttgcgtcgtcggtgacagtctcagtgtagccggtgaacttcgtcttcggaagggaagcgagaatggtcttcgactggtcgctccagccggagatgttcgctctcgcggagcgtgcgcgggtcttctgcgcgtccatgagcgccttgaagcggtcctcgtcgacgctcagcttcttctcggcgagtatctcgcgggtaaggtcgatcgggaagccgaatgtatcgtagagcttgaagacctcttcgccggagatagtgtcgaccccgtcagccatcgcgcgcttagcgaggttagagagaatcgagagaccggcgtcgatggtggcgtcaaaacgctcctcctccatcgagagaaccttcaggatgtaatcgtgcttttcggcaagttccggataagcgcccttgttctgatccatcgcgacctcacagagctcaacgaggaacgggtggtttatgccgaggagcttgccgtgtctgagcgcgcggcggattattcttctgaggacgtatccgcgaccttcattggacggaatgacgccgtcggcgatcatgaacatcgcggacttgatgtggtctgtacagacgcggatcgagatatcgtcttccgtatcgtcgccgtacttcttgccgctgatctcggagactttgtcgaggatggcgcggttggtgtcgacaagaaacatattgtcgacgccctgcatgacgcacgcgagacgctcgagacccatgccggtatcgatgttcttctgcttgagctcggtgtagttgccgtgaccgtcgttgttgaactgggaga

SEQ ID NO: 942 - DNA, 11710 bp, Unknown
  16S sequences of unknown bacteria
gggaaagcggagagcacgagcgccgccacgaacgcgcacgcgccggggatcagcgtaaattccacgcccgcctctcgcatggcggacgccaatacattgccaggatcggagatgacgggggtgcccgcgtcggtgacgacggcgacctgtttgccctcgcgggcgagcgagatcaatttgtccgccgccgcccgctcgttgaattgatggcaggcgtacagcggttttttgatctcgtaatggttgagcagtttgagcgaatggcgggtatcctcgcagaaaacgcagtcgcagccgcgcagaacttccagcgcgcgcagagagatatcttttaaattgccgatcggcgtggcgataaaataaaccatttttttattcctttatttgacgttgacgagatcgggcagaacgtccacgccctccttcccgcccttggtgccctcgacgagcaacagatacggtttggcgtttgcgctgccgcgcacgaattgcagacgcttgggctcgatgccgcgcgatttcatggcgaaaagcacttccgccacgcggtcggcgcggttgacgagcgcgagccgcccgccgaatttcagtttcgcgaacgccgcgtccacgatctccgcgagcgtgaccgtgatctccttgcggcagatcgcttttttgtaatcgtcgttggaaaaaccgccgcgctcgtagggcggattggcgagcacgagcgaaaaatactcgtcgtattccttgccgatatcctgcacgcggcagttcacggcggtaaaatttttcaaaccgttcagcgccacggagcgtcggctcatatcggaaagatctttctgcatttcgaaaagggcgacgctctcgactttttcgggattgagcgcgtaaaaatgcagtcccacgatgccgctgcccgcacagaaatccgccgccttctcgtgcgctttcgctttgacgaaccgcgtcaaaagcacgctgtcgctggtaaatcggtacagtttgacgttctgaatgattttcagcccgccttccaacaattcttcgacgacttctccctcgccgagtttgcccgtaaattgtgtttccattgcaactatcatatcacagatcgccgttttttgcaaatacgattcgccttttacattgacaaaaccgcggatccgctatataatactaacgaaacacaagtacgttttagggttagaaagggtttcttatgcgcatttttatcaaattttttctgatcgtcgcgaccgcttcggtgatgatattcagttataaattcgtcatcgtgagcgacggggtcaagacggcgctcagttattccaatctgcatttcaacgaatacgacgcggcgaaaaagaacgaggtgatctccgacgtcgaaaagatctacacctatcgcgcgttcggcaggcagttttatattttcgaaaccagatataacggtcttttgctggaaagcatccgcccggacgaacttccccgcgaggcgttcgtgcattacgggctggataaggcgctggacaggctggacgaagttgccgtaaaagtaccgcactggggcatttttgcgggcgtcggactggtcatcgtcctgtttccctcctttaaaaaaaagaaaaaggcataaaaaaagggctgtatagcccttttttaaatgtgttgcgaaatcgctaacataatcggcaaccaaatgccgatccatgcggcgttgacaacaacgcccacgacgatacagagaatcaccgacaaaggtttggaaaggttggaacggagcaagatcgcgttgcaaaccgcgccgatcatacagaacaaagcgctcagtccgccgcctatcgcgccgccgaagcctacgccgaaaacgattcccaccaacgggaagaagatcaatatccattcgtaccaaagatttttgcaaaggacgatctcttccgcatctgccatgaccgttactcccgaaataaaatttccccttatacaataataatgctttgcatcctcttcttcttttacaaaggttttccgatctgctttcgcgatctcggtgccatctacgtacaacttacgtttgcccgtccaaaaattttcctcatacgtaatttccgagcccgctgccgaacgacctgttagtttcatgaatccctccaactatttttaatcattataacatatccgtgcagtgcttacaatcctttttttaaattcctgaacaaatttcgataaagtgttgcaaacaccatatcttgtgtttataaaaaattttttacactaaatattgacgcaagagtattgacaatcgcaaggggcggtgctataatagagccctaccgaaagttttgggaggattgaatcgatgtatcgcgtaatcaaaagagacggtgcaaaagcagagttcgacattcataagatcgttgtcgccatcacgaaagcgttcgaagcgcaggaaaaacagtatcaccccagcgtgatcgatatgctcgccctcaaagtcacgtccgactttgaaaataagatcaaggacgggctcgttgccgtcgaagatattcaggacagcgtggagcaggtgctcattcaggcgggttacgcggacatcgccaaagcatacatactgtaccgcagacagagagaaaagatccgcaacatgaagtccaccattctcgactataaagaactcgtggacagttatgtgaaggcgaccgactggcgcgtgaaggaaaactcgaccgtgacttattcggtcggcgggctgatcctttccaacagcggcgccattaccgccaattactggctttcggaaatttacgacgacgagatcgccaacgcgcaccgcaacgccgacctgcatattcacgatctgagtatgctgacgggctattgcgcgggttggtctttaaaacagctcattcaggaaggtctgggcggcatttcgggcaagatcacgtccgcccccgcaaagcacctcgccaccctctgcaaccagatggtcaactttttgggcatcatgcagaacgagtgggcgggcgcgcaggcattctcttcgttcgacacttatctcgcacccttcgtcaaggcggacaacctctcctacgacgcggtgaaaaagtgcatcgaaagtttcatttacggcgtgaacacccccagccgctggggcacgcaggcgcctttttccaatatcaccctcgactgggtcgttcccaacgatctggcggaacttcccgcgatcgtgggcggcaaggagcaggacttcaagtataaggactgccaaaaagaaatggatatcgtgaacaaggcgttcatcgaggtaatgatcgagggcgacgccaacggacgcggattccagtaccccatccctacctattccattaccaaggatttcgactggtcggatacggaaaacaacaaactgctcttcgaaatgaccgcgaaatacggcacgccttatttctccaattacctcaattcggacatggaacccagcgatatccgcagcatgtgctgccgcctgcgcctggacctccgcgaattgcgcaaaaaatcgggcgggttcttcggcagcggcgaatcgacgggctccgtcggcgtcgtgaccatcaatatgccgcgcatcgcctatctggctgccgacgaaaatgaatttttcaagcggctcgaccgtctgatggacattgcggcgcgctccttaaaaaccaagcgcaccgtcatttcccgccttttggacgaggggctgtatccctacaccaagcgttatctgggcaccttcgcaaatcacttctcgaccatcgggcttttgggcatgaacgaagtcggtctcaacgccaaatggctaggcaaggatatgaccgatcccaaaacgcaggaattcaccaaaaaagtgctcaatcatatgcgcgagcgtctttccgactatcaggaggaatacggcgatctgtacaatttggaagcgacgcccgccgaatcgacgacctatcgctttgccaagcacgacgtacagcgctatcccgatatcaagaccgcgaacatgaacggcacgccctattacaccaacagttcgcatctgcccgtgggatacacggaagatattttcgacgcgctggacattcaggacgaattgcagacgctgtacacttcgggcacggtattccacgcattcctcggcgaaaaactccccgattggaaagccgcggcgacgctggtcaggaagatcgcggagaactataaactgccctattataccctttcccccacgtattccatctgccaggaccacggctatcttgcgggcgaacagttcaagtgccctgtctgcggcggcaagacggaagtttacagccgcatcacgggctactaccgtcccgtgcagaactggaacgacggcaaggcgcaggaattcaaggaccgcaaggtgtacgatatcgcgaactcgaaactgcacgcgaagagcgcggcgaaagtgtgcgaaaaggtcaacgcggcggcgcccaaactggacggccccgtgctctttaccagaaacggctgcccgaactgcaagaccagcaaaatgatgctggacaaggcgggcgtgaaatatgcgatcgtcaacgccgaagaagacgcggcggcgaccgcgaagttcggcgtgaaaaaggctccctcgctgctcgttcccgaaggcgacgggttcaagacctacgacaacgccagcgagatcagaaaatatatcgagagcatcggctgatatgtacgacgtaattatcatcggcgcgggcgcggcgggcatgacctccgcgctctacgctttgagaaacggcaagagcgtattactgttggaaagcgagagccttggagggcagatcgcgacttccccgcggctggaaaattacccttccatcaaggagatcagcggcgaggcgttcgcggacaatttattcgaacagatctcggcgctcggcgcggaggtggagatcgaaaaagcggaacgcatcgaaaagcgcgccgataaaattttttccgtcaagaccgaatacaacgaatacgaggcaaaaagcgtgatcattgcctcgggcgtaaagcataagcacttaaagaccaagagcaacagggacgatttggtgggcaaaggcgtatattactgcgccatttgcgacggcgcgttttataaggggaaagaggtcgccgttataggcgacgcgaacaccgccctgcaatattcgctgctgctcgcgagttattgcaaaaaagtgtacgtttacacgctgttcgataaatttttcggagacgcacaactcgtaaaagcgctgcgcgccaaagaaaacatcgaagtgcgcccgaataccgccgtgacggattttatcggggacacggaactgaaagccatcgaatacacggataaagacggcaacgtatgccgacacgaaattcccgccgtattcgtcgcgatcgggcaggtacccgacaacgcggcgtttgcggacctcgccgacctggacaaagacgggtatatcgtcgcggacgaaaattgcaaaaccaaaacggaaggtctgttcgttgcgggcgattgcaggacgaaacccgtgcggcaggtagcgaccgcggtcgcggacggcgcgatcgccgcgaccaacgcctcgatctatttagaaagtttataagattttttttgcgttcccgccgctctcaattctgagagcggcgggattttattcgtcgaaatccgtttcggggtcgtcgaacgcctcaaacgccaggcgcagccccattttaaatccttcttcataacgctccaacatgagttcggaataaaggtcaccgtacgtatccatcacttgtccgaactcattttttaaatcttcattcaatttcaactcaaaatcgtcggcttttttacagaataacttttgtaaagttttacagttttttgtaagtttgtagatctgaaaatctcctcttctgcctaaataaatctgccgcatgaccgaatattttttttgcatatttactccttttccaatatagtggattttttatattatatgccacaatagtggaattgtcaagcaaaaatgaattatttatagtataatcatcttatggaaggcttcggaaaaagattgaaagaattacgcaaagaaaaaggaatttcggtcattgaattatcaaaaaaaatcaattactcgaaatccgtaatattttattgggaaagcgacgaaagggaaccgagtatttccgcgttaaaagcgctttgtgattttttcgacgtttctgccgattattttttaggaagataacgcctatataaaaaagccccgagtgcggcaatgccgcactcggggcttttcatcgttccgaattattcgtaatcgaccacgttcacccatttttcgaggaacgcctgttcttcggggatcgctttcatcgtctggctcgccgccacgatgggaagcgctttttgtacgagcactttggcaatgcccgtcttttccgaaaagagtttcagatattcttccgcaaggtcgtccttgccttccagtttgaacaaaaggtacgttctcgccgcgtcgcagcgggcattgccctgcgtagcgtgcgcccagtcgatgatgaattttctgccgtcgggcgatacgatcacgttcgcggggttgaaatcgccgtgcagaagtttatcgtgcttgggcaaagagtcgagaagaatgtgcagatcgtaacgcgtcgttttatcgaacttcgtcgccgaaattttgcggtgcattttatctttcaggggcgagagaagcggcactttctgcgagagcacttccacttgcagatcgacaaactcgtttaaaagttcgcccgtcttatcgggattttcttccatcagttgctgcatggtcttgccttcgacaaagtcctgaatgatcgcccattcgccgttgactttggtcacttcgtgcaccgcgggcacattgagcgtggtgctctcctccacgcgcgccgtattgagtgcctcgttcaaaacgtccgacttggggtattcgttgttgaacagtttgacgagcgttttgccctctctgtaaatggtctttttctgcgttttctgaatgatttccgccatgattttttcctccctcatttcccgtaatagcatttgagatacatttctttgatctcggagatcagaggatatctcgggttcgcgcccgtgcactggtcgtcgaacgcctggtcgcacatttcgtcgagcgtcgcaaggaatttctcctcgtccacgccgtaatctttgatggtctttttgatgccgacgcgctctttgagttgttcgatcgctttgatcagatttttgaccttgtccgcatccgtcttgccacccagccccagatagtccgcgacttcggcgtatctctgcatggtatgcgggtaagcgtactgcgggaacgtgcccattttcgtgggaacttcggcactgttgaagcggatgacttcggagatcatcagcgcgttcgccacgccgtgcggcagatgatggaacgcgcccagtttatgcgccatggaatggcacacgccgaggaaagcgtttgcgaatgcgatgcccgccatggtggaggcgttcgccatctgctccctcgcctcgggatcgttggcgccgttctcgtaggcgcgcggcaggtattggaagatcagtttcatcgccacgagcgcctgcccgtcggtataaggcgtcgccatgaccgacgcgtacgcttccagcgcgtgcgtcagcgcgtcgataccgctcgcgctggtcagtcctttgggcatattcatcatgaaatcggcgtcgatgatcgccattttcggcaaaagttcgtaatcggcgagcggatatttgatattggtcgcttcgtccgtgatgacggcgaagggcgtgacttccgagcctgtgcccgcggatgtggggacggcgatgaaatacgccttttcacccattttcgggaaggtatagacgcgcttgcggatatccataaaacgcatcgccatgtccatgaaatccacttcggggtgttcgtagagcacccacatgatcttgcccgcgtccatggcggaaccgccgcccagcgcgatgatgacgtcgggctggaattcgcgcatcagtttcgcgccctctttcgcacaggcaatgttgggatcgggcgccacgttatagaaacaagtgtggcggatgcccatttcgtccagtttatcggtaattggtttgatatagttgttttcgtacaggaaagaatcggtgacgatgaacgcctttttcttgccgagtacggttttgagttcttccagagcgacgggcaaacagccctttttgtgatagaccttttcgggcagtctgagccagagcatgttttccctcctctccgcgagtgttttgatattcaaaagatgcttgatgccgacgttttcggaaaccgagttgccgccccatgtgccgcagccgagcgtgagcgaaggcgtcgttttgaagttgtacaagtcgccgatggcgccctgcgaggacggcgtattgatgagcatacggcaggtcttcatcgcctcctgccacttttcgatcttcgccttttcggtgatcgtatcgatatagagggaggaagtgtggccgtaaccgccgtccgcgatcaggcgttccgctttctgcacggcgtcgtcgaaatctttcgcgcggtacagagcgagcacgggggaaagtttttcgtgcgcgaacgcctcttcgagttccacgctctccacttctccgatgaggatcttggtcgccgcaggcacggtaaagccgcagatctcggcgatctttgccgcgctctgtcccacgatcttggcgttgagcgcgccgttgatgatgatggtattgcgcactttatccggttcgtcgccctttaaaatatgacagccgcgcgccgcgaattccgccttgacctgctcgtacacgccgtctacggcgatgcacgactgttcggacgcgcagatcagcccgttatcgaaggtcttggaatggatgatagagttgaccgccacagtcacgtccgccgtgtcgtcgatgatggcgggggtattgcccgcgcccacgccgagggcgggtttgcccgaagaataggcgcttctgaccatgccggggccgcccgtcgccagaatgatatccgccgtcttcatcagcgtgttggtcatttccagcgaggggatatcgatccatcccacgatgcccgcgggcgcgcccgccttgacggcggcgtccagcacgactttcgctgccgcaatggtgcagttcttcgcgcgcggatgggggctgatgatgatgccgttgcgcgttttcaagcagataagcgtcttgaagatcgcggtagacgtggggtttgtggtcggaatgaccgccgccacgacgccgatgggctcggcgatctttttcacgccgtacgccgcgtcctcttcgacgacgccgcacgtcttgacgtccttatacgcgttgtagatatactccgccgcgtagtggtttttgatgactttgtcttccacgatgcccatgcccgtttccgcgaccgccattttggcgagcgggagccgcgcgttgttcgccgcgagcgccgccgccgtaaaaattttgtcgacctgctcctgcgaatacgttgcaaaaatttcctgtgccttcctgacctcgtcgatcttcgccatcaaggcttcgaccgaatcgacgatttggttttccatgaaaaccctcctttcctgattttatttttcgttgtataaaatttgttcgaggcgtttggacaagatcgcgagcgagcccgccatatcctcgtttttaacggctattttttcggaaagttgcaggtgcgcgggcgcaaagttccagatcgcgcgcacgccgccctccaccaattcgtcggcaactgactgcgcaaattctttgggcacgcagatgatgccgatttttacgttctgccgccgcacgaattcctgtattttgtccgcgctctgcacggtgaccgaactgattttctttccgatgagtttcggcgcggtgtcgaacgcggcgacgatattcagcccgtaattgcggaatccgccgtaacccaagagcgctttgcccagcccgccgacgcccacgatgaccgcgtccgtcgtgttgtcgtatcccaaaaatcggttgatgtcctcgataagatcggtgatctcgaaacccagtttgggctttcccgcgaccgacgatacgagcgccagatcctttcgcacctgcaccgcgttcaaatgcatttcctcggcgatcgccgtggaagacgccttcttttcccctttcgcctgcttttctttgagataacgaagatacgcgggcagccgcgcgatggtcgctttggatatgcctatattatcctttttgacttccattgcccctttccttccccttgcagattatcgatatttttttatcgataaaataatatcaaattatcggcgatttgtcaaaacagtaaaagtgaaaatttcgatcttttcggttttgtgaattattatcattttttacataaaataatcagcggacgaaaaaaaggcgggcctttcggtcccgcctttcgattatgcgtgaaaatcgtcgataatggattggatgagttcgttttccgaacggagttccgccgccgcacgcccctcttcggtggagaggctgctctcgttctttttataagcgagccgcgcgaaatggaaattgcggaagaacacgagcgacacgacgagcgcgacagccgccgccgcgtccagtatcatggcgggaataagtatttgcacgcccgaaacggtattgatgaggcaggtcagaacgatgcccgcgacgagcgcgacagcgaaacagacgagggaaaggtagaagggctttttgctcgcttccagcgccgccgataggccgtcgcgtttggatgcgcggtatgccgcgtccgcctcttcgagcgtttccgcttcctcggcgttttccgctatcttttgctttaggcgcgcgtcataggtagccgcaagttcttccttgcccgctttgcccgcacgtttcaaggcgcggttgtaggcgttctggcagtcgtatatgcccgaaaaatccgtcatatccttggtctgcacgcgcaccacgccgaaccaggctttccagttgccgccgtgcaccgccacgctgtcaaggtatttttcgcccgcgctttccaactcgcccgccgcgaacaacgcctccgcctgctcgaaaatcttttctgcctgcgcctttttttccgccacgtactgttcgtacaattgattttttgcggaaagttcgtcgcctgaaagccccacgttgtcgtcttcctcgcggaaccccgcaaaatcgggaacgtcgatgacgatctcttcgtcgtcctctttttcgggatgatcgagaaaatcttcgcggtttttacgcattttgatcttgccgtcgtcgtccaactgcatgtttctttcttccatgataccctcctttttattcgagaagtttcttttcctcttccgaaagggaaaaggggttctgcggcgtccgctttgcgcggggcgtcaccgtatgcgcgacgcgcgcgcggaatttgccgcggtattcttttttcgcccaacggcacaactcttcgctctcgaacagggcgaacgccgcgctgcccgatcccgtgaccgcgtatgcggcgggcgaaaattttgcaagttcgtcaagcgccgtctgcacgtcgccgttgagttttgcggcggg

SEQ ID NO: 943 - DNA, 9642 bp, Unknown
  16S sequences of unknown bacteria
gcgcggtgggggaattggcagaaaattaactggacttcggaaatgccttgtattaaaataaatgatactacacattaagaagaggtgatccaactatggcacggctgttctttggcgggatccatccggatgaccggaaggcgctttcccgtgagaaagcgatcacaccctttcccgcaccgaaacaggtgaccattccgctgtcgcagcacatcggcgcgccctgcaagccgctggtgcaggtcggcgaccaagtgacagtggggcagaagctgggcgataataccggcctttgcgtgccggtgcatgcgccggtttccggaaaagtgaaaaagattgcggctctgccgcacacgaacggcagcaatgtactttccatcgtcattgaaaacgacgagcagaacaccctttgtccgacgctgcacagctatgagtccatcgacgggctgacaccggagcagctgatggagattatccgcgagggagggatcgtcggcatgggcggcgcaacgttcccgacccatgtcaagctttcctccggcatcggcaaggtggataccatcattgttaacgctgccgagtgcgagccgtacatcaccgccgacgaccggctcatgcgggaacagccggagcggctgctgcggggcctgcgggtcctgatgaaggtcatgggtctggcagaggcccacatcggcattgaagagaacaagcccgaggccattgcggcgctgcgcaaggcgctgggcgacgcggaggatatcatggtacatccgctgcatacccgctacccccagggcgcagaaaaacagctgattcaggccatcacaggccgccaggtgccccccggcgggctgccggcggcagtcggctgcgcggtattcaatgccgcgacctgcgccgcggtgtgcgacgccgtctatgacggaatgccgctgattcgccggatcgtgacggtcaccggcaagggcgtggccagcccggcgaattttgaagtctgcatcggcacgtcgtttgcggagctgctggaggcctgcggcgttcgggaggatgcgtataaggtcctgtccggtggcccgatgatgggcgtggcgcagtttgatatggccgtgccggtcatcaaggggacgaacgccatcgtcgtcttctcccaggaggacaactgtgagaaagcgaacccccattgcatccgctgcggcaagtgcgtcggtgtctgtccaatgcatctgatgccgctgtacctacatcggtacgaggaggcggacgatctggagggcctggaacggatgcacctgctggattgcatcgagtgcggctcctgcgcgtacacgtgcccggccaagctccatctcgtccagagcttccgcgccggcaagcaaaagctgcgggatgccaaggcgaaagccacaaattcctgaggaggtgaaggtatgctggaactgaaaaatctctctgtctcctcctcgccccatatccgggccagccagtccacggccagcatcatgcgggatgtgtgcatcgcactgctccctgcgctgattgcgtcggtctatttcttcggctttcgggcgctgacggtcgtgctggtgtccgtggcggcgtgcttgttctttgaatggggctaccgcaagatcatgaagctggactgcaccatcggcgatggctccgccgtcgtgaccggcattctgctcgcctttgtctgcccggtgacgatgccctattgggcgatcatcgtgggcgactttatcgcgatcatcgtgacaaagcagctcttcggcggcatcggcaaaaactttatgaacccggccctggtgggcagagccttcctcttctcctgggctgtgctgatgacgacttgggtcaaatccggcacctatgtcgccgtattctcgaacttcaccgacgtctctgtcctcgacggcatgacggcagcgacaccgctggcggccatgaaaacaggcgcgttgccggagacgacggttctgaattcctttgtcggcaacatcggcggctgcatcggcgagacgtcggcgctgctgcttctgctgggcggcgcgtatcttgtcgtgcggcgggtcatcacaccgcgcatccccctgtgctttatcgcaacggttgcggtgctgaccttcctgttcccgcagggcaacgaccgcctcacctggatggcttaccaggtgttctccggcggcctaatgctgggcgcaatctttatggcgacggattatgtcacgtcaccggtgacgcgttggggacaggtcatctttggcatcggctgcggcgcgctgacggtgctcatccgctacttcggctcttacccggagggcgtgtcctacgcgatcctcatcatgaacgcatgtgtcggcctgttggataaggtcggtctgccccggcgcttcggcgtggagaagaaaggcggtgcggcatgaaacagggaaatggacgttacattctgcggctgaccattgtcctgctgcttatcaccgttatcacggcggcgctgctgggcctggtcaaccaggtcacggcagataagatcgccgagatcaaggcgcagaaaacggcggacgccatggcccaggtgcttgcggcggacgcatacacagaaatcacagactatcgcgacgacaccggcctcattgattcgatgtaccaggccggggatgtgggctatgtcctgcaggcgacctgctccggctcccaggggatgatcaccctgatggtcggcgtcgggacggatggcaatgtcaccggcatctccatcatcgaccagagcgagacaccgggcttgggcgcggtctacgcccaggacagcgaaaagggctcccgcttccgcgacagcttccagggaaagggccaggatctgacgactgccgatgtcgattacatcagcggcgcgacggtctctgccaatgctatctgcactgccgtcaacgcggcgacggcctgcgtggccgcctatcagggataaggaggggcgtttatgaagttcaaacaacagttaaaagacggcctcctgcgtcaaaacccggtgctggcacagctgctgggcatgtgctcgacgatggccattacgacgacgctgttcaacggcatcggcatgggcgtttccgtcacaatcattctaatctgctcgaatatcgccatttccgcgctgcggaaggtgatcccaaataagatccgcatcgcgtcgtatatcgtcgtgatcgcaggctttgtcacgatggtcgacctgctgctgcaggcgtatctgccgagcttgtcagagtcgctgggcgtgtttatccccctgatcgtcgtcaactgcattatcctcggccgggcggaggcatttgcctcgaagcacggcgtgctggaatctgcggcggacggcctgtgccagggcatcggctacacggcggcgctggtcatcatgtgcatcatccgggaattcctgggcagcggtacgtttggcgcgggcgtgatctcggccgacggcgtgcgcatcctgccggaggcgtacccggcgctgatgatgatcctgccggtgggcggcttcctgaccctggcgtgcctgatcgcctttagccagtggctgacaaagaagctggaagccagagaagcgaagaaggaggtgcaggcatgagcttggtaacatccctgctgtcgatctccgtcggcgcgattttggtggagaactttattttctcccagtttttgggcatctgcccgtttatgggcgtctcgaaaaaaatggatacagccctgggcatgggcgtggcggtcaccttcgtcatggccattgcctcggcggtgacctgggtcgtcaatgcgtatttcctggatccggctacgagcgtcttgggcgtcaatctgcagtttatgcagacggtggtgttcattctcgtcatcgctgcgctggtgcagctggttgaaatgttcctgcagaagatggtaccggccctgtaccaggcgctgggcatctatctgccgctgattacgacgaactgcgctgtgctgggcgtggcgctgctgaatatccagcgggcgtataacttcattgaatctgtggtctatggcctgaccggcggcctgggttttttggttgccatcgtgctctttgcttccgtccgggagcggacggcggacgccaaatgccctgagagcttttccgggttccccattgcgctgatctccgccggtttgctggcgctagcgtttatgggcttctcaggtatgaagattttctgaggaggtagggcaaaatgagtttagtttatgcaattgcggtcctgggcgtgctgggtgctgtgttcggcctggtgctggcggtggcgtccaaggtgttcgccgtcgagaccgatgagcggctggagccgatgatcgaggcgctgcccggcgccaactgcggcggctgcggatattccggctgcgcggcttacgcgcaagccgtcctggagggcaaggcaaagatcggcctgtgcgcctcgggcggtgatgcttcagcgcaggcaatggccaagattatgggcatcgaagcggcaaaggtcgagcgccgtgtggcaatggtcatgtgccgcggtatcgacgccaagcagaaggctcattatgacggcattcaggactgcgtcgcggcggcaaaggtcgccggaaagggccccatgacctgcgaatttggctgcctgggcttcggcacctgcctaaaggcctgcaaatacggtgcgctgtcactgaaaaacgggcatgcgtttatcgacgcagatcgctgcgtcggctgcatgagctgcgtggcggtctgtccccggcatgtgatcacgccggtgccgtatgaggcggatatcgtcgtcgcctgcaacagccatgccaagggcgtggccgtgacaaagggctgcagcatcggctgcttgggttgcggcaagtgcgagaagatctgccccaacgacgcaattcatgtcgtcgataacctggcacagatcgactattcgaagtgcgtctcctgcggcctgtgcgcggagcactgcccacggcatctgatttcggatgccaacctgcggcaggatatggacttggcggaagccagagcaagataaaagcgaaaaatctccggcgcttgccgcatggcgggtgtcggagattgtgtttttatgcaaaattgataaataaatacggaaacgctctgttaatagcgccgaaaatgaaaataacagttgacatcggctaacgttgtgctaaaatttaatcagattcggtctaatacaagacaagcgcgaatagacctgctctgatattttattttgacggaggagaagaaatgaaaaagttcttggcaatgcttctggtcctgacgctgacgctggctctgctggctggctgcggcgcaccggcggcagacaagggaagcgaaggctccgaaccggtcgacccagcccagacggacgcaacagacaacggcggcagcgcagagcctgtcaccttgaaggtcggactcatgggcacctcgacgaagcccgtcggcgtccttgtggcggacaagctgggctactttgccgaagaaggcgttgacgttcagtttgagaaggtttccagcatgaacgacgcttatctggcggtctccactggcgatttggacgtttacctgttcagcagcacggctgctgccacgttcattagccagggcacgacgaccctgcgcgtctttggcggcaccgctgcggaaggctctgagatcatggcccccgcgggcagcaccctttccctgaaatccgcccaggactttgtcggcctgaaggtcggctgcttcatggcagagacgggccagatggtcctgaagaattacctcaaagagcagggtctgaccatcggccagatcggcgaggatgtggatgttcagtttggctactacagcgataccaacggcggtatcgaagcctgcaagaacggcgagtatgacatcgtcctgacgaactcgtccctgggctactatgccgagaagctgggcgttgacgttgtcgcccgggtctccgactttgtgccagtttacccctgctgccgtcagacctgcaacgagacgacctaccacgaaaactttgacgcgctggtgaagtttgaaatggctgccctgcgcggctacgaatacagccagcagcatgaggaagagacgctggacatcctggtcgactactccggcgaggaccgcgacttcctgcaggcccagatctacggcaccgattcctacaccccggccatgcgcctgagcttggatccggacaaggacgcctgcatcgacttctacaacgccatgatgaatctcggtgagatcgaggatacggtggaggtcgaatggagtgactatgtcgtcagcgatgtctacggcacggccctcaagaatctaatggagcgtgagccggataacaccttctggactgacctggaagcttacttcgaagcgcacaatagctaagcgctgcggctatggcaaagctttcgttatctcacgtgcgcttttgctatggccaacagggccagtgcttccgggcactggacgatctgaatatcaccattgaggaaggcgagtttatctgcatcctgggccattccggctgcggtaaaacgaccctcctacggctgctctccggcctgcaggacccaaccgcggggaccgtccttttggacggccgcccgatggccgggccggggccggatcgagcagtcgtctttcagaattacgccctgtttccatggatgagcgcaaagaaaaacgtacagtttggcatccggcaggcgcggcaggagttgcccaaggcagaggtcgcggcgctggcgatggagtatctgaccaaggctgatatggccgatgcggcggataagtacccctaccagctctccggcggaatgcggcagcgggtggccatcgcccgggccctggccatggacgccgatattctgctgttggacgagcccttcggcgcgctggacgccaagatccgcctggaactgcagcagctgctggagcagctctggtgcagcggcgaaaagcgcaagacggtgatcttcgtcacccatgatatccgcgaggcggtccagttggcaagtcggatcctgtttatggccccggggaagattgtcgcggacatcccggtggacctgccccggccgcggcagcagctgctgggtgagggcgcacagatgcgcaagcagctgcaggaccgcttgctgcagctattttacgacacagacgggacggaggcgacggatgaaggctgagggcagaaggctgatactggtgcatcttttgctgctggcattgctgtatgaaattatgtttgtccccaaccagcggacgacggtgcgggactatgacgcgctgctggtcggcatcgcggtgatcgaggcgctattcctcttcgccctctggtactgcaagcgccggggaacgctgtccacggggccgtttgatattatccttgctgtctggctgctgatgatcgtttgggagctgacgacctctgtgctgaacgtggctcacccggtgctggtgccctgcccggaaaatgtctttgacaccttccggaagcagtggagcctgcttctgctgaacgtgggctattccatggagctgctgcttttgggctttgctctggggctgacggcggcggtgctgctgggcctggtagcaggctgggtgccccggatccgggcgtttgcctaccccattgccaatgtcatggcgccgatcccggccatcgtgatctcgccgtatctggtggcgctgatgccgacgttccgcagcgcctccttggttgttatcatcctgggcatcttctggccgacgtttcttaccacggtcaaccgggtgcagaatatggaggtgcagattctcgactcggccaggacactgcagcccagtacgatgacgatgctgacgcgtatcctgctgccgtatatcctgcccggcgtgatctccgggctgcgggtctcaatgacgacgtcgcttttgatgctgaactttgccgagcttatgggcgcgacccacggtatgggttattacgtgcagaacagcattacttatgccaactacacccatgcggtggcgggcatttttgtcatcgggatcgtcgtgacgattctgaatttcctggtgggaaagctgcaaaagtgggccatccgctggcattgaccggtggtgggaaagaataaaaagtaaaaaaaccggccagtggcgcctgtctggcgtccgttggccggttgacttttttcccagtttcggctatgctagcactaaacacaacttttgtatgaaggagatgtgattgttttgcgggtgattgatattgaaaacataatctataatatgcgcaacgagacgcagtttgtcctgcgctgcgaagaggtattccacgataaaatcagcgcagctgcagcgacaattctggagaaacgaaaggcaaagccgatggtagcgttaactgggccctctggttccggcaagacgacgacggctatgcgcctacaggtttacctggagaacctgggggtcaaggtctgtcggttaagcatggataatttcttcctgcccctggagcagcgtccaccggagttgacggactgggagtcgccccagtgtgtcaactgggaaatgcttctgtctgttgttgagcagctgaaggatgggaaatcggtggagacaccttggtacgactttgtccatggaacgacgggcggctggcggactatgcaaggagatcgggaggcggtcattatcgtcgaggggctccatatgctcaatccaatcatctttgaccgtattcgcagccaggccagtggtatttatgttgcaccccggacacgcattattacgacgcaggatcgtgttgtgcgcccggagcagttgcgggtggcccggcggcttatccgggactacaatacacggggctacgacctgcgcaagaccatcgagcgggcgcataatgttgatcgcggcgaggtccagtatatcgcgccctataagtcaaatgccggcatccatatcgacacgttccatgactatgagccctgtatcttggctcggtatctcaaagagattccgtcttggtctcaggaactgccaccggaatatatgaccgagcttggcttaggagatcttctgcaggtcgtcgacagtgtgccgccgctgcatacgccgtacgtgccgcgggactctattgtccgggaatttgtcggtggtagttgctttacctattaaagtacctttcaagtgtgggaccgcgctgggcagcgcaggagatgtgaacgcgccccgtggaagtattaccgtctacgggcaccggctccgccggcgcccgtaaatattgcgctttttcagaatggactgattccacgtggaagttttgatgaaaaacacgactgcatgagaaaaaaatatggtcaagttgccatctttacattactactttaccgtggtaaactactaacgcaatagaaaaacagcgcgggagaaggaaaaccgcgcggaatggagaaaatggaacatgaaaaagattcttgcaatgctgctggccatcgcaatgctggcctgcctgtttgccggctgcggcaattctgacaaatcgaatgacggctcaacccccggcagcgacgctgccccgggcaccgatgtgaccgctgcct

SEQ ID NO: 944 - DNA, 32759 bp, Unknown
  16S sequences of unknown bacteria
tcttgctgcctcttcgatagcagttctgtgtgtgaatcctgctacagcttcagcaatgtaatcagtttttataaccttactcaatttaaaattcctcccttttatatgtttttaccactaatttacataattctttaaaattttgtagtatgaaactagttacagtcaatataatatcatattttttcagatttgcaagtagcaaaataattttttaattaaatttttagaaaatttaaaactatttttttccattataaatatgtctaattacctttcggggtattgagcttgtatgaaaaaagcactaaaataatactgtaaagaggtgattagattttgaaagaaaaaatggatatgctgaacggctccatatggaacaagctcccccgctatgcgcttccggtggctgcaacaggtattttaggacagctttttaatgcctcggaccttgccatcgtgggaaattttacgggatcagacagtacggttgccgttgcggcagtcggagcaaacagtccggtcataggactcatactcaacttttttatagggattgcgctgggtgctaatattgtaattgcccacgccgtaggcagaggtgacgaaaaaacaatacgccgctctgtaagcacttcggtaataatggcgctggcaggaggtatcgccattgcggttttaggagagctggggattgaaaccctgctcaggtggctcaatattccgggcgatgtgttcccctatgcccttttgtatataaggatatatctgctgggaatgccagctatacttctgtataactttgaggccgctattttcagaagcatcggagataccaaggttcctctgggagttcttgcggtatcgggcatacttaacgtggctttaaacctgttttttgtaattgtacttgatatgactgtagacggcgttgccattgcaacggttatttcaaacatcgtgtctgcggcgatactgtttgtgctgcttcttaagacagataaatccatacatatagatattaaggaaatccgctttgataaggaatgctttgtaaagataattaaaataggacttcccgcagggcttcaaagcgcggtgttcgcctttgcaaatatcgtgatacaggctgccatcaacagcctcggaaccattgttatcgccgcatcaagcgcagcctttaacattgaaatattcgcatattatgtgcttaattctttcagtcaggcctgcactacatttgtgggacagaattacggtgcaggacagattaagcgctgtaaaaaaatactgctgctttgcatattagaagatgctatagtttccgctgccgtaatctcactggtactgctttcgggcagagtgctgctttcggtattcaacagcaatccgggggttattgagataggatatacaaggctcctcataatactgtcggcctatacattcagtatgctgtatgagaatatgtcgggatatctgagaggcttcggcgactcccttatccccgcagtacttacggtcataggtgtatgcgcagtcagaattacgtggatttacactgtttttcagacccacagaacctttacttccattatgatagcctaccctgtaagtctgtttaccacagcgctccttatctttattgcgctgatgatttacagaccgtcacgaagatatgcagcagctaatgaaactggtagcggagagatttaaatttgctctcccctacttatccttcacgtctaatcaaacaaactgccattttgcataaactccggaatatttctatgtttaattccattgcgcttttggatattatcatttcgtgtaagaacatatttagggtaattgtcaggtatcgcttctaatggcgcatattctctttcttctgtttctctgcttgccattattgtcatacaaacctgcacatagctataatccatataattgcttctcaatataaaatcgcattccagtttccctactctccctacacttatttcatagccttttgattttgcataacaatacacgatattttctagggcaggtccataattgattctgttgtcagtattagttgcaaaataaaatcctaaatctgataaatagtatttctgttctttacttacagatttctttgatttcaggtcaaatcttttgcactcatataaaatctttgcgtcaatgagaatctgaatatatcggtttaaagtttctctttttatatccattccggctttatgaagctcctttaacatattcgtaaggcttgtttctgatccaaaattgttaatgatatatgtctgtactttttcaaataccgatgtgtttcggattttcactctgcgtttaatatctttttcaaagatttcatttactatattttttatatatgttcttttatcctcagggttatcataaaaaatagtctttggaaatcccccttcattgatatatttatctaattcttctgtagggttaggactgacattcttgccataatattgtttcatatcaatgtattcctcaaacgaaagcggcagcatttcaatttcaatataacgtcctgtaagcttagtaataagctccccgcttagtaaatatgaattagaccctgttataaatactgaatactctttttcaccacgataagcatttattatttcttcaaagcctataatattctgtatttcgtctatgaataaatacttcattccttctgcgctgcatagcttgtctatttcttgttccaattgctccggtttttttattgatttgtgtttttttgagtccaaatctaaaaaaacaagattggcttccggcactccctgctctttaagttcctctacaatggtttgcatcagcgatgatttcccgcatctgcgaacacctgttattacttttatcatttctgaatcatgatagaagcctctgatttttttcaaataattctcccgcctatataattccatgatgtaaaccctcccttttattcctatgcctattattatacaatgaaatataaaaacattcaatttaacggggtaattttttatttttttaataaaaatacccctttaactgctgtatttgtaccttatttatgatattttatctccagcctgctgtctgtaataaccgcctcaggtaaaacacaagtaaaaaatcaccccatctgctgaggtgatttatatgctgtgttatcagcccggaggccatgtcatttttctcttgccgagaagatggaaatgcagatgctttacagtctgcaaaccgtcctcgccgcagttgttgacaagcctgtatccgttctcaagaccaagctgcgccgctatatccttgactttcatcataatatagcctaaaagagccctgtcctcctctgtcacatcatcaagtgatgctatatgcttcttaggtataatcagcacatgaacaggagcctgcggatcaagatcgtgaaatgccagaattttatcatcttcgtaagcgatatttcccggtatttccttgtctgctatcttgcagaaaatacaatcactcatatctatagttcctcctctaatatttcacaggaaacaccgtcatacattaacccggttattttcacattgcacagagtattgagatacttcccgtctgcctctgcgtaagccttgatgtaattgtcggtatagcctgtaattttatctttatctgtttcttcaaacaatacctgccgtatctctcctgtgcaggctgtcataaattcctttgaaaccttgtctgcctctgcaatcagagccgcgcttctgctctttttaatctgaggctcaatctgattgtccataagagccgccgcagtaccctttcgctttgaatactgaaaggcgtgtactttgaggaagtcagcctcgcgaaccatattcatactgtctgcaaaatcctcatcggtttctcccggaaaaccgactatgatgtctgtggtaattccgtaatacagatccttatctctcagtaccttaactatatcaaggtaatcctctctcgtatagtttctgttcattgcagagattatactgctgcttccgctctgaattgacagatgcagatgatgacacagcctgtcatattcaagaagtctctttacatagtcgctgtttactgccgtaggctcaagcgagctaagtctgatgcggaaatctcccggcattttgtcaagcagatgtattatgatttcgatgccgtgcatattctcgatatcagtgtcatcaatatcgcatacaaatccctgctccgtaccgtacagagctgcattgatgcctgtaagtatcagttccttaaagcctgctctgacaaggctctctgcttctttgaggatttctgaaggtcttcttgacctgacgctgcctcttgcaaaaggtataatgcagtaggagcagaacctgtcgcagccctcctgtattttaatatatgctctggtccttgactccattgaggttatcgtgcctatctcctcatatgtatcaagctcctcataggatttcacctgtctgattttgctgccgtctttgatatattcctcaacaagagataccatagctgatttctcgttggtgcccgcaattatatccacgccctctattgccgcaacctcctccggcgccacctgtacatagcagcctgtaacagcaatggcggcatcagggtttatggctctggcgcgccttataaactgtctggatttgcggtcggcaaggtttgttacggtgcaggtgttgattacatacgcatcggcaaactccgtatcaggcactacctcgtgccccgcttttttgaagttttctttgagaccctcggtttcatactgattgaccttgcagcctaatgtgtgaaatgctattttcattagttacctcaattcaagttttgtctgtacaaacattattgtaccatacattgcatatattatcatcagctaattattctccggaggcaaatatgagcgatataaagaagattatttttttcacccttgttcctgtgcttctcattgccgcagcatatacctattcatgggtatctcaggaaaaggtgcaggatataaacgccgattacagcgaaaccgtaaaggttccgattataatgtatcacggactgattaaggattccagtttacagacagaatacttcatcagtcccgacagattcgaagaggatctgaaatacataaaggaaaacggctatactcctgtgtttatgtccgaccttatcgactttgtctacgaaaacaagcccctgcccgaaaagcctgttgtgctctcctttgacgacggatattacaataactactgctacgcctatcccttgcttaaagaatacaatatgaaagcagtcatatccataatcggactttataccgacaagttcagcagagtcgatgaaaacaacgccgcctactcccatatcacatggaagcagattaatgaaatgactgactcgggccttgtggaaatacaaagccacacctataatatgcacgaaataggcgaaagacgcggaagcgccagaaagcagggggaaagcaaaacccagtacagaaaaattctcaccgatgaccttgtcagactccagcgggaaataaagcattataccggcaaggctcccgatactttcacatatcctttcggcatttacagtgattatgaggaggaacttgtaaaagagctgggctttaaggctactctaagctgcagcgagggcgtaaactatatcactttcagcgataaggaatgtctgtatcagctgaaaagatacctgcgcgacaaagacagcaccagcagtacaatgtttgaaaagttcaaataaaatctctcccttaacccggctgtttctttaccagcaggcagcagcatatgccttggggcgcagttatctcgtgtcccttattcatcaggttgtaatttgcaaaatacatatcatcaagctcactgtaatccgaattttcgtagatgagaagccctgcattatccgcaatagcttctatatcgtctaaggagtattctgcctgcattgtttcatctgcggcctttgccagttctttgtttatttctttgttccggctcctgcttatatcaggataatcaaaggctatgcagcttccctgcggcatatgctctgctaaaattctgacagtatccccaaaggtttctttgctaagataatagcttattcccataaggctgcagtaggtcttgcagcccgcatcaaattcagcatcaagaagcttgtctatccagctgccgttaaagtcacagcctacatatgacacattgctgctgtctattcccgccgcttccactctcatgattttatcctctatcatctcaggcatatcaagctcaaataccttaaccctatcatttaccatatatcctgacgtgtcatagcctgacgccataattacatactggcaaagccccagtctgatttcgttgttcaggtgtctttcgttaaaggcagaccttgcaagaactgatggagcaagctggttgtttacaatccattcaagcgggttatctccgctgtatccggggttaaaaaacgatattcctcccgccatatttgcagcaatgccgtcatattcctgcttactcagaagctttcccgcaagctcatcgttatagattttcactatactgttttttgtatggtagcaccttgcaaagcagctcacaagtgcagtcatatttttgttcatattatcacctccgtattcttaatacacctatacgaatacaattacaagtcttgacaaatgaacgattttgtggtaatataaacatatagagagtgagaaaaattttcccactctctgttcctttgatagaaaaacactagtttttttgcgctattttgttttattctgcactactatttctcccgcatctctgcctgtttcgcgcattactatatcatatatcttggcaacatccgaccgcagcagttcctgtgtgttcaccgttacattaaccgaattatccgttattataaccagcgcttccggcaggtcttttgtttttatcagtttttcgattatctgttcctgatccatatactttataattttcagcttctgctctgtggcgtttttcttttcggcttcattgtctgcctgtgcgattgtatctgtcagcattgctattacttcatttctgtcaagatttatatttgcccgctcctctgcaaaggttttgtctgtgtttttttcgactccgtcatctgaggctacactttcagtttcgtttttttcggccttgacttcatcctttgatacattgaggctgtcaacaagcacatctccgtcgtgcggaggtatttcatttcctgtcagtgtggcaacaaggtcaggttttacctgcattaccgctgctgcgcataccaccagtgtgagaacaacagctcctgctattcgcccttttttaccgatatgtatgctctttattccctttagctttttcattaatcattttcccccatttcttttttcaaaaacaaccacatttgatgcaggtatgttgtagactgccgcaaccgccctcgttatattatctctgataacaggatctcccgcaccctctgccgttattatcacacctgatatagcattatcttcaccctgccttatcataacatcaacagcgcccacgccgtcaatgtctgtaagtatctcgctcagagtcatttcactgccgccgtcctcatctattatctgtctgcggctgtccctgtcctgtgtaagcacatcaaaggccaccagcaaaaccgcggcaatgactgcaatggttataagttttatgattatatctttggatttgccctctttaaaaaacttatcaaacatattcactcctataatatatttattaattttcaggttatgacagaaattctgctacaggctttacaattgcggcaagaagtatcagcgaaaatatgaatttgacatatctgcccatatctgatgccggaagcagtatctccgtaaatgacagcgcaacagcaataataataatatcccttataaattcacttaactgactcatatctgattgccccctatggaaattataactgcaaggaatataaggaacataaaacaggtcagcgatataatgactccggtaagtatgattgaagttcctgtatcattcagtgagtctgatattctgttctctccgagcagctgtgatattattgccgtaagcttatagattacggcaattgcagtaagctttataaccggggtcaaaagcgctaaaatcagaattattatccccacaactcccacagtgcttttgattactctgacgcaggttattgcaaggtcaaggctgtctgaagcaaatccccctatgattggaatgaaatttcccgctgtatatttggctccctcaaatgccgctccgtccgcagctttggttactatgctctgtattacggtaatgcctccgaatatggttacaagaagtcctgttgcaaaggctgcggcgtttcttaaaaatttacctattgatgatatgtactttttttcaaggaggctgtctattacaaacattactgaggacagaaacatcacaggaaatatgatatttgatatgattgccgcaaatgatgtcactatgccggaaaccagaggactgagcatacctgcggaagtcatgccgccggaggctataaggagcgggatcataaccggaagaagtatctccatcgtatgaaccattgtatccatcgcgccggaggccagatcatagacaatacccagatttaccatagttattgccgcaatagcgctgctgcatacaagaagcgcaacctttgatactgatttttctccaaaggaacctgaaatgcttttgagaagtccaagtattatgcagattgccgtaatttccacgcccagcataagcgtatccttgatttcatatataagcaggtcttttaaagaaccaataatgttatctgcctcaaatatactgctgccgtctgccgctgaatttatgatgtcgtcaatagtagtgtctccgaaagcgccgctttcgtccataagctgctgaatgtcctgcgtgtcaagctccgaaagctcctgtcttaatattacatctttgtccatagcagtcacctacaaaagtttgtctataaggcttatgacagaggcaagtatcggtattgatatgaaaaaaattatcagcttgcctgccagttcaacctttgtgcctattgctgcctgccctgcatccctgcacagctgtgatgtgaaatcagacagataggcaattacaagcaccttgattattacaggaaagtattcacgcccgtattccaccttgttgtaaatggcctcaaagtatctgaatatgcctgtcagactgtttaatatcataataagtatgataattcccgttgccaaaactatgtaaagtgaaacctctgcccgcacgcttttaacaagtgaggctgctgtgactcccaccagcgcaaccattattatctttaatatttccattacagtgaaaacagctcccttataactccgaagaaatcgctgataaggtttactaccataagcagtacaatcactactcctgcaagggttacaagcattgcctgctcctctctgcccgcttttacaagcacctgattaagcaccgctatggcaatgcctattcctgctattttaaatataatatcaatatccgctgtcattttttctcctctttaaataagtaatattactgcgcaggctccgcaaaagccgcctatcgccttgtacattctgccttttgttctgtattcctcatcagcattttgtatctgcatatcaagctttgcggttatcatttcaatcatagactgctgctgcataatgccgcttgcgccaagctctgcgcctgcttcttttaatatttcaatatcctgctccgtaagtatgctatcaccatatatattgtctgcggcaatctcccagctttgtttaaaatccgtaatttcatctgatatgatttctgctataaagtctgttgcaagtcctgcggtctgatttttaattctggcaagagataataccacagggtcttttctgtaggcgatttctcttgccatggaaagcatcatatctctgaaatgaacaagctccgatactcttaacctgtatccgctgcttttgataatcccacatataaggcaggagcctcccactgctgctgccagaataaatttaatcaattttcattacctcttttactgtccctgtccggggattgtttgtaagaaatatcagccttgagaatataccgttttttatcatatctcctatgcgggaggccgcagcttcctcataggagctgccgtgaatggaagctacaatattgatgcctgcgcatactgcggcttctatcgccgctgcatcttccgtcctgcctatttcgtctgtaactatgacatcaggccccattgagcgtatcagcatcatcatgccctctgctttgggacagccgtcaaggatatcggttctgggtcctaaatcatatgcgctttggcccagatatgtccctgctatttcagagcgttcatcacatactgatacctgcctgccgctgctgctcaaaagccttgtaatatccctcagcagcgtggtttttccgcagcctggcggagatatcacaagcacatttctgtccgttatatcgcttctaagaggctctgcaatgccgataatttccctgctgcatcggatgttgacagatgaaatatccttaattaagttaactctccctctatcaaggacagccctgccgcatataccaactctgtgtccgccctctattgttatgtatcccttagcaagctcttcttcataggcataataggaatgattgagcaggctgtttaaaatcctgttcattatgtcatagtctatgggaatactgtctattacaaattctctgccgcctgatatgatgcatatgctgctgccggttctgatgcgtatttcctccagagaggttataatttctgagggcagagctctgatactttcacctatgttcatagggagttttttaaatatacactcaagatttctcataccttgtccgtcctttcaatacactatatgtgctgtggacaggtaatattacaaaaaaatatacaggctctcgcctgtatgggtctggtatattatggctctttaacttttttagtggtacagaccaccctttaactttatgggtgttctgtacattttactgtacaaagcataaaaaaaggaataattctcattagaactactccttttaaactccttttatggtattgtttttttgcgagaaaatataaccatgaaaggagtatctatatgaaaaattttatcactaacttgtttttttattactcctcacttccattgctgctctcaggagtaatataaagcttaaccttttcgatacgtctgtccttgacagattctatcttgaacacaaggttttcatattctatgaccttgtcctctttttcttcttcatcaggtaaatcgcccagaagctcaatgataaatcctcccagagtttcactgttttctgaaacaagttcaagccccagttcatcatttatatcatcaagatccgtattaccgtctatcatataggtgttttcatcaaccttgactatttcagtttcttcttcgtcatattcatcgtctatatcgcccataacctcctcgattatatcctccatagtaacaatgcctgcaaatccgccatattcatctattagaattgcaatatgctgcttggttttctgaagctcaaaaaacagtgtatctatctttttggtttcaggcacaaaatatgctttacggagtatactgcgtatatccacattttcaaacccgtcctgatatgcctttatcatataatctttgacgtgaagtattcctataatattgtcactgtccccgtcacatacaggtattcttgaatactgaagcctcatcagatcctctataaattcatctatagggtcctgaatgtctatcataaatacatctgttctcggagtcatgatttcgtgggcaagcttatcatcaaatgcaaatatagcatttatcatcttcttgccttcttctctgatttctccgtttccctgtccttcttcaagaatagacataacttcttcttctacatcatttttgtgttttgaaaaccatctgggggccataattatttcctttctctcattaatacggttattttcttttacagagcatatagtttttcttaacctttttcgggaactttattctcagtatctgctgcgggtgaggcgccgactctataggctcatcttcctcattgtgcatatatgaaagctgcattgcaaaagtatcacagtcaggaccgaacacctctatctcgtctccgatattcatcttgtttcgctgctctacaacagcaataccggtactttcgtcatattccagaacaatacctgtaaagctgtattctctggtatattcactggtctggtagttctgatccttgttggtaggcttgtcaaaataaaaacctgtagtgaattctctgtggcttgccatcttgagatcacgcatccactcatccttatactgatattctgcaggattctcataatatgcatcaattgcttttcggtaagctcttactatgttggcaacatagaatatgcttttcatacgtccctcgattttggctgatgaaacgcctgcctctatcagctcggggatatgctctatcatacataaatctctcgaattcaatatatatgtgcctctgccgtcctcctcaacgggatagaactcatcagggcgtttttcttcaacaagtctgtacttccatctgcatgggtgagcgcattgtcctctgttggcatcgcgttcaatcatatagttgctgagaaggcatctgccagaatacgatatacacattgcaccctgtacgaaagcctcaatatccatacctacaggtatgttttttctcatctctatgatttctttaaaggtaagctctcttgcaagcaccactctcttgactccctgtctgtaccagaagcgggcagtggcatagttggtggtatttgcctgtgtgcttagatgaagctctgcctttggtattatctcctttaaaatttctattacaccggggtctgatacgataaatgcgtctatatcaacatcccttatcttattgagatattctctaagaggctcaatatcctcattgtgcgcataaatattgagcgcaagataggcttttgcattgtttttgtggcagtatgccacgccttctttgatttcatctattgacagatttccggctcctgctctgaggctgaacatttcaccgccgaaatatacagcatctgcgccgtaatcaactgcaaatcttaatttttccagatctcccgcaggagctagtaattctatttttttcataataaagtaatgactctttctattttaatatacttatcgcaactccgtcccctacaggaagaagcgcggtatctgcgtaatcaacattagtaatatattcgataaactctctcattcttctgatatttgtcttgtatttacctgtttcatcatatttgtctgaaaccacgcgggccttaaaaagcacattgtctgaaacgataaccgcgcctttagagcaatgcttaagtgctgcatcccagaagcgcctgtagtggctttttgcggcatctataaagacgaaatcatattgcatatcaagattgtttacaatctcctccccgtcaccgcaaagaacctctatccgctctgaaaagccgaacctgtcaatatttgctcttgcaattccggccgtttcctctttgacctcaactgttgtaatatccgcatcacatacagcggcaaagcagcttgccgaatagcctacggctgtacctatttcaagtatcctctgaggcttcataattctaagcagatttaatatcagggactctgtgtccggaagtattatagggactctgtctgcctccgcctctgccctgaacctgccgaaatcctcatttacaggtctgtaaagtgatgtgatgtattcaaccacttcgggattgattatatttctgtaattgctcatatgagtttagttttccttttctgattctgctttttgataggctttgtagtaagcatccttgtcctttaagaactggttgtagtcgcttgaaaaagctgcgcttccgtcaagcttctcgcttacaacaaagtaaaggtaatccgtctttgccggggatattgccgctttgattgcatttattcccggactgcatataggtcccggagggagtcccgtattcttgtacgggttatagtctgactcaactgctatatccgcataagtaagattaaccttatcctcctgcagtatatatgatacgaccgagtccatctgcaaggccatacccttatcaagcctgttgtatattacgcttgaaacaagaggcatatcctcaggtatccccgcctccctttctataatagaggcggctataactatatctctgagagaatgtcccgaagcttttgcctgctctactatatcagctgtaaccatttctttgaaatgatcaagcatagcttcaattatggttctggcatctgatccttcctcaaaggaatatgtgtcgggatacagaaagccctcaagtctgtacatagagcgttcgttgcctgcgagaaaatcataggtgctgaaatctccgtactgcgcttcatgcataaattcatcatacgaaattatacccgcctcatcgagattttttgctattttttcaacagtctgcccctctataacagtgaaattatgtgatattgtatcaccgtcgcttatcatctgcatcatctgtttcatactcatagactgtgacagaccgtaggttcccgccttgtaggtgccatcatagccgtagagctttgaaagcactctgaacactcccggtttttcgataagagtgttttcctcaagtatatcggctatctgtattgtcccgctgccctccggaatagctgttactacaatatcctcggaagtcttgtcaacaggacgtccccctgacataagcacaataaatatacctgcaattataactgctgctgcgactatagctgcgattattatttttttcatatatatccctctgttttgccatatatttggaaagggacgtaaaatttacgccccgttttaagtttcccgtctttatttctttgatcttcctaagtattcacctgttcttgtgtcaatctgaataacttcgccctcttcgatgaagataggaacatggatagtagcacctgtttcaactactgcagctttagtaacgtttgtagcagtgttgcctttaactcccggctctgtttcgataaccttaaggtctacaaagtttggagcttcaaccataaatgcattgcccttgtagaatttgatagttgcttcatcattttctctgaggtacttcatagcatcttcaacctgctctgccataagaggaacctggtcgtaagtttcagggtccatgaagtagtaaagctcaccgtcattgtagagatactgcataacctttgtttctatgtgagccttagggaatttgtcatcagggttgaatgcttcttctcttgtagctcctgtaagtatgtttttgtattttgttcttacaaatgcagcacccttaccaggcttaacgtgctggaaatctaaaaccacgtgaggttcaccgttaatttcaaatgtaataccttttctaaaatcgcttgcataaatcataaatatctctccattctttcagacctgacccagcaaatgaaatgcgctgccggtaggtcgaacgtcatgacttcccaagagtgcaaagcacgattggctgaagtttacggcgcagacctaacccggcgagtgaaatgagccgccaaattcatcagacaaatcacaccattgccaagtcaaatcaatctctcatattaactactattatatcaaatataccagttcttgcaagtactagtttgcaccctggctgtttccgctgccggcaggcatcatagtttcgtttaatatctgatatacatcctgcatcatcagcgcaaatctcatttcgcactgtacatactgcgcagcagcgggatcctgcatcataatagtcataagctcctgcatcttggcaaccgcttcggcgtccatttcctctcctgcaatctgttttgcctgcatttcaagctgcttcgcctgaaaatcctgtatcatcttgtcaaggtcaggattctgtgcaatcatatttttggcgttcatatactgtttgtattcttcacattcttttatagccttcgctaaaatgtgagcctgatcataaacattcataaattaactcctttcgtgattatacttctaagaatatcggcagtattaccggatttctctttgttttttcatatataaatgtgcgaagtgaatctcttaccattgatttcatcgcagtccagtctcttgtgtttctgctgcggcagttgttaagtgttttttcaactaggctgcgcgcatcttctataaggtcctcgttttctctgacatagacaaagcctcttgagataatatcaggtcctgataccacattacgttccctgtctatggccgcaactacaattataaggccggactctgacagaagccttctgtccctcaatactatattgcctacatctccaacgccaagaccgtctacgagaatatcctccgccggaactgtttcctttaaaatctcggcgcgtcttcttgtaagatttaaaatctgtccgttttcaagaatgaaaatagaattgtttttcattcccagatttttggcgatttccttgtgagccattaaatgtcttgcctcgccgtgaacaggcataaagaacttaggcttgataagcgagtgcattatcttgagttcctcctcacaggcgtgacctgaaacgtgagtgtctgcaatatccgagtagattacggtcgcttccttttcgataagcttgtttactacattggataccattttttcattgccgggaacaggagttgacgataatattactacgtcaccttttttaatctgtaccgacttgtgatcatttgaagccattcttgaaagagcggacatcggctctccctgacttcccgtagttataatcagaagctgcctgtcaggtatcgtgtttatctttttgatatccacaagagtacccgcaggcaccgacagatacccaagttccatggctattttaaccacattttccatacttctgcctgaaatagcgactttccttttgcatttgactgcattatctattatcttctgcaccctgtgcacgtttgacgaaaatgtcgcaattataattctctggtttacatcttcaaatatgtttgcaagggtttcacctacaaccttttcggaagctgtaaatcccggtcttaaagcattggtgctgtccgccatcatcaacgttacacccttggcccctatttcggcaagcttcgtaaagtttatcggctcgccgtctacaggagtatagtctattttgaaatctcccgtatggaatatcctgcccgcaggagtatctatgcagaagcatactgcatctgcaatggaatgagttgtccttatggtttcaactccaaagggtcccagcttgaatttgtcaccgggtttgattgtattaagtctggccttgaggccgtgttcttcaagtttgcttttgacaagaccaagtgtaagtcttgttccgtatataggtgcgttaatcaccttgagaaaatacggtattgctccgatatggtcctcgtgtccgtgtgttaaaatcacaccttttatcttcttgcccgcagtctgcagataagaaaaatccggaagcacaatatctataccgtacatctcatcttcagggaaagtcatgccgcagtctatgacaagtatctgatcctgatattccagaagcgtcatattcttgcctataccgttaagcccgcctatggggataaccttgaggccctgactttcctttttatttgtgttttgtttcataaattatctctccatctatatcttcagatggccattatttaacaacgatatttaccagtttgtcaggtactgcaattacttttacaatatttctgccgtccactgctcttactgcagcttcgctttccataacagtcttctgaagctcatctctgccaagtccgctggcaacgctcattttttccttaaccttgccgttaatctgaattactatttcaacgctgtctttaacaagcgcgctttcatcgtaagcaggccagccgacgttatataatgaacctgtgtgtcccagatactcccacatttcctcgcatacatgaggtgtaaacggtgaaagaatgagtaccagcttttctatgcaggcattaataaggccctcatttacatcaggaagctccttgtaacggtaaagctcgtttacaaattccataattgtacttattgccgtattgaactggaatcttccgccggcatcatctgaaactttcttaaccgcatagtttgccatatagttaagctgcttgtcgttatcgtttctgatttcaaagtctgtagtcttgaagccgtatttctgaacagtttcatatacaagtctgtatactctgtttaaaaatctgaagctgccctcaacaccggcatccgaccagtcgagttccttttcaggaggcgctgcgaacagtataaacagacgtgctgtatctgctccgtatttttcaagtatttcggcaggacttactacgtttcctaaagatttactcatcttcttgccgtctttgtttaccataccctgtgtaagcaggttcttgaacggttcttcatctgttacaagacctaaatcatataaagccatctggaaaaatcttgcgtacatcaggtgtaaaatagcgtgctctactccacctatatactggtcaacattcatccagtatttcactttttctttatcaaatacttcgttttcattcttaggatcgcagtatctgaggaaataccacgatgaatccaggaatgtatccatagtgtcgatttctctctttgcaggcgctccgcatacaggacatactgtatcaacaaaggttttgcttgttgctatcggagattcgcccttgcctgtaaattcaatgtctgtaggcagcagtaccggcagattttcttccttttcaggaacccagccgcagtgctcgcagtgaatcataggtataggagtaccccagtatctctgtcttgaaataagccagtctcttaatctgtagtttacggtagccttgcctatgccctcttcttcaacccattcgataacctttttgatagcttcgcggttgttcattccgtcgaatttgccggaatttatcatagtaccctcagcaacaaaggcttccttgaggttgtttacatctatatcaggatttcccggatctactacaggtatgatatcaagaccgaacttagttgcaaagtcaaagtctctctcatcgtgagcaggtacggccataatagctcctgtaccgtatcccatcagtacatagtctgaaatgtagatcggaacttccttgccgtttacaggattgattgcatatttgcctatgaatacgcctgttttttcattgctggttgaagttctctcgatgtcgctcatatgctggcatctgtcgatatattcctttacagcctgctcgtattctgtgccttcaacaaggctgtttacatacggatgctcaggtgcaagtaccatatatgttacaccaaagagtgtatcaactcttgttgtgaatatcttgagctttctttcgtcgtctttaattgcaaagtcaacctctgcgcctacggatttgcctatccagtttttctgcataatcttaaccttgtttggccagccgtcaagtgtatccaggttcttgagaagtctttcagcgtaatctgtaatcttgaagtaccactgtgaaaggtttttcttgcctacaggcgctccgcatctttcgcatacgccgtcaacaacctgttcgtttgccagaactgtctggcagtcaggacaccagtttacaggattttcttttttgtatgccagtccttttttgtagaactgaatgaaaatccactgcatccatttatagtaatcagggtgacaggtacatacttctctgtcccagtcataagaaagacccagctctgaaagctgctcctccatttcgtgtatattgtcccatgtccagatatccggcgcaactccgtgcttgattgccgcattctctgcaggaagtccgaaagagtcaaagcccatagggtgaagcacgttatagccctgcatattcttaaatcttgcaacaacgtcacctattgaatagtttcttacatgacccatatgaagctttcctgacggataggggaacatttcaagtacatagtacttttccatatccggcttttcttccattttgaaagtattgttgtcagcccagtatttctgccatttcttttctatttctctgaaattatatctttcgttcatttctgtatcctccggttatcaattaaaaatccagtgtgctgcagtctccccagattttttctatgctgtatttatctcgcatctgctctgtaagaacattgactatgatatcgccgtagtccataagcatccagccggacgaaggctttccctctatgctctttacaaaaataccttccttttcaaaaacaaattccatttcatcgacaagcgcattcagctgtctttcgcttcccgcagttacaagtacgaaataatctgcaaaggaagatttctcagcgatgtcgataatcattacatctccgcctttttttgcatctaatgtcttagctgcaaacagcgccatttccttactgttcataaaacactccttatatgcttctatagtatccctgccgggatcgattcctttttgtttaagatcgtcaacggtccatttgagaataaactcgtacactccctcaaggtcatcaaaggcctttttgcgaagttctgcggcctcgggatatgtcctgcccggctctactgcatctgcaacaaatattatcttttcgagcacagacatccctgcccttgcagatgtgtgatacctgattgcattgagaatatccttatcctctatgccgtaatacttttccgcccagcaggcggctattctgccgtgagccagatttgtatttccgataaattcctgacctatattaaactttctgacctcctcatcggactcctctgccgagagaggctttgctatgtcgtgaaacagagcggcagtttcggcttttgaaacatcctgattatatgccgccgcaagctgctttgccgtttctacaactccgaaagtatgctgttttcttgattccttgaggtttttatctatatattcaagacacttatttatatagtccattctcctgtatatacctttcaaccttaggatttatatagtctttgacagactctccgtttttgagcttctctctcagctctgtagatgaaacatcaatctgggtattgtgcaccacaattatattgcagccgtattttgatttaagctcgtctatcttggctttaagctcgtcatctctgtagcctggtcttgagcctatgataaacgaatatcccgaaagtatttcatcggcgtttttccacgtatcaattttgaggaaagcgtcggttcccgttatgaaatagatttcagcgctgtttccaaactcgtctctgaaatgtctgagtgtgttcactgtatatgaaacttcgtccctgttaagctcatacggtgaaactatggctccgtcataattctgaaccgaaagctctatcatctccgccctgtgtctgccgtctgtggcttttctgtcaagtttgaagggttgcaggtttgcaggaacaaatattattctgtccagctccgcctcgtcctttgcctgcattgcaaggtatatatgtccgaaatgtatcggatcaaagctccctccaaatatccctatcttagtcatttgctatttctccagtttctcacataaagtctttactatactgtccattgaaacctctacctgttcggatttatcaagaattttaacatttaaaatccctgtttcaatttcattgtcacctataactacggcataagatgctcccgatctgtccgctgccttgaactgacccttgatatttctctcaagcaggtcaatttcagtgtttatgccgcttgctctaagctctcccgcaagcttaagaccgtattttttggctctgtcgcccataataactataaatacctctgtttcgcgtggttttggtatttccacaccgtttgcctccattgtaagaagcagtctttcaataccaagaccaaagcccacgcccggcgttgacggacctcctacttcctctataaggttgtcgtatctgccgccgccgcatacagtgccctgtgctcctatgcttgtagttacaaattcaaaggctgtctttgtgtaatagtcaagtcctcttacaattcccgggtcaacaacatattcaatgttcatagcctcaaggttctgcttaagctcctcgaacgcgttcctgcagtcgtcacacaggtagtccagcattacaggcgctccctgcaccagctcctgacatacgggtgatttgcagtctaatattctcagaggatttctctcgtatctgtccttgcaggtatcgcaaaggtcatcatatttgtctgcaagaaattctcttagggcagctctgtgcttttctctgcacttcggacatccgatgctgttaattctaagctctatatccttaatacccatagagtttaaaaattcatatccaagggatataacctcggcgtctgccagcatattgtcagttccgaaagtttctattccgaactggtggaactgtctcagtctgcctgactgaggcttctcgtatctgaagcaggatatgtcataaaaatattttgtaggctgcgggtccgcataagccttgtgctctacaaatgatcttactacaggagaagttccctcgggtcttaatgtaatgcttctgttgccgaaatctgtgaaagtatacatctctttctgcacgatgtcggttgtgtcgcctacgcctcttttgaacagctctgtgtgttcaaatacaggtgttgcaatctgtttgaagccgtattttgcgcagatgtccgcaaaagcgtttcttacatatttccatttgtatgcgtcctgaggaagcatatctttcgttccttttggtgcatttgtaagcaattttttcacctcccgttaaatatctgtctgttttttctttcaatcatttcatctattcgtgaaatgtatatctcataatttgatacattaggtactctttcaagcctgttttcggcagggtaatataccttgctgatacctccggctcccatagctataatgctctgagcctcctccataatccttatgttgtatacactgaaagtgtcgtctttgcagtaccctgtattttcaaggctgccggccatatgcttctgtctgtaaagatagtacggcctgtagcctttgtcatctaaaatctctctgcctgccgcaagcatctgcgaaaccgtttcggcctgtctgaaatgaaaatccctgtctatatccttgagctttgaggctcttttgactgccagagtgtgaacagttatgttttcagctccaagctctgcgactttgtttaccgtatctttgaaatcctcaggggtttcttccggaagccctgctatgaggtcgcagttgattacgggaagtccgtatttacgggcaagactgaaagcatcgtaaatctgcctgtttgtatggtttctgccgattatatgaagggtttcctctttcatagtctgcggatttatgcttattctgtctatattatgctcagaaagcgcctgtattttggcctctgtgattgtatcgggtctgcctgcctctacggtgaattctttaatgctctcaagatttatattcttctctatatgtgaaagcagtctgtcaagctgatactcgtcaagggttgtaggcgtaccgccgcctatatatatactctcagccataatacctctctctgccatgccggcgccgactgcttcgatttctctgaacagcgcctcaagatatgcgtctattgcctctctgcctacctgatttgatgtaaatgaacagtaaagacatctcgtaggacaaaacggtatccctacatatatgcctgccgagttctcagatggttttcccagtttttcctgctggtaattatatatatcaacaagctctcctgccttgtcgctgcttaccctgtagtcctctgtaaactctctgtaagggtcagacagcatacctgcaagcttgaccggtcttacgcctgtaagagttccccacggcggtctttgtcctgtcagctctgaaagcctgtcataaatctgagcctttaatttgttcttatcagttttagtatcgccatcaagggtgaattccagtctgtccggaagatttccggtctgctccgcaagctcctgcggcgttatatattctccctgtctgtgctgctctaaggcatatacctcaaactcgtcctcgggaagaaatattttgataagctcctcgtattcatatcttttggttacattgtttaagacgatattatacaaaaggattgttctccttttcaaatcctattgtggtaggtcccatatgtcctggaagcacctgtgtttcgtccggtagcaggaacagcttctttttgattgattccataattgttctgaaatcaccgcctgcaaggtctgttcttcctattgatctgcagaacagcgtatctccgctgaacagcacgtcatcaaccagtatgcacattccgccctctgtatgtcccggagtcattatgaatttcattgtcatattgcctacagtcagggtatcaccgtcatcaacaagtatgtccggcttgaaagatactttttcaggaccaaagtgatgagcttcgtttaattccggatccagaagcattttttcctctgctcttgaacatacaacctttgcatcaggaaaatccctgagatgctcctgtactccgcctatatggtctccgtgaccgtgagtcagaactatatactgtatctgaatgtcatttttttcgattatgtttttgagttccctgctgtatccgccaaggtcaactataaagccgagtctgctggtttcatcacatacaaggtatgtgtttgcctgcagcattcctgtaggtatatttactattttcatattccacctctttaaaaagttttacggctgtccagcagtattgtcaccgggccgttattatttatttttacaagcatatgcgcctgaaatattcctgtttcaactttaatcccctgatttcttatgttctcgcagacctgctgataaagtctgtttgcaatttcggggtcttccgcagttataaagctggggcgtttgcctttgcgtacatctcccagcagagtaaactgtgatattgcaagaatactgccgccgacatcctttaccgacaggttcattttttcgttttcgtcctcaaatattctgaggcccgaaaccttgtccgcaatatatccggcgtctttgtcggtatctcccttctcaacacctatgaggactacaagcccctcgtctgtcgcacctgtaatctgtccgtctacggtcacacttgattttgttactctctgtactactgctctcattttaaatctaattgctcctgtatacgtctataacaccgtgtatgtttttgagatttctgaggactttctggatttctcccgtatcggaaagcgccagagtcattgtcatatgaacgacattgtccttgtctgatctcgcatttactcctgcaatatgaacgtccatatcctcgcaggttcttgaaatgtctgcaaacataccctttctgtcctcggcaattatagagatatctgtgttgtaggaaatggctttttctccgccgctccattcaacctctataaatcttgctttttcactttcgggaagattaactatattaggacagtcaactctgtgtactgaaactcctctccctttggttatatatcctataatctgatctcccggaaccggactgcagcatttggatactctcaccagaaggttgtcaacgcctttgactttaacgccggcgtcgttgtatctggatcttgtatgtttgctgacaggttttgtttcgattgcggtaatttcgtttttggatttctcttcttctgcttttttctgttctttgaacaggctgataatgagggtggcagccttgcctaatatggtgcctccctgacttatctgcgtgtaaaaatcatcaagtgaatgatattttaattcctttaccgctttgttgatatatgctgatttaaggacttcgttagggtcgtagccttttttgcgcatatatttgtcaatggcatccttgcccttgtctatagtacccgagcggttttcttttttgaggtactgtcttatcttggttcttgccgtactgctcttggcaattctgagccagtcgatattaggtcccgatgagtttggatttgtaagtatttcaacaatatcaccgttttgcagagtgtggttgattgtaactattttgccgttgattttggcgcccacacatttgcaccctatatctgaatgtattttaaatgcaaaatcaagaggtgtggagccagcaggtagctccagcacgtcacctcttggtgtaaatacataaacctgacttgcaaacagatccactttgagtgtctccatgaactctctcggatcgtccatatctttctggagttcaagcgtctgtctgagccatgcaagttttacttcttctttgtcggatttaattccttctttgtatttccagtgcgcagcaataccgtattcggcaatcttgtgcatctcataggttcttatctggatttcaaaaggatctccgttgtcgcctattactgtagtatgaagcgactgatacatattaggctttggcatagctatatagtctttgaatttacccggtataggcttccacattgtatggactatgccaagtacagcatagcagtccttgaccgactctacaattactctgattgcagtaaggtcaaagatttcatcgagctgcttgtgctgatatttcatcttgcggtagatgctgtaaaagtgcttggaacggcccatgatttcacatttgatattgaaatcgtcgagggctttcttaacctcagctataacctgatttattacagcctccctttcgccttttcttgcgcttaccttttcggcaagctcatagtaggcttcaggctccagatatttaagggcaatatcctccatctcgaacttcatagtgtatattcccagcctgctggcaagaggagcgtagatttcaagtgtttctctgcacttttctttaatcttctcctctgtcatatagttgattgttctgagattgtgaagcctgtccgccagctttataattaaaactctgatgtcctttgacattgcaaggaacatttttctcaggttttcggcctgtttttcctctttgttttcaaatacgatggaacccagcttggtaactccgtcgaccagaagcagcacttcttcgccgaattcggctttgagctgttcctttgtatacggagtatcctctatgacatcgtgaagcagacctgcaacgagagtttcatcatccattccaagctctgcaagtatacgagcaacttcaatcgggtgaattatatacggctcacctgattttctgagctgtccgttgtgcatatcctctgctatggagtatgctttgttgataaggtcaacatcataattgggattaatattcaaaatgtcatctaaaaactgctgtctgcgattcatctgtattcctttaaactgtcgaaaaactgtaataactaaactattgcgccttcgccgtaatctttaggtttttctttttctttttttggagctccctggtatttctttttgcttccgccgcctccgttgttctttcttttttcggaaagctttgtgaggtcatagtaaatcggtgagcatacgaatatcgatgaagctgcgcctacgattacacctaccatcagcgggagtatgaactgtctgattgatgctgaaaccataatgtacataggaatcataacgatcagagttgttgctgatgtcataagtgatcttcccagtacctgatttacacttgtgtccgtaagctccataaggtcacgtttcttggtaagaccaaggttttctcttattctgtcgaagattactatagtatcgtttatggagtaacctacaactgtaaggatacctgcgataaacggattattgatagtaacatggaatattccgtagaatgcgattactataagtacgtcgtggaatacacctgcaagagcggctacaccaaacggtatttttctgaatcttactacgatgtatataagcatgcataatgcagctataaggactgccttgacagcatttgccttgagctcatcacctacggcaggtccgaactgctctgacgctataagtccgtcatccggacaattgaattctttttgcattgaatcgaagatctctcctctggcagcattatcaaagaatgttgttgttctgattattacctgagtgttatcagttccgccatatacaaggcttacgttttcggcgtcgaattcatcaagcaccttgtttacatctgcaaaatcaacctgcttgttcatttcgacagtcattgtagtaccgcctgtgaagtcgataccgtagttaaagcctctgataccgcctacgataaatccgcacaggattattgcaatactgataatatagtaaatctttctgtgtctgagcacgtggaagaacttcctgatgtggaagcttgctgatccgtcctccttaacgccaaacagtgatttcttaggctcttctctcttgagaccgataaaggtttcaagataaagtcttgtgataagcacgcctgaaataatactgaagataacgcccagcattaatgttacggcaaatcctttaactgtagctgaaccaacctcgtatagaacaacacctgcgataagagttgtaatctgtccgtccatgatagctgataacgcattgtggaaaccggattcgcacgaaatccttaccgatttgcccgcgctcatttcttctcttattcttgagaatatgattacgttggcgtcaactgccataccgatgccgagtatgatacccgcaatacctggcagtgtcagtgtacttcccgagaatgccattgcccataatacaagtattatgtaaagcattagcgctacatttgcaataagtccgaggaatctgtatgctgcaatcataagtatgaaaataagggcaaagcctatagctcctgcgataacgctcttttcaagcgcattgtagcctattgatgccgactgtgttgaagatgttacttccttgagtgttacaggaagtgaaccgcctctgataagcgcagccagatttgatgctgattcacttgtgtaattacctgttatctggcagcttccgccactgattacattctgtacctcaggtgcagttataatattgtcgtcaagcacgatagcaatacatttgttgcttgatacgccctgatcctgcatcttgttttcaacttcaccgtagaatgcttttctggagccttcttcgaacttgcttgctccctcgctgtcaaactgtatgtttacaacatatcctgttgactcctggcttgtgccggctgttgcgtccttgacattgcctccgtcaactacaacagttccgtctgcaagcatgaactgaagctgtgcaacctgtccgatctggctgattgcttcttccgcatcttctgcgcccggaagctctattctaagccttttgcttccctctatagttacaactgcttctgaaaaccccatttcataaacacggttttccattacagtcttggtctgttccatcagatttgaaagttcttcacctgtataatcggtttgggcttccattacgacgtatacgccgcccttgatgtccagtcctaagttaagcttgtctttgatcggctcgattttgccgattccgaagatggtgacataccatgcgaatactgtaaatacaatgagtattattgacagtactcttttaaagttttgactcatattattacctgctttctcttatgtatttgtgtttggcataaaactgtgccatcttaaacataactcataacattttactacttttttgcttatgacacaagagaaatacaggattttagacacaaaaccatcacttttttgtgttgctgcccactatgccgcccatcattcctgccgctgccggtatgaaattcatcttgtttattaaacttacagggttaaattctcctgtatacagcgaaattccgcaccagacaaaaataacgaaaacaattgaagcgccgatccccgacagtatccccttaatagtaaatactcctgcagccataaaccctgcaaagaaacagcacagcgaaagaataacatacatacacagccttgcagtactgccgggaagaatacctgtctgcatcagaagtgaagcaagagcggtcagcattataaacagcacaatgcagataacaaaagctttgatgctcttttttaatatgtccatacatacctccatttagttatgatgatatatgtatataccctgcacagttaaaaaagactgaaaacacacaaaaagagcacacacaatcttcaaaagaccgtatatgccccctagtatgcatatatgttacaacatctctatcttctctttaggcagacctgaaactttagctatgatttctatatcaacattctcgtctttcatggccttagccatctcaagtgtcttgattttttcaccttctgcaagccctgctgctttgccgtcatcaaagccctcacgcttcataacctctccgtattcttctactgttattcccttaagcataccttcgacctccgttgcatacttattaagaaaatccgcaagaatacctgctctctttgctctctttaccgcagcagctacagcatcttcaaggtccatacctttgtcaagattttcattcacatatgatatgaacaaactgtattccctaagtgtcttgcttcttttcagtatttccttgttttcagaataacatatattatatacttttaccacaacttctatcgagttttccggtgcattttctttatagtggtctgacagtctgaaagtttccacttccggtgcgtccggcttgcctaaataaaaaacataaaatacaggtgcaggcatcatcactttccttgttccgtatatttcgcttccaaacatcatatctagcgtcttaccaaaatatgatgccattctaagtgctatatttcctgatttggttgactgctgttcgcagaagaacatagattttccgttaatagagaacgcaaggtcattaaataattatacgaggctattttgcatcagccaaccatattttctataaaacgtattttttacatattttttaggtttttgtatacaatttaatatagtcaccaataaaaaagactgagccttaaacaaaactcagtcttgatatatttctaaactatttttcttcttcagccacaggtgcttcctctgctgcttccggtgcctccggtgcttctgcaggaacttccttttcttcagctggagctgcagcagccttcattctcttaggtctgcttggcttctttggttcagcttcttcctctgctgctgcaggcgcaggagctgatgactcgcttacaacctttgaaactgcccatctcataatttcaaacttaaccttgtctgcgccaacctgaattacaaggctttcgtccttagtctttacaatcttaccgcagataccgcctattgtaacgatttcatcaccggctttgattgcgtttctcatttcatttatagctttttccttttttttctgaggtcttatcagaaggaaatacataactacaatgattaataccagcattaaaatactcatagtactctgattcataaaaaaatcctccttacgatttttataaacaatttaatctcaaatggtgccggcgatgggggtcgaacccatacggtgttgccaccacgggattttgagtcccgcacgtctgccaattccatcacgccggcataacgagactattatagcatacgccggctttttttacaataatttttactcttctgtatttgtgattttataactgctgtaccatttgccgcaattaacatagtaattacagaacataggagcaatatctcctgtcagttcatttgaaacaactgcactgtatgtcttatataatatagggtaatacggcagttcatcattaagtattttctttaaagcttctaccgatacctttatatcttcttccttgtttggtgtatttacatctgccgcaagcgacagagcctccgcgttgtcataccct

SEQ ID NO: 945 - DNA, 26770 bp, Unknown
  16S sequences of unknown bacteria
ccccgccgccccgcttcccgcacaggccatcagacgccagcaccagggacagcacgcccactcccagcactgtacagccatcactcccccacacaccaatcctcacagcagatcggcgcatctgccctcgccatcatcatacagccacccccgccccatacacaggcatcaaaaaaggactgccccgcacaggagcagtcctttttgtagtattctgtcagattatagcagaatgttattcttccacaggggtttcggtgctgtccgcagtctcctcagcgggagtttctgcctcagcaggagcttcgctctcagcggcagcttcctcctcgtcctcatggggagcccggcagagggataccagacggctgccctccccgatgcgcataacacgcacaccgccggcataccggctctgggtggagatctctgccaccgggatacggataatgatgccgtcatcgctgatgaggatcacatcgtcctcttccccgactgccagaacgcccgctaccggcccgttcttctgggtatcatagttcttgatgcccttgcctccacggctctgcagacggtattctgccgggtctgtgcggcgtccctgtccgttttccgatacagtcaggacagtggtgttctccattaccggcaccatgcccacaacaatatcgtcctcttccagattgagcgcacgcacgccccgggcagtacggcccagaacacgggcatcggtttcattgaagcggatggccataccctgacgggttgccacaatgagctgatcctcaccgctggtgagccgtacccaggccagacggtcgccctcgtccagggaaacagcaatcaggcccatcttgcgcacattgcggtaagccgacagctcggtacgcttgatcacgccctgttcggtgaccatgcacacaaacttgccctcgtcctcgggacgcacccggatcatggaagtgaccttctcgcccttctccagctggaggaggttgacaatattggaaccaacactggcacggctgctctcgccgatttcatagcccttgagccggtatacacggccccggtcggtgaagaacaggatatagtcatgggtggagcagaggaacagttcttccacgaagtcctcgtcccgctggctcatgcccgaaataccccgtccgccccggcgctgggtcttgtaggtatctgccggctgacgcttgatataccccagatgggtcagggtgatgacacagtcgccctcggggatcagatcctcgatgtccacttcaccgctcacagcctgtacttcggtacggcggggatcggcatacttctgacggacggcgttcatctcactcttgacaatggccttgagcttctgctcatcgctgagaatgctctccagctcggcaacctttttaaggatctcagccagttcttcctcgatcttgatgcgttccatgccggacagctggcccagacgcatggctacaatggcgctggcctgctcatcggtgacaccgaaccgctcgccgaggttcttcttggcatcggtctgatcctcggagtggcggataatatggatcacttcgtcggtgtgatccacaaccagcttcataccctcgagaatgtgttcccgttccttggccttgcgcaggtcgaactgggtacgccgggtgatgacctcctcctggaagtcgatgtaatgggtgaggatctccctcagggtcatgaccttgggctgaccgtcatggagagccagcataataacgcccactgtatcctggagctgggtatagttgtacagctggttgagcaccacctgggcattggcgtcccgcttgagctcaactacaatgcgcatgccgtcccggtcggattcgtcccggaggtcgctgatgtcggtgatgcgcttctccttgaccagaccggcgatggattcgatgagccgggccttgttgaccatataggggatctcagtgatgacgatcttttcccggccgttcttgtgttcctggatctcggcacggccccggagggtgatcttgccccgtccggtgccataggcggcacggataccgctccggcccatgataatgccgccggtggggaaatcggggccctgaatgcaggtcatgatctcatccagaccggcatcggggtgatccagcagcagatccaccgcgtcaatgacttcgcccaggttatggggcgggatattggttgccataccaacggcgataccggtactgccgttcaccaggatattggggaaccggctgggcagaaccgaaggctccttcagacggtcatcgtagttggagccgaagtcgaccgtttccttgtcgatgtcggtgagcatcacggtggagattttgctcatcttggcttcggtatatcggtatgctgccggcgggtcgccgtccaccgaaccgaagttgccgtgtccgtccaccagcgggtaacgcatggagaagtcctgtgccagacgcaccagggcatcatagaccgaagcgtcgccatgggggtgataccgtcccagtacagcaccgactgtatccgcgcatttgcggtaagccttctccggagagaggccgttttcatacatggtatagagaatccggcgatggaccggcttcaggccgtcccgcacatcgggcagggcacggctcacgattaccgacatcgaataatccaggaaactctttttcatctcctgttcgatgtcgaccgtgatgatcttattgttttcctgttccattccagtcaccaatttcgctccttacttgttcttttggatcttctttgacacaaaatgttcgcccagttcctgctggagcttttcccgcagggcccgataggaggcactgccctcgtcccgcttgatatgcagagccgagttcttcacagtcaccagcgagagataatcctcggtttcataggcggccttgaagaaggaatagggcatcagcgaagccttgttgaccatatcactgacctgcaggccatgctttttcgcctcgatggagaacttgatgccccggggattcatctgcttcatagcgccccgggcagcacggctggtaatgccgtgaatccagaaaccgagcgccacagccgcaaaggcagcgatcatcgagaatacactccgggtcaggataaagtccgctgccggtaccagcgcgaatacgcacatcacataggcggcgatggtatacatgcggtagcggcccttggccttttccagtgccagcatggcttcccgcatatcgtcctgcttcatcacccagcggtatttgcccggcttgcggcggctctcttcaatctccgcctgttcccgctcataggcttcccactgggcattctcgtcctcttcctcgtccggaacagcttccgccgcagaggcttcatcagccgatgcagtttcttctgcatcagcagattctgcgattggcgtcggcgaagccgaactgctccccgcaggggcagactctgcgcttgcgtcagtcgatgcagcatctatcgcaccagcactctcttcgattggcgccgccgaaggcgaaccgcccgccgcaggcgccggcgaagccgaactgctccccgcaggggcagactctgcgcctgtgtcagccgatgcagtatctaccacatcagaagttccttcgattggcgccggcgaagccgaatcgcccgccgcaggcgaagttttcttttcagttgattcttcgatgggggcattgctccccacaggggttttctcttccatgggattttcctcctgtatcgatcaataggtggtgtccagcggcagtttgtatttgccgcagaccgtacggatcagttcgtccaggaggaatttttcttctcccagggcgtgccggggaatgagcagcgtgcgaccgccctctctcagttccagcatatagatatcctcctccagcaccacacgcttgaactgctgccagcggaaggacagggtattctgttcgctctcctcatcaaagccggtggagtagaaccgcagtttgatgggattctggaggtacgaggagttcttgtagccgctgcgggcatacttcttcaccagataggggaaaatccaccggtaataggagaaacagtacaccccatagccaaagatcaccacagccagcaccagcaccacttcattcatcagcggggactggatcatggcagtctgccgggcatagatcacataccccagcaccagaatgcccaccagcagcttgagaatgccggtgaagttggtctttttggcccgggccgcatactgccggttcatcgaccgcaccgaaaaggtatagaaatcctccggggaaatgcggtagtccagttcgagaatgatctctttttcagccatgccgcacctccttaaatatccagattggaaacatacttggcattctgttcgatgaactccttacggggagccaccttgtcacccatgagaatggtgaatacctcatcggccttcacagcgtcctgcatggtgaccttgatcatggtccgggtagccgggtccatggtggtctcccagagctgttcggggtccatctcaccaagacccttgtaccgctgtacttcggccttgccgccgttttcggtgagctcggcaatatagcggtcccgttcctcgtccgagaaggcatagtataccttcttgcccttggctaccttgaagagcggcggctgggcaatatacacatggccctcctcgatgaggggacgcatgaacctaaagaagaaggtcagcagcagggtgcggatatgggaaccgtccacatcggcatccgccatgatgatgaccttgccgtaccggagcttggagaggtcaaattcactgccgatgccggtgcccagagcggtcaccaccggcatgagcttgtcgttgccatagacacggtccagccgtgccttttccacgttgagcatcttgccccacaggggaaggatcgcctggtaccggcggtcacggccgctcttggcagaaccgcccgccgaatctccctcgacgatgtagatctcggtgaggtcaatatcccgctccgaacagtctgccagcttgccgggcagcgaggctgtctccagggcggacttgcgccgggtgagttcccgggcacgccgggccgcttcccgggcccgggccgcgccgacacccttgtccagaatggtgcgggccacagcgggattctcctccaggaagtagctgagcttttcatagacaatgccgtccaccagggaacggatctcggtattgccgagcttggccttggtctggccctcaaactgggcatcggtgagcttcaccgagatcaccacggtgagaccctcccggacatcatcgccggtgaggttcttgtcgctgtccttgagaatggcattcttgcgggcatagtcgttgagcgcccgggtcagtgccgccttgaagccggcctcatgggtaccgccttcgggggtgtggatattgttggcaaaggacagcaccagttcattgtaggtgtcgttgtactgcatggcgacctctgccatctgaccgttctgttcgccggagatgtagataatctcatcgtgcagcacttccacgccgcggcgcttgtggatatagtccacaaagctcttgataccgccttcatagcacatggattcgctcaccggttcctcgccccggcggtcggtgaaggtgatgcgcacgccggcattgaggaaggcctgttcccgcagacgggtgagcagggtttcatagtcatagagggtggtttcaaagatggcgggatcggcggcaaaggtgacagttgtaccgctttcatcagcgggaccggcatcatagaggtcaccggtggccttgccgtattcaaagcgctgtttccagcaccgtccgtcccggcgcacctcgacttccagccaggtggacagggcatttaccaccgaagcacccacgccatgcagaccgccggacaccttgtatccgccgccgccgaacttaccgccggcatggagcacggtgaatacaacagtgactgcgggaattcccagcttgggctggatatccaccgggataccacggccgttatcccggacccggaccacattgtcgggcagcagttccacttcgatatgggtacagaaccccgccagagcctcgtcgatggcattgtccacgatctcatagaccagatggtgcaggccctggggaccggtggaaccgatatacatgcccgggcgcttgcggacggcttccaggccttccaggacctggatctgactgccgtcatactgttcgctgataggtttgttttccacagatgattctcctttgatggtcgcccggtccggcgtctgtgccggaacggacatagtatacaaaacaaccggttcctgtcccgctccggcattgccggcacagaacaggagcagaatggcagacgcgaaatttcaggaaagccgtgccggctgtcctcccccgtttcctgtatgggacagggaaagtcagcgcagggccgcggcagtattttccacccggcggcgcagagtagacggcgccagatgggatacatagacccgtcccactccatcgctttcacagagcaggaaggatttgggcagttcagtgccgctcagatagatgatctcgccccggctctgggccgcggcaaagaattcccgggtgattttggagaccgagctgttttcgatgtccagaatggcaacgatctcccgggtacggatcaccgtattggtatccagatgcaggtacattatccttcctcctcacagatgggaaagcctccggggtaaaattccccgttttggaccgcgacgacttcggcgtcactggtttcccagagaaggctgtcgtcacaggcggtgatgaacacctgccgtccggtgaggccacccagaagatattcccggcgggaacggtccagctcgctcatcacatcgtcgagcagcaccaccggctggctgtgcatggtatcggcgatcatttcgcattcggcgagcttcagcgacagcacaatgctgcgctgctgtccctgggaggcaaagttccgggcagcacggcccgagagctgcagcgccaggtcgtcccgatgagggcctaccccggtgctgcccagccggagatcttcttcccgcccctgttccagcagcgagagcagagcctgttccagctcttcccggctgccttcggggtcgaggataccgctgccggtgccgccgatggtatagcgcaccgaaagctcctccttcccggcggagatcccctgatggaacccggcggcatattctgccaggcgggtcagatagctctgccgggtgacctggatcaggcttcccagccgtgccacatggtaatcgaataccggcagcagatccagccggctgcggtcccggaaggcctcccggagcagggtgctgcgctgggccagggcacggttgtagtcgctgagcaccttgatataccggggccgcagctgacagatggcgccgtccaggaaatcccggcgttccgcggggccgtcccgcaccagggaaagatggttcggggaaaagatcacacagcataactttccggaaaaggcaccccgtccgggttcagtgatgccgttgatcttcacctgccgccggggccagaggatatattccagttcctgatcccgtccctcggcaaagacattggcacagacccgggtgcgctgggtttcccggtccatatccagccggggaatatcatgttcccggccatagcggaaggttttctccccggtgagcagccagatggcctccatgaggttggttttgccctgggcgttgtcgccgacaatgaggttgaccccttccccgggggtgaggtcacaccggataatattgcggtaattctccagggaaaggctattgatccgcacgggcaatgacctcgaattccagatcgggaatatccggggtggtgacaatatccccgggacggagctttttgccccgcatggtgcagacttcgccgtttaccagcacagcgccggcctgaatggcgtccttggcctgaccgccggtctgggcaaggcccgcgaatttcagaaagctgtccagtttgatgaactcgctgtcgatggcgatctgttcacgttccatagcggcttcctcctttgtgtatgatcggttactgttcggtcttgaggcgcaccggcagtaccaggaacaggaagctgtccccttccggcggcaccagcttcatgggcgaaagcggtccgctgatctgcaggcagatctcatcgcagtccgctgcccgcagggcatccaggacatatttgttattgaagcccatctccagggcattgccctcgatatggcagggcacttcatcataggccttgcccagggaggtggtacaggtgatgcgcaggctgtcctcctcgaacctgaggcgcagggggctgcgcagccggtcggagatgatcagcgaggcacggtccaccgcggcgatgagttcccgggtggagacagtcacctgagtggtatagccctggggaatggcagcctgatagtccaggaattcgccgtccagcagacgggataccaggctgtaactgccgatggtggtgaggatatactgccgggatacctgaatggaggcagtcttttccggctctccctcaccggcgggctcgtccgaaaggagcttggcgatctccgccagggtcttgcccggcaccacaaagcgggtttccaggccggtgtcgcacagttcccggcgcacagccatgcggtagccgtccaccgataccacggtgacgctgtcgggcatcacatcaaagagggaaccggtgtgcaccggcttggtatcgttctgggagatggcgaactgggtctgttcgatcatcgacttgagggcgtgctggggcagggtgaggctctcggcgtcacccaggccgggcagctcgggatagtcagcggcatccatgcccagaatggtgaactcggcgccgccgccccggatctcggtgagcagcttgtcgtcgcttgccacgaatacctcgccgccttccagcttgcggatcatatcaccgaacagccgggcgccgagaatgatgctgccctcttcggataccgcagcggggatcacggtggtgatgcccagttccaggtcgtagccggtgagggtgagggtatccccttccgcccggatcagaatgccttccagggcctggagagcggtgcgggtggtcaccgcccgggatacattggagaccgcggcagagagcacggccttgtcgcaggaaaacttcatctcaaaaaccttcctttcagtacagctccttgaagaaaatcaaggagggtcctccgccctgggacagctccttcactctgagtgaatcgaccctggcttgggaggtacactgagagtgaattggctggttttccccgaaggacactgccgcaggcagctgatccatcataaaaacagcggagtatatatctatacaggtagataatatttagtaggagtagtagggggcgccgaaaccttgaaaaccggaaaaaaccgcatagtgacgcggttttttgagggtgcggcgctgcccggagcctgtggaaaaggctgtggattcccgccggcgggtccggggcagcgtggaaacttctcaaagcggtggagaacttccggtgttttccgggaaaatccggtggaaaagcaccagtggagtccggcggagttttccaccgtccggataagtggatatgttaaaaacctgggcagaaccggcggcctgtggaaaactcccggatcagttccggtttccggggaagcaatcagctgtcccgtatatttttcacaatgtcttccaccgtttccttgaagtgggtatcctccttcatgcggctttccacctgaccgatggcatagacgatggtggagtggtcccggttgcccagttcatcgccgatggcctgcatggatgcctgggtgatctcccggatcacataggcgctcacctgccgggcggtggagatatgggcggtgcgcttctgggagcggatctcatcgggggtgacgccataggtgcggcccacctcgctgatgatgcgttccaccgtcacctggatgggctggctgtcattgaagatgtcccggatggcattctgggcgatgagaatggtagtggggctgcccaccagtagcttataggccttgagcttcttcaccacgccctccagctgccggatattggacttcagtttgttggcgatgtactcgctcacctccgggggcatatccaggtccatgagctcggctttccggcggacaatggccacacgggtttcgaagtccgggggctggatgtccgccagcaggccccattcaaaccgggtcttgaggcggtcctccagggttttgatctccttgggcggccggtcggaggtgagaatgatctgcttgccgttctggtgcagcgtttcaaaggtatggaagaattcctcctgggtacgctccttgccgccgatgaactggatatcgtccaccagcagcacatcggcactgcggtacttgttgtggaattcattggtggtgtcattcttgatggcgtccacgatctggttggtgaattcctcgcccttgatgtagatgcagttgtaatcggggtgattctgtttgatctcgctcatgatggcgagcatcagatgggttttgcccagtcccgaaccgccgtagatgaacagcggattgtaggccttggcaggattggcagccacggcctgggcagcggcatgggcaaacttgttggagttgcccacaatgaaggtggcgaaggtgtattcataatcgccgccctgactgctcttttcgatctcctcggggctgtaccggttgaaggccgccgactgttcctcagccgccaggatgggattgacctcggtgggtttttccacgcagaggatctccacttccgcagggaagcccatcacttcggaaaagccccgggtgaggacatccatgtactttttggagaccacgtcctgcatgaagctgctgttcaccgagagcttggctttgccgtcctcgaagcccaccggctggatcggcgcgatccagaggtcatagggcacggggctgacttcctttttgcagtactctttgacgagggtaaaaacttccgcaaaggactccataactcaactctttccttcctttggtttttcactgattccacttctccggaactgctctgtggaaagggcgggagaagggtgtggataacttggtggaaaatgtggaaaactcatcttccacggattttccgggattttacacagccggaaactgttcaaaattcactcataaatgataccatagtttcacgcccttttcaagatttcaacgggttttcagcctattatatataaatagtatagcccatcgggccataaactggggcggatgccggaaataaccggaaaaaagttttgggaaaaggcgattttccgggaaaaaatgtgggtttgtgccttgacagcggggcttgggataagctatactatattcttgcaaggtttcgctttgaaaggagggtgtcctgatgcttagaacctatcagcccaagaagcttcagagaaagaaggagcatggcttccgcaagagaatgaaaactaaaaatggtcgcaaggtgctcgctcgcagaagagccaagggcagaaaaagactgtcttactaagatattataggaccgcaaacgatcgctttgtggtcctgttttgttattggtaagaatccagaatttctgctgccttacggcagaccatcaggcagggaaagccagaaggagtttgcatgcagtcggttacgctcaatgagaacagggatttcagacgggcctatgccaaaggcaagagccgggtccaccgtcttttggtgacctatgtcctgaggaaccggctgggtgtgaaccgggtgggtttcactgccaccaaaaaaatcggcaaagcctgcagacgcaaccgcgccagacgagttatccgcgaagcctatcgtattctggagccgcagcttcgtcaggggtatgacatcgtatttgtcgcccgcggcgccaccggcgaggtaaaaatgcaggaagtcctggctgtgatgaaaaaccagctgggttccattatgctgccgcagcaggccgatgctgcccggactgaggagaatgcccgatgaaaaatcccctcaaggggctgtgtctggccctgatccggttttatcagagatgtatcagtccatatacgcctgcccactgcaggttttatccaacctgctcctcttacgcgttccaggcgatcagtcgcttcggcgtactgaggggcgggtttcttgctgtcaaacggattctgcgatgcaatcccctcttccccggcggatatgatcctgtcccggaagagttccattttttccgcggaaaatccgaaccggactgatcgtcccgcatttcccccaaaaaaaggcagggttcccgtcccccggaggactcccccttttctgaccaaaacaccgtatcatacaggttcgccccctcctttttactactcagagcctgtgtgatccctgaaaattccgggggacctatgaaccgtccgaaataatccactgtaaggagtacacagaatgagaatacttggtatcccgcttggctggattctgcatttctgctattcgctggtacagaactatggtctggccctggtgatgttcactgtgctggcccgtctgatcctgctgcccctttccatcaagcagcagaagggcatggtcaagatggctatgttccgcccgaagatggaggagatccagaagaaatacgccaaaaatccccagaagatgaatgaggagctcaccaacctctatgccagagagggctacaaccccatgtcgggttgtctgcccaccctgatccagttccccattctctttggtctgatcgatgttatctataaccccctgacccatctgctgcgcatggatgcggctaccatttccaatgctgtttccattgcccagagcgtactgggtgaaggcggtatgagccggtacagcaaggaaatgagtgtcatcagcgcggtggcacagaatcccgcggcattttcgtccattggcggcgattttgtcagccagatccagaacttcgactttaccttctttggtctggacctgggtactaccccgagcttcgcgctcaatctcttcctgctcattccgatcctgtcgggcctgacttccttcctgatgtcctggctgtccatgaagaacaatgccatgcccaatgaaggttccaccgctgccatgaaccggtcgatgatgatcatgatgccgctgatgtcggtgtggatttccttccaggtaccggcaggcgtaggtatctactgggtactgtccaacgcgctggctctgatccagatgtatgtgctgggcaagctctacaatccccgtgagatggcagccaaggccaaggctgaactggaagcccagcgggaagctgagcgccaggagaagatcgaagcccgcaaggcagccaaggaaaagcaggcggaaaagaaccgcaaggccgcggaagctgccaaggcaggcaagaagcggaatgctccggtggaagtagaggaagagaccctgatcgatctggtagagaacgatgaagtggacgaaaaggcgctctcccagaaggagatcaaccgtatgaagctggcagcagcccgccgccgtgacgccgagcgttatggcgaggaatatgtggaagtttcggacgaggatctggaataagagcagatctgttcatcggaacggttcccgtcgccggggattcctgtcccggcagttatacagcggtctgtatcaagaggaggaacacagatgaaacgagaatatatcggcaccggcaaaacggtggacgaagcaatcgaagcagcttgtgcggcactgggctgtgagcgttcggaaatcgagtttgagatcctggcactggccaagaagagcttctttggactgcgtaccacaccggctcaggtcaaggtgacctgggaggacggcacaccggaaccccgtgccaaccgtccccaggagggccgtcgggagaagaaggcagaaaagcccgccgaaaagccggcagagaagaagccggaaccccgtgcggagaagccgaagaatgagccgaagcccgagaagcccaaggcagaaaagccggcggaacccaagccggaaaagcccagggctgagaaggcagagaagcccagagccgagaagccggcggagaagaagccggagatcgagcccatgcgtcccctgcccgagctgagcgatgagatccctgaggcagtaaagcccaaggcagagctggcagcggcctatctcaccgaagtgatcaaggccatggaagtcaaggacttcaccatcaccccgaagatgcgggaagacaccctggttctgctcattgagggcagtgatctgggcgtcgtgatcggacgccggggcgaaaccctggacagcctgcaggtactcaccggcctggcagccaaccggggcgaaggcgagtatgtccgggtgaacctggacagcggcaacttccgggagaagcgcaccaggaccctggaagaactggctgtgaagatggcaaagaacgccgtccgtaccggacgcagcaccactctggagcccatgaacccctatgaccgccggatcattcacgcggcggtagcgggtgtggaaggcgcagcctccacctccatcggagaggagcccaaccgtcgggtagtcatcagctcgctgaatccccgcaaatcccagcaggatcgccggggcggacatggcggaagaggccgtcggggcggacgaggcggtgaccgccgccgggacagccgtccggttgagaataccgcggtaaacacggagaagccggcagctcccaaggctcccctgaaggaagccgaggacaagccgctctacggcaagatcgagctgtaatcctgtctttgaagcagacagcgggaagagaaatccctgctgtctgtttttttgcgctccggcaggtgacagcccccgggccgctgtggtaagatagaggcaaacaaggccctgtatgaaaggagattttcagttatgcagcatcgtatgaaggagttctccatgacacccgaagccaccctcgccctgctcgggcggggacaggtgggtgtgctctccacctcgggagcggacggcgcaccctatggcgtgccggtgcactatctctggcaggacggcaaactctggttccatggcctgcccgccggggaaaagctggagaatatcgcccgggatcaccgggtgtgctttaccgtatgggagttcggcggaatcctcaccgagggcgccgagaatccctgccaggctgacgccgcctatgagtgcgctgtcctccggggcaaggcacggctggtggacgatcccgccgaaaagcgccgcgtcttcctggcgatcaccgaaaagtatgcccctgagcttctggatctgcccattcccgaggcccgcatcgccggtacagctctggtggaagtcacccctgtcaccctcaccggcaagtatcaccgctgatggtttcctgttcccgccctgccccgtattcccggagcagggcggttttccgctctccaggccggaaaaggttgccatccccggcgggaacgattataatggggtttgtaaatcctgtcccggaacgggtgccgtccggggaggggaactttttgccccaaggcagaatctttatgccctggccccggctaaaaaagaagaatcggggatagaataaaagggagaaagaatcccaattttcacccaatcagagaggaagcgtttcctatgaaacttacactggaacagtaccacagcatgatcaagacccgctccatcggctttatcggagtgggtgtcagccatcgggagctgatccgtcagtatgccgctgccggagcccggctcaccgtccgggaccgccgcagcctggaggaactgggcgacttcggcagggagctcactcagatgggagtccggctcatgctgggcgccgattacctccgggacatcaccgaggaggtgctcttccgcacccccggcatgaagttctatacccctgaactcaccgaagcccgccgccggggtgtggcagtcaccagtgagctggagcttttcctggcgctctgtccctgtccggtgtatggcatcaccggttcggacggcaaaaccaccagcaccaccctcatcgccgaactgctccggcggtcgggccggacggtgcatctgggcggcaatatcggcgcgccgctgctgccggtcatcgaccaggtcaagcccgaagatgccgccgtggtggagctttccagcttccagctcatctccatgcgccgcagtcctgataccgccctcatcaccaatgtggcgcccaaccatctggatatgcacaaggatatgcaggagtatgtggacgccaaaaagaatctctaccgccatcaggacgccttcagccggacggtgctcaactgggataatgacatcacccgttccatggcagaggaggtccggggggatctctactggttctcccgccgggaaaccgtttcccgtggaacatatctcgacaccgatggtgtcctccatcatatcgatgaaaccggcgatgtggcgctcttccccatgcaggagatccgcattcccggcatgcacaatgtagaaaacttcctcggcgtcattgcggcgctgtggggcgaggtttccccggagctgttccgcacggtggcaagggagtttgccggggtggagcaccgcatcgagttcgtgcgggagcttgatggcgtcaagtggtacaacgactccattgcctccaaccccacccgtaccattgcgggactgtacagcttcaatcagaagctctgcatcatcgccggcggctatgacaagaagatccccttccagccgctggcagacccggtggcagagcgggtgaagctgctgatcctcaccggccccaccgctgataagatcgaagcggcagtgaaggcaagccccaagtatgacccggctcagtgccggattctccgggcgaaggatctgcccgaagcggtggcactggcccggcaggagactgtccccggggatattgtatccctctccccggcgtgtgccagctttgatgcctatccgaacttcgaggtgcggggacagcacttcaaggagctggtacgggcgctgtcctgagccgggacagaactccctcccactataagaagaaaaaaccggtgatccgggcagaaaaacgccccaaaaccggtgctttacataaattttacacaaagcccgtcctgtccgaccagggacaggacaggaaggaggcgtttcatgcgaaccacagaggaaatccgccagctgctgctggaattgtccgcctgtaccggggtatccggtgatgagggcggcattgcaaaaaagatcgaggaactgctcaggccggcggcagactgccggcgtaccccgctggggaatgtgattgccgtgcagaatgccggcgcccccaaaaagctgatgactgctgcccacatggacgaagtgggctttctggtgacccatattgaggaggacggtttcctgcgggtgaaccaggtgggcggtgtggaccgcaagctgtatgcctcgtcctgtgtgacggtgcataccgcgtcggggccgctctccggggtgatctcctcggtgccgccccatctgcgtaaggaggagaaggaactccctgcctcggacgaagtggcagtggatctgggcctttcgggcgagcgggccagggaactggtctgccccggcgaccgtgtgaccatcgactgtgaaccggcggtgctgctggacggcagcgtatccgccaaggcgctggacgaccgggcctgctgtgcggcagtgatcctggcggcggaggagcttgccgggaaggatctcccgctggagctctcctatgtgttcaccaccatggaggaggtgggctcccagggggctgtgaccgccgccggggagatcgctccggattatgcggtggcgctggatgtgtcctttgcggtgacccccgatgtccccgcccgcaactgcggcaagatgggcggcggcgtgatgctgggcatcgcccccattctcgacaatggggaaaccgaccgggtacgccgtgtggcaaaggaacaggaactgcccctgcagtttgaggtcatgggcggcagcaccggcaccgatgcggactgcatagcggcatcgggcagcggggtgcgcaccgtgctgttctccattccccagaagtatatgcacaccccggtggagacggtggcgccggaagatgtaaaggccacagcggaactgctctgcgcctatatcaccgatcttgccaaggatcttgcgaaggagggaaactgacatggaactgacccagcgaatccgggaactcacggcgctgccgggagtatcgggacaggaggacgcagtgcgggagtatctgctccgggcactccagggccgggaggactgtgactgccgggtggatgccctgggcaatctcattgtgaagaagaccggacggcagaccccggcaaaatcccttctcatcaccgcccacatggacgaagtgggctatctcatcacctatattgaggacagcggcctgctgcggtttgccccggtgggaggcgtttcccccgaggtgatggcaggcaagcgggtgtatgtgggccagaagctgctgcccggcctggtgggactcaaggcagtccatcagcagaaggcagcggagcgcaccgccccgcccgaagcggacaacctctacatcgacatcggcgcaaagagccgggaagaggccgaagccgccgtcaccctgggcgaccgggtgagctttgcccagaactatgcccggttcggggagggctttgtccgggccaaggcgctggataaccgtctgggctgtgccttcctgctggaactgctcctctcggagagcgagtacagcttcaccggcgctttcaccgtccaggaggagaacggctgtatcggagccaaggcggcagcgggttcggttcagccggacatcggcctgatcctcgagaccaccacggcatctgatctcccgggcaatgacggagccaaaaaggtttcggtggtgggagccggcccggtgatctcctatatggaccggggcaccatctatccccggcggctgacccagtggctggaacagctggcagcggaggcgggaatccccacccagaaaaagaccctcattgccggcggcaacgaagcccggaccgtacagactgccggagccggttcggaggtcatggggatttcggtggcctgccggtatctgcacagccaggcggtgaccgcttcggagcgggatattgaggataccctgcggctggtgcgtctggcagtgagccgggcaggcgaactgtgatcgcctatctcaatcccctgcagggggaggaatttctcgacctctgctgtgtggaaccgatcatcggggcgagtatctgcagctggtactgctgttatgccaatgcctatcccttctgtgacctgtggatcatctactcggacaaaaagaaccccgacttcccgccctccgagacccatgagggctatccccatggagtggcggcccggtatcaggggacgctgtgcatcgcctgtgacctggatgtggactttgacgagctggcggagtttatagcgggcagcggcgccatggaggtggagtgcctctcccccattatggacgagctgctcccccggattccctaccggctgcgtcagcgccagacggtgatgacctacgactttgaccgggaaggccagccgggtttcccgccggcagcggtgctgagcgagcggaattttatatacagcgaccatctggacagcgatgccgatgcctttgtggagaaccgggagctgcgggagatgtatgaggtgatctgccagtgttttgagggcttccgggagaacagccccttcccggggtggtatgtggatacctttgcccggatcaagaaggcggagagctacctctgcgggatcacacgggagggaaagctggtgtccacggcgggggtgtacaatatctcgccggtgtcggcgatgatcagttcggtggcgactctcccccattggcggggacagggtctggcccggcagtgcatccgccggtgcctggagtatatccgctatctggactgcaccccctacctcaccgccgccgaacccagtctggtggagtactacaccggcctgggcttcaccccctgtgccgagcggtgctcggctttatattacccacggtagcccggcgccccgcccccaaatatgttttctctccggcaggagccggatttcccatacgatttttacagaaaagaggacagatcaaactaccatgaaagaaccgtttttcaccatagatgagaggatcgaaaccctctgccgtcaggccgaggaacagtgtgccggcattttccggcagatcgacgataccgccgactacaatgcccagaaggtactggctgcctttatcaagaaccgggtcagtgagcccatgttcgcaggtaccaccggctatggctacggcgacatcggacgggaagccctggatgcggtactggcagacatcttcggctgtgaggacgccctgatccgccacaacttcgtatccggcacccatgccctcaccacagcgctgtttggtgtgctgcggcccggggataccattgtgtccctcaccggacgcccctatgataccctggaagaggtggtaggtctccggggagaaggccatggcagcctcaaggaatggggcgtgaccttccggatgcaggagctggctccggacggacacatcgattttgatgccattccggcggcggtacagggagccagggtggcctatatccagcgcagccggggttataccctgcgtccgtcggtgacagtggcagagatcgcccgggtggtggagctggtgaagaaggccagcccggacaccatcgtcatggtggacaactgctacggggaatttgtggagcggcaggagcccactgaggtgggagccgatcttatcatcgggtcgctcatcaagaaccccggcggcggcattgcccgcaccggcggttacatagcaggccgggccgatctggtggagctgtgtgcccaccggctcactgccccgggcgtgggcaaggaggtcggctgtaccctgggcgagagccgcaatatgttcatcggcctgttcctggcgcctacggtggtggctgcggcagtcaagacagcggtgctcacctcggcggtatgccagaatctgggctatgcggtcactccccgctgggacgagaagcgcaccgatattatccaggccatcaccctgggcgatgaggcgtcgctggtggccttctgccagggcgtccagaagggcgcgccggtggatgcctatgtcacccccgagccctgggatatgcccggctatgagagccaggtcatcatggcagccggcgcctttaccatgggcgcttccattgagctgtccgccgatgcccccatccgggagccttttgccgcctggatgcagggtgccctcacctatccctcgggcaaggtaggcctcaagctcgcccttcagtccatgctggagcagggcgcgctgaagctgtaaaggagagaaaaatcatgtccggttgttttgtgcctgttctctttgcgggagtgtttctgctggggctgtggaaaggcctgagccggggcctctgatacaaacccatggtttttcatgaaaaaaggactgtctgttttccagacagtccttttttgcgtgctgggaaatcagtcatcgatgcgttccagcttgaacaccaccggacgggcgccgtcattgcagcaggtcagaatggtgtggtttaccgcccaggagggttcgccgccctgcaccatggtgaatacataggtgctgatggcgttccaggcttcggagcagaagggtttccggaagcggagattgaagaagctctcccggtccacaaggaactcgtcccccacttcgaacacctcacagggaacggtagcggggtcgcagtaccgggcgatgagatcggcatagagatcctttttcaccacagtgatccggcattttgacatgggttattcccccttgtactcatagaaatcgtccatgtccagattctgatagatgatctccaccggtctggagccctcagccagcagcaggtcagccagagccctggcaaccttttcctggagctccttgggacgctgtttccactggatcaccaccatagcggaccgggcatcggccttgccgccccggaagaaggcgacctcattgtgttcgaccacgatccattcctccggaacggcgataatggacgccacagtttcagcgatccggggagccagagcggcggttttttcccgggaaatacccttgacaatgacctgaggcataagaaacactcctttctcaatcgggtggaaaacggataagtatagtatatcacaaccgggacagatgcgcaaaccaccgcctccggcttgacagaccgggtggattctggtatgctgatttgcgaatgattcgcaaattgaggaggaaacggatatgccgcgttataccacccgtcagcgggaagccctgctggattatctgagccgtcacccggaccagccgctcacggtccgggagatcgccgccggtgtggagccggacggcgtgagcctgagcgcggtataccggaaccttgccgagctggaagccgccgggctgatccgccgggagagccgtccgggcagccgggaggcggtggtgcagtatgtgggcgccgagaactgccggggccacctgcacctgacctgtacccgctgcgggcgcaccgtgcatctcagttcagctgccgccagcctgctcaccggcatggctgccggagagggcttttcgctggatctcacccgcacggcgctctatgggctctgtccccggtgccggcaggaggtgcagccatgaaccggctgtcgccccatctgccccatctgccccagctgccccgcctttgccggctggatcgactgtctgtccgttccaagcggctggcggctgtgctggcagcggtgctgctcaccctctcgctggtgaccctgcccctctttgccgccgccgaacagaaccatgcctgtgcccgggaacactgtgccatctgtgcccagtaccagcagctgcgccagagcaccggagccgctccggctccggcagcggaacctccggcattgccccgtccccggcggacagcggtctctctcctgtccgacgggagccgggctgccctgtcgccggtgatgctccgggacaagctctcctgctgagtcctggcccatacgccagccaagaggcctgccgcaagttcccggaagggacgccatgcggcaggacccccggcctttttctgtcttttgcggggagggccgggcgaggaccagccatcaggcaaggagaatttttatgaaaaagtatatgttggccctgggactgagcctgctcaccgtcctgggactgttcaccggctgttccccgaaggccgagacggcttcgggttcggacagtctgaagattgttgccaccatcttcccggaatacgactgggtgcgtcaggtgctcggcgaccgggccggggaggtacagctcaccctgctgctcgacagcggtacggacctgcacagctatcagcccacagcggcggatatgctcaccatcggggagtgtgacctgttcctctacaacggcggggaatcggatgcctgggtggaacgggtgcttgccactgccgccaatcccgaccgccgcaccctcagtgtgatggaagtgctgggggattcggtgctggaggaggaagtcgtggagggtatgcaggaggcagagggccacgaccatgccgaaggcgaagcccatgaggaggaagcggacgagcatgtatggctttcgctgcgcaatgcccggaccgcctgtgcggagattgcccgggtgctgggcgaactggacccggaccatgcggctgagtaccggaccaacgcggagaactatatggcagagctggaggcgctggacggggaatataccgctctggcggagaatgcggcccgcaggacggtgctggtaggggatcgtttcccgttccggtacctgatggacgactatggcctggagtattatgcggccttttcgggctgttcggcggagaccgaagccagctttgaaaccatcgccttcctgtcgggcaagaccgaggaactggcgctgccctgtattctcaccaccgagagtccccagccgggggtagcggagaccatccgttccaatacggcatcgggggatcagacaatcctgcagctggattcgatgcagtcggcagggacaggggacaactacctggatattatgaaggaaaatctggaggtactgcggcaggcactggcctgatcccgcgggcaagggaaggaatgatacaatggcacagcttgtctgtgaggagctgaccctgggctatgaccgtccgatcctgacgggactgagctttgaggtaaatgccggggattatctgtttatcctcggggaaaacggtgcgggcaaaagcaccctgatgaaaacagtcctgggactgattccgccgctggcggggaagatcacccgaggcgagggactctcggcggggaagatcgggtatctgccccagcagacccgggcccagcgggattttccggcgtcggtgcgggaggtagtgcagtcgggctgtctgggcagacgccggggactgcgcgcgttctattccgccggggaaaaagcccgggcggcacaggctatggaacgcatgggcatcactccgctggcggaccggtgttaccgggagctttcgggcggacagcagcagcgggttttgctggcacgggcgctctgtgcggcggattccatgctgctctgtgatgagccggtcaccggcctggacccggcagccaccgaggagctctatcatgtgatggacgagctcaaccgcagggacggcatgaccgtggtgatgatctcccatgatccggcggcagccctgcggtatgccagccatatcctctatctgggagagccggtatattacggcacccgggagggcttccttgccaccggggccggacagatctattccggaagggggaaccgtccatgctgatgactctgcctgagatgtgggattttctcagcctctatcttcagtacagctttgtgcagcgggcgatgatcgtcaccgtgctggtggcgctctgttcggcgctgctgggcgtgaccctggtgctgcggcggttttcctttatcggggacggcctttcccatgtggccttcggcgccatggcagtggcggcagtgctgaacctcgccagtgaactgcccctggtgctggcagtgacggtgatctgtgccgtactgctgctgcgcaccggccagaacgcaaagatcatgggtgatgccgccatggcaatggtgtcggtgggggcactggccatcggctacctgctgatgaatatcttctcctcctccaccaacctcgccggcgatgtgtgtaccaccctgttcggctccacatccattctcaccctcaccgagtgggaggtctggctctgtgtgggtctggcagtggcggtcaccctgctctttgtgctgttctatcatcagatctttgcggtcacctttgatgagaacttcgccgccgccaccggggtgcgcaccggtatggtcaacctgctgctggcagtggtcaccgccgtggtcatcgtcctggctatgaacctggtgggctcgctgctcatctcggcactggtcatcttcccggctgtgtccgccatgcgggtctaccgcagcttcagggcagttaccctctgcgcggcagtgctgtcggtggtgtgcgccttcctgggcctgatcctctccattctgttcggtaccccggtggggtccaccattgtggcagtggatctggcagccttcgggctgttctccctggcaggccgcatccggagggcttagtccatgggccgggtcatcggggccctgctgctgactgtcctgctgctcaccggctgtgcccgggaagagccgctctccggcagtcagccagagccttccgcccagagttcctcccggtccggtccggcagcggaggaaccttcttcccagccagagagccagcccgaagcctcctccgatacagaggctgcggaggtggatctcaccggcatgagcagtaccatggtctttgcggaggtctacaatatgatggtggagccggagagctatgagggcaaaacggtgcgcatgcagggggagctggtgagctaccctcaccccttcaccggggaggactgtcatgcggttatcgtcaaggacgccctggcctgctgtgcccaggggttccagttccagccggcggagggggtcaccctgcccacggacggcgccgaggtgacggtcaccggggtctataccctggacgagtcgctgatggatcaggggattatgatgagctatctggcagaatgtgccgtggaacagccagaataagaaaacgcagaggaatatcctctgcgtttttttgtataaagaaaaccactcgctaggcgagtggttcaaaagaaggcttttgc

SEQ ID NO: 946 - DNA, 3093 bp, Unknown
  16S sequences of unknown bacteria
ggacagcacgcccacaatggggatcaggaggtaagcgaacggatgagcaatggtagcaaggatggaagaatccgctgtttccgccacctgaaggctccagttaaagctctgcatcagctgcacaacggtgttgcacaccaggatgatggtaccggctttgatgatgtacgctttaccacggtccagcatggacagcacgccgatcttcaggctgggcgccttatattcgggcagctcgatgatgaagaaagactttctgaccttatagccagtgatcgcgttgaccagcagcgcgcacaccagaatcagggcaatccccacaaagtacatcatgggcgccacccagccggcattggggaaaaacgcgccgacgaacagcgcaatgacgggcatcttggcgccgcagggcatgaaagttgccagcatggcggtggaacggcgctcacgttcgttgcggatggtgcggcaagccatgatggcggggatgccgcagccggttccgataacaaaaggaatcacggatttgccggacagacccactttcttaaaaatcggatcgagcaccaccgtagcgcgggccatatagccgcagtcctccagcagggcgatcaggaaatacataaccataaccaacggcaggaaaccgatcacagcgctcacgccgccgatgataccatcgaccaccagggactgcaggaacggcgaggcattgaccatccattccgaaacgacgccctggaagctctcgagcagccccaccagccagtcggcaatcggaggcccgatccaggtctgagagatctggaacaccaggaacattacaccggcaaagatgagcagtccggaaacgggattggtcatcaccgcgtcgattgtatcctgtgaatttttctcttttgtgaaaaccttacgcgtttccacctggtttacgatttgattgacaaaatcaaagcgtgcacggtcggcctgttccacctgatgcttgtcagtcaggtccacgccagtctgctcataaggtgctttctggccctgccctttcaggccggcagcagtttttaccacttcgttcagaccactggccgaggtagaaaccgttttcaccaccgggcagccaagcttggcagccagcgccgctgcatcaatggtcgtaccctttttttcgttgatatcgctcttgttcagcgccacgaccacaggaatgcccagctccagcagctgtgtggtaaaaaacaggctgcggctcagattggtagcatctacaatgttgataatcgcatcggggttttcatgcttgacatagctgctggtgatgctctcttccgaggtgaaaggcgacatggagtatgcgccgggcagatcaactgcgatcagctcttccccctcataatacattttcttgatcggactctcttttttctctacggtaacaccagcccagttgcccacacgctcatttctgccggtcagggcattatacatggtcgttttaccgctgttgggattgcctgcaaaagcaattctcatatcaatttctcctcctcttttcagatttttttggaaaaccatccaaaaaacgggcgcctctcagagttagttttggcaaacctcccgtcaaaaaacagcggcatgccgcaatcgcagttttttcaaactacgattgcctctgccagctgattatcaatattatatctgccgtccttgatggatacgacacagctgttcttcagccgcgataccacggtgatcggctcgccgctgtagcagcccagggagaacaggaacgcgtccatttcttcgtcgtcggtgacgatctcatgcacaatatattccctgcccagctccgcctgcgtcaggttcataccgcttcccacctttcaatccaagttaggctcatctaacttttaacaatatagcaccgtctcccatatttgtcaaaccttttttccggagtccgccgaaaaaagcgcgccgcagcggcgcccaaaagtctgctgcgattttttcagcctgatgaaccagcgtttcttgtcttttttatccgcttttttgtaaagcagcagcgggcctttgttgcatacggttgaaaataggtataatatgtgtgatacatttcccggaaagtgagagcgagaacacaatggaaaaacagtttcacggacaggcgtccgaatccctgcggctgggcctgctgctggccgtggtgggcgggtttctggaagcctatacctttctcagccgcggcggcgtgtttgccaactgcgaaaccggaaatctggttctgctgggcttatatctggctcaggggcagatggtccgggccatgacctatctgccccctatcctggcctttttctgcggcgtactgctgaccaacagcatccgccgccgggccgctttccatcccaggctccactggcggcagattactgtgctgttcgaggcggcttgcctggctgcagttgctttcatcccttacggccgctgggagaacatcgccgtcacggcgctggtctccttcgcctgctccattcaggtgcaaagcttccgcaaagtgcacggcagcgcatatgccaccaccatgtgcaccggcaacctgcgcagcgccgccgacaatctgtacgcaggcctcgccctgcacgatgccccggccctgctccgcgccagccggtatctgtcggtggtgctcgtgtttgtgctgggtgcggtggccggcgctttcctcacccaggcactggccgaaaaggccgttctattgtgtaccctgcccttgttggcggcctttggcgttatgtttctccccacaggcgaagcggcgccctgatcggcaccgcttgccaaaaccgccgctttgcggtaagatagacagaaaccatgcagctgcagaaaggagtgcttttgtgaacaccgtaaacgtgcgcggcctggaaatcggtgcaggacgccctaaaatcgccgtgtcccttaccggcgctgcccgggaggacctgattgctcaggccagagcgctgcccgggctgggcgccgatctggcagaatggcgcatggattgctttgcccaagtggaaaacagcgccgccgtagaggcctgcctcc

SEQ ID NO: 947 - DNA, 1816 bp, Unknown
  16S sequences of unknown bacteria
gggcatgaacatcgtcaacctgctgccacgatttcgccgcgctcgtttatgcggggagaaatggtctcgtgcagagcggtgggttcctcatgaatttccttattcatgaagcaatcgtatccgcccttttcggccgccttgacgtcccatgtaatggtctcggcctttttgtcgacgggattgagctcgctgtcgaaaaccttaacgccctctctcgacagcaacacaatgtcgccgtcgtcgaggcggtagatttttcttgtgtgtttaagaacggcggtcacgtcggaggcgatgaagttttcgccctctccgagaccgacgatgagaggagaagcatggcgcacggccacaaattcgtcggggcgatcgcttctcagaattccgaaggcataggagccctggagcatatcgacggtttttttgacggtttcaagaaaatcgccgttgtcgttcttttcgagaagatttgccacaacctcggtatcggtttccgaacggaaggaaaaaccctcctttatgagctcggacttgagctcggcgtaattttcgataatgccgttgtgaacaatggcaaacttgccgttttccgacaaatgggggtgggaattctcgtccgagggctttccgtgggtggcccagcgggtgtggccgatgcctatggtggagggaatgtgttcgccgccgtcgatttttttgctcaaatcggcgagacgtcccttggttttatctatttctatatttccgttctcgatacaggcgatacctgccgagtcatagccgcggtattcaagctttgcaagtccgtcaagcagaatgggggcaaccttctgctctccgatatatccgactattccgcacataattttaacctcttttcctaaagtgaaaatcagcagacttccacacttatagtgtgattttatcacggaagcccgattttgtcaacaattcgctgatttacaacgggtcggcggcgcaatatttttgacatcatggggcaaactgataaaaaaagggatgagaaaattgaagaaaagaatgtttaaagcggcgctgtgcctcacccttgtttttgccctgtcggccgctgccgttgcccgaatagccctttccgacgcatataaggcctcggcgggagtgtattccggctattcggtggccgtcgaccgaccgagaggcacggtttttgaccgaaatctcgacccgattaccaatcgggaggaaaaatacaaggccgtgctcaccgcgacgcccgaagtcacaaaggagctttaccgctgcttttcggcgggggaagccgaaaaaatcgtggagagtcttcgcgaaaacaagccgattgccctttatgtcccgaaagatttttcggcaagcggggcggcggtatttaaaatatacgacaaaacgcccgcctacattccagccgttcagcttatcggttatctcgatttcgaggagctgcacggaaaggccgggcttgaggcgattttcgactcacggcttatttgcgaaaaggaaagcacggccgccgtttcggcaaacgccgcgggcagcccgctgcttggggtaaatccggaaaagaacgacctttttgaggaatatgaaaagggaataataaccacccttgatttaagaattcagcaggcggccgagcaggccctctcgggagtgaaaaagggtgccgtggccgtcacaaagacctcaagcggcgaaatcctcgccctttgctcgaccccctcattttcgccgaaaaatctgtcggcggctctcgacaacgccgattcgccgagtggggcatggacgatgtgccggtgct

SEQ ID NO: 948 - DNA, 32759 bp, Unknown
  16S sequences of unknown bacteria
aaaaagttttttttgacacgctagggcgttgactctgtcaacgcccgtaccgcgcttaaggaggctccatggatcgatccgaaattatggcgctcatcgatgaagcatacatcgtgcgcattcgccgccagctccatatgtacccggagttggaatttgatttgcccaacacgctggcgctcgtccgctcagaacttgcgcaactgggcattccctttacggaaaaatatggccgttcttccatcgtgggctatatcaaccccgcgcacaacggcttcaccctcggcatacgcgcagacatggacgcgctccccttgcaggaaaaaaccggccttccctatgcctcgtgcatcgacggccgcatgcacgcctgcgggcacgacgcgcacacggccatgctcctgggcgcggccaaagcgctcaaggccatcgaaaaccgcctaccctgccgcgtgctgctggtgttccaggcgtgcgaggaaggcccatacaccggcgccaagttgatggtggaggatggattgatggaagaaatcgacgccatctgcggcctgcacgtggaaaccagcatggaaaccggctgcattggcgcttgttccggcgtggccatggccacctcgcaccccattattatcgaattctttggccgtacttcgcacgcctccaaaccccaacagggcgtggatgcgctggccatggccgtgcgctgctatatggatttgcaaatgctgctggcgcacgaacgcgacccgttggccgacgaatgcgtgctgtgcatcggttccctgcacgcgggaaccaccacgaacgtgaccccggattatgcggaaatcaaaatttccttccggaatttcgacatggagttcgacgagcgcatgttgcgccgcatccgcgcgctggcggaacacatcgcgctggacgcgggcggaaccgccaaagtgacggaccgaatcaaagcgcccgtgctctataacgatccacaacagtgcgaacgcctgctggcctccgcgcgcaaaatcgtcggcgcggaaaacatccgccctgtgccccgccgcatctcttccgaggacttcgccttctacgcgcaaaagaaacccgccgttttcttccggctgggcattggcaacgaagcctttggcagcactgtgggcgggcatcgcaacgatttccgcgtggacgaggccgccttgcccacgggttccgcggtgttcgtgcagttcgccctggatcagccctccactatctcataaaaattttatttcaatcgcaatgaggaggttcaaattcgccatgaaacaagtgcaaatcggctgggccacgcgcgacgtgtccactgacaaacccattgtaatcaacgggcaagcgcatttgcgcgtttcccgcggcgtgatcgaccccgtgaccaccaccgcgctggtgctggacgatggggaggattgcgtcattttcgtatcgctggatatggtttctttccgctcgcagttgctcaacgaactgcgcgaaaaagtgcgcgccctttgcccggagatccccgcggaaaagatcatcgccaatgtaacgcacgcgcataccgggccgagccattacacggaagccttcaatttcacggccagcgaccgaccggaagaccgctgtcctgtgcatatggaaatcgcctctagcgatgaataccgcacctggctttccaccaccatggcggaaatgatcgccgaagcctggaacgggcgcaagccgggcggcatcgcttatggctacggctatgccgtggtgggccacagccgccgcgtgtgctatttcgacgacgtttccaagcgttccgccgccaatgccacggataccttcgccgtgaatggccacgcggtgatgtacggcaacacgaacgacgacaatttctcgcactatgaggcgggcgcggatcacttcatcaacctgctgtacaccttcgacgccgccggcaagctctcgggcgccatcatcaacgttccctgcccctcgcagaattccgagcacgagtggaagcttaccgcggattattggcatgatgtgcgccaggccattcgcgcccaatatggcgatatcttcctcctgccccaatgcgccgccgcgggcgacctttcgccccgcatcctgcactataagcaggcgcaagaccgccgcttccgcctgaaatacggcgatttctacgcgaaaaacggcgtggaacgcgcagcccgcaaggacattgccgagcgcatcgccgccgcttttggcgaagtgctggattgggcgcaaaaggacatccgcactgccgtgcccatccgccacaaggtaagcaccgtgcagctttcgcgccgcatgatcacggacgaagaataccagcaagccaaggaaggcttggccgccgctcaagcgcaagcctttgtggaaaccgacgatcctgtgcaggatttgatcacaaatagctgcatcatctccaaccgcaagcggttctataccgtgctcagaagctacgaggagcaagcgcacaccaaaacgcatcccatggaacttcatgtgctgcgcgtgggcgacatcgccttcgccaccaatcgcttcgaattgtacatggatttccagcaccgcatgcaagcgcgcagccccttcgagcagacgttcatcgtgcaactgtgcgcacaacccacggataacggcggcggatacctgtgcacgcagcgcgcggaagagggccgcggctacagcgctatcatctatagcaccacggtttcgcccgaaggcgggcaggagttggtgaacgagactttgcgccagctcaacgaactgaaaaatatggactaacgttggttcgaacgatcaaaaatgcatcaaaaaacgtcccaaacgcagtgcggaaacttccacgcggcgtttgggacgtatctgtggctgcgccgtggcgcctcccttctaaaaaaggaaggcattacgggaggctttgggttagtgctgctccctacggcgtagcactatccaaaaggctcccctttcgcaaaaggggcgcacgaagcgcgcgcgctgtgcgcgaagcagcgcgaagtaagcccgtcgaagccccgaaggggtggaggggcgaggggcgccacaagagccacctgttccccctgcgccatgcctctagatgcccgcagataaattcgcaattcgcgcgcttcctcctgcgcgtcgctatagctgggggccaatgtcagcgtgctgccggacaacgacacgaaattgtgttccgcgagcggtgtttccgccccttccgctgaaacttccgtcacctgcacaatttcgtattgcaaaggtacggctgccgccacggtatcctttaaagtttcttcctgcacataagcgctcaaatccacgctcctggatacgccatccgttccgccttccgtcgtgggcgcgctggcttccagcgcgatcccgtccaaatgcagcgcgggcggaatgacgcaaatggcagccaggcccaaatagctgcccgtgaaatccgtcggaatggttcctgtgaattggttgttccccgcatatacaaaattgctcttttgcgccagttcctcatccatgatatattgcaaatatccatctccgatgaaacccgccgccaggacatacccatccttgggcgtcacggtcatggtgaaatccgtgcccgtatagaacgtatcgggggaaagtgcgatcttgccacccgtacaagaggatctgcgattcacttttccgctcaggggcatgatcgaaggcaaaaaatgcacttcggcggtaggcaacgccaatccatctgcacaaatcgcttcttccgccaattttgccacaaacgtataaaccacctgttgcgaattttccggcgtggggttgtattccgtaccgcccaacccatcgttcacgcacgtccaactgacgttcaccagtttttgcgttccatccgccagaagggccgttagcgttgtgggcaggccgatttcctcctgcggcgtgccataagccacaaaaaaggccaaatcttcctccgtctcggcgaacccagctatgattacctgctgcgcgggcgaagagccggagaaaagggagattgcgcgaagtccgccgccccggtcgtgctcgctggcgtcgtcccattggcggacacgtctgccgcagctgatggctcaggacttgcgctctgctccggttccgccgcgtgcggctcctccggcgcggcgctggtttctgccgtgggcgtaggagatgcgccctccgccgcttccgccattgccaataccggcgtcgccgccagcaacatacaaatgatgagccatgcgctcgcccaacgttttatcctcttcatgcgatgttcctcctatcctctcgcgaagacttttttgtccgcttggttttcattgcgccaaaaatctatataaaaaagcgagcgtaggccaaatagcccgcgctcgcggttgattgatatacgccaaaaaagggaaaactatcccttacttgattgattgattgattgattgattgattgattgattgattgattgagcatagccgctatccgcatccctgtcaatctccttagcacaattttacattgcgccccactggcgcaggcactgccatgcgggagcactcccgccatagctaccaatatatgatacttctttgccgcgaaaaagtcaagcatttctgtgtaagtggacgcttttctgcacgagtggacgtttttctgcgcgagtggacggtaaaatcggttgacgcgggccacgcgcggtggtaagctatagacgcgaacacaaatgcggagggaaaaattcgtgaagcgaatgggaatcagaacggctgccctggcgctgtgcctagcccttttgtgcttcttcggcggcgcgctgctacgctacgcgcgccccatggaggatgtcgcctacgatttctctctcgcctgggcgggcgaggccatgcctgaaaactgggtgtacgaccagaagggctggtcggtgttcacccttgaggacggcgagcggagcgaacttgcggcgaacggctttggcggtttttccggcgatgtggagccgggcgaggtgttctatttttcacgcgtgctcagcgaagcggtggatgcgcccacgctacagatcgacgctagcgaacgcgccatcgccgtatttctagacggcacatgcctctattccgacggagccatggacgcggtcatcggcgaagtggaactggccgaactgggctggaagcgcggcgcgccccttctcgtgccgctgccaggcgattatctgggcaaggaattgaccattgcccaaagcgccggggcaacggagggcgcgccctccaccatatacccctgcgcggtgtcgctcacctgcggctatgcttacgaaagcgggctgatcgccgagagctttggcacggccatttccgccgtgctgctgtgcgctgcgggaggatgcctgctggcggccttcgcgctggccgcgtggcgcggccgctggaactgggcggcgctatgcgcggcgctgttcctccttttgtggatggcgggcctgctggcggatacttccttttttcgcaaatatcacgcggcaacgcgcgataacaccgcctacctgtgccgctgtctgtccctgagcgcgctgctcatgttcctggccagtcaggccagacggctgcgcgccctgccttggacgctggccgccttgagcatggccgccagcgcgctcacgctatgcatagatctttcgcacgaaatctatacagatgattggagcttcttcctgcgcgatgcgccgtttcaggccacgggctttgcgggattgctcgccgcgctggcgtgcgcctggctgctctggcgcaaggaggggcggttctaccgctggttcgcgccgctgagcgccatcggtctgggcggcctgctctgcgcggcgctgctccaaggcgacgaagtgtggcggcagttccagtccgccttcgccgggcagtcgttcgcttacttcctctggccgctgacggccatggtggtgggggcggcggcggtatccgccatagccgaattggctgggcaggaattggagcgccgcatggaagcccgggaattggccgagcgcaacgccatggccgtggcgagctatgaaagtctgcgcgcgcagcatgaacaggtgatgatgatccgccacgatataaaccggcacttgcatgtgttgcgccaactttcccaggaaaacgccgtgcaagcctatctggacgaactcatcggccaaaatgaaaaaatccccgccattttgcatagcggaaactccatgatcgacatcatcctcaatggacggctgtttgccgcggaaaccgcgggcattgcggtggaaattgtgagcgcgcaggccccggaaagcctgcccctgaacgaggccgatttgtgttcgctgatgctcaacctcattgacaacgccatcgccgccgcaagcgcctgcggccggaaacagccgcgcattcgcctggatttgcgcgtgaaaggcggctttttcgtattcgcctgcgaaaattcccgccatccggcaggcgaaacggcccaaggacacggcctggggctaaaaatcgtggcgaatatcgtcgaacgctatgattgcctgatggaaacggaacaaacggaagaagtgtacaaagttaccatcgccatgcccataaactagggtctattggggatggagagacgatgggctgtgaaagaacttttattgttctttcacagccccattgacaaagtttcacggcgctagccgactgagagggcgactttgcgccccgtcgcgcaatcagtccagaatgcccttgagagggttctttttcatgggcggcttgcggtcgtaatgcgattgcatctttacccagcgaccctcgcgggagctggtttcaaagccctcgatgatctccagcacgtggaaggtctgccggtaatcgcagcgggcttcgcggccggtggcaatggccttggccatatccgccaggcccaacgcgcgggagttttccggataatcgtacatcagcggcacttcgcgcagcgtaccgtcctcgggccggaacagccgcaccgggccgccgaagcagttcgggtcaggcacgaacagcgtgccttccgtgccgtaaacctcgatgaagcgggaaatttcgcgcgggaacttcacatcgaaagtggtaaagatggtgccgatggccccgttgtcgtatttcaccgtgcccgccacataggtggaaacgtccacgtcgatcaccgtgcccgccagcggctggctggtgatgatgcgctgcgggaaagtgatcttgctggcgctcatcacttcgctcacgccgcccagcaagttgatcatagcggtgaggtagtagggccccatatcgaacatcgggccgccgccatatttatagtagaattccggatccggatgccagctctcgtgcccgctgccgatcatataggcggcgctgccgatgggttgaccgatgaagccgtcgtcgatcaggcggcggcaagtttggatgcccgcgcccaggaacgtatccggcgcgccgcccagcatcaggcccttttcctccgccagcgcgcgcaactggatgccttcctccagcgaagcgcccagcggcttttcggaatacacgtgcttgcccgcttccagcgcggctttcgtcaccgcaaagtgctcgtaaggccgcgtgaggttgagcacgatgtccacttccgggtcggcaaaagcgtcgtgcatggtttcgtaaatcttgggcacgccatagttcttctgcgcgttttccgcgcgctcgcgcaccaggtcgcaaacgccaatcagctcgatctccttgaagaccttcgtgatgttatccagataaatgccgctgatacagcccacgccaatcatggcgattttcacggttttcatggggatatgccctccgctcagtacattttggcctggttctcaaagcgctcggtggtcagtccgtggtcgatggcgtattgcttgccctcgcccgcccacagcatgccgcgctccatcagcacctgcgccgtgggggatttgtcgaacacatcgtcgtgatgacccagcgaagtgtagaacacgcgcccattgccccagaacttggtccaggccacgggcatgtccaccggcttgttggaaatgtggtaatacgtcacgctggggaagcgcgtggtggcgagcacctcaatggccgggtcgacgtgcaaataatagtgctcgctgcacaccgggaaatcctccagcccttccacaatggggctggaacccttgcagatgttcaccatgtattccacgccgtcgccgcccgggtggctcacccactgcccgccggtgatgaactgccactcggtatcctggcggaacgcgtcgcacatgccgccgtggcagcccgccaggcccatgcccgcgcccacggccttggccacgttcaccgtgtattcgcgcttgatttcgcccatcgtccagcacgccaccagcaagtccacctgcatcagcgcctccagatcgcccaggcaatcgagcgaatcgaaaatggtggcctcatagccgttcttttccagcagccccgcaaagcgcttggaagtgagcttgggctcgtgcccgtcccagccgccttgcacaatccacgcctttttcacaaagcatccctcctgaaaattttctattggatgattgtattatacggcccgccgcgcgcgctgtaacgtaagatttggcgaatcgctggacaaaagttgcgatttgtgataggatattccttaggagatgatgggatgatgcaacccttttatcagccgcgcggagaagatttgcaaatcagtgttttaacgcgggaattcaccttccccacgcatttgcacgcgcatgtggaattggcgcacgcgttttccgggccgcttgccatgtggatcgacggccaaacgtgggcgttggggccgggcgatacggccatcgccttcgcccactgcgcgcacgcctacctgggcggcggcgaagggctgatgctgattttcccgccggaaatttcgctggatttcgggcgcgcgctacaaaccgcccgctgcgcgcagcccgtgctgcgcgcgcgcgacgcgcacagcgacattcccgccatgatgcgcgccactctggcggaaatccagggcgagggcgcgcgctcaaaggccgcgctgcgggcctacatccaggtgatcctcgcccggctgctgcccgcgttggacatggagaaggaaagcaccgaggcccagagcggcctgctctacgacgcaatgcgctacctgggcgagcatttcgaccagcctctgtcgctggacgcgctctcccgcgcgttgggcgccagcaaataccacctttcgcacctgttttccgagcggctgggcatgaatttccgctcgtatctcaacgcgctgcgcgtggaacgcgcgcggcttttgctcaccggcaccgccgcgcccatcacgcaaatttgctacgagtgtggcttcgaaaaccagcgcaccttcaaccgggccttcctggccgcctgcggcaccacgcccacacgctaccgcgaaaccggcgggcgctgaaacgcttcgggcgcgtctccctagcctgccaattcttcccgctgccaggcgcgcgtttgccggccatacagccacaagcccacgccgcccgtgatcagctccgaaaggggaaacgccgcccagcaccagttcagcccaatgcgcgacaacaaccaaaatagcgggattaggcaaaaaatttgccgagtaagcgagagccacgcgctggcgcgcgcgctgccaatggcctggaagaacaccggcatcatcagtgaaagcaccgctggcaaaaagctcagcgcgatgatgcgcagcgcgatttccccaatttgcaatacggccgcctcgcgcgagaacagagcgagcaagccgctggggaacgcctcgaaacacacgatgcccaccagcataaaagcggcggaaatcgccaccgcgctgcgcattacgcgcttgcagcgcgcataggcgcgttgggcatagttgtagctcaaaacgggcacgatgcaagtttgcaggcccgaaagcggaataaagaaaaacgtttgcagcttataatacaagcccagcacggtgaccgccgcatcggaaaaccccgcgagaatgatattcagtaccatgatgtaaacggtatatagcgactgcatcaggatggaaggatagcccaacgcgtaaatttgccgcatataccggcccataccgcgcggcgcgggcggcttgcgaaagcccttcacacccacgatggccgccgccacaaattgccctgcgatggtggcatacgccgcgcccgccacgcccatttccggcagcgggcccaggccaaagatcagcagcggatccagcagaacattggtcagcgcgccggccacctgggcgatcatgggcaggcgcatgttgccgttcgcctggtgcacctttgtccacaggctttccaaaaagatgcccaaactgcccgtacaaacgatgttgccatagatcaccgcctggtcaacggcggcggcggattcggcggaaatttgcgcgtaagggcgcataaacgccagggaagccagcgcgaacagcgcccagcttacaagtgccagcaacatgcccgtgcccgccgtgcggtcggcctcagccgtttcgcccagcgcgtacatccgcgccatataggtgttgacccctacgcccgtgccaatggccagcgcgctgatgatgagctgaacggggaaaatcacgctcagcgccgtgagtcccgcgccagaatattggccgatgaaatagctatccacgatgttgtacagcgcctgaatcaactgggcaaacatcaccggcggcgcaatgcgcaacaaaatgcggccaactctctcctcgccaaaataggattccgatagaacgacgctacgctttcccataactggcctcccgcatagctttctccaaaatggcgccatagcgcagcgccatatccaccatctggcgcaccgcttccgcgcccatggcgcaaatggcgctttcctccagcgcgagcagcggcagcagaatgctttcagcatagcgcaagccggattccgtcaaggtcaaaatccgctcctgacgattgctcgcgttgggggcgagcgtgagatagcctttctcctgcaaagcgcgaatcaggttgttgatggtctgcttgggcacgccatacgcctggctgatggccttttgcgtgcgaatatcatcgatgtacaaagaatagagaatcagcatctcgtggtaattcacgccattttggcggcaccacgcggcgtatgcgccgcgaattttgatgatgcccgcgttcactcccgtgagcagggcgcgcgtttgggaattcatttggccttcctccattggtcttaattaagactattgtagtataacacgtccgcgccgcatgtcaagccttcagctgaaagataacaaaagttcctttctttttgcccttgctggccaaaacgccgcgcgtcggccaaaaatttgtcaacgatttggtgctattcccgtatcttgccgaatacaatactagcacataggatacgaggagggtttcacatggatacggttcgcgtgctacttgccgacgacaaccatggcatgctgaaaattctggaggaatactttcgctctaagggcgatgtagaagtggtgggcagtgtgagcgacggcgcgcaggtgatggccgccatctgccagcactcgcccgacgtgttgctattggacatcatcctgccccgccgcgacggcttttccatcttggccgacatgcgcgcgctagcgccggaagcgcgccccaaagtgatcgtgctcaccgggctctcgcgggatgattttgtggcgcaggccttcgacctgggcgcggattactatatggtgaagccgttcgacctgggcatcctgcacgagcgggtcctcgccgtggcgcgggaggattcgctggaaaccgcgcgcgcggacagcgcgcccgaagaagcccaagtgggcgataaagtggccaacatcttcctcatgctgggcattcccgcgcacatcaagggctatcaatacctgcgcgaaggcgtaaaaatggtgatgggcaaccacgatgtgatcaaccgcatcaccaaggaactatatcccggcgtggcccgccgctgccaaaccacgcccagcaaagtggagcgtgccatgcggcacgccatcaacgtagcctggtcgcgcgggcgggtggattcggtaaaccggctgttcggctgcgagatcttcagcgaacatgaccgccccaccaacggcgaattcatcgccctcatcgccgacaaactgcgcgaaagcgcttaaaaagatgtataggcgaatgccacgcgcttttgtcgccgcgccgcgcgaattaaccccgcccggcttgaccatcgcccctgcgccgtggtacactgggcaaaatgccattgtgcgcgtgggagcgacgagtgatgaaaattgccaaaaaagatgccctgatgtggatggaattctttgccagcctaccggaggacgaggagcttttgccccgccagcaggaaatcgccctggcggcgctttcgcaaattgaggccgcggtggacgcgcgcgccgcagcgctacgccgccaaatccccgggctgaaaaccctggagggccgcacatattacgtggggccggacacaaaattcccgccgggctgccgctcgtgcctgctgggtacaggcctgagcgccatccgcaaaaccaacaagtgcaacgcccagtgcaaattctgctacgattatggcatgctcgaccgcatcgcccccattggcgaaggctattgggaaatcggcggcagcaaattccgcgaggaggacatcgacctgttgctctccatccaccgcgcgcccacgggcatttcctatgtgtacctcgagccgttcatggaaatcgaggtgtactatggcgtcatcgccaaattccacgcggcgggcatccaccagcacatgtacaccaacggcatcctagtgaacgcggaaaacctgcgcgcgctggcgaacgccgggctggacgagctgcgcttcaacctgggggccacgaattgcgcagaccgcgtgatcgaaaacatgcgcctcgccaaggcgtacatcccgcgcgtgggcatcgaaacgcccatgacgccggaatttttcgccgcgttttcccaaaagaaagaggccatcctcgccacgggcatcgattccatcaattgcgcggaactgcacctgaacgagaacaacctggccaactacgcggatgaacccctattctaccgccagggatacctctctcccctgtggagccacgagctcacgctaaagtttatgcgccgcgccgccgaagagggctgggacgtggccgtgcacgattgctgcaaccgcaccaaattcgcccgcgacctgaacctgcgcgccaaagagggcggctggtttggcgcgagtagctatggctgcgaatttgcgcgcctgccctacgcggcgtttctgcccatcctgcgcgacccggatttccaattcctggaagaagaacccctgccggaaggctatcgcccgggcgatatcgtgctgtagcgcgtgccccaatcatggttttatggaggaacccgtatggactaccaacaatgcatcaatggcaaaacactaaactactttgcccgcaccaatgaaaaaagcttgtctggacctatagaaggcgttgttttggaattcccgggtttgggcggcggctcctgcatgggcggtgtggacgccgtgggcgaatataccgcaccatacgggttgcgttgcgcacatgcgaacattttgctcgcgtatgtgttcactgggccttggagttggatgaacgattccgccgtgcgaatcgccgacgcggtggtggacgccatttgggagcgctatcaactcgccgaggatattccgctgatcagcacaggcggcagcatgggcggttgcggagcgctgctctatgcgcgctatggaaaacgggcgccgaccgcttgcgcggccaacggccctggctgcgatgctatggcactttatcgggggcacccagattttgcccgcacgttatttcacgcagtcgcgcactacacctgtagttttgaagaggcaatgcgttcgctttctgccatccaccaaatagaccacatgccgcgcatcccctactatattgtgcataccgatatggacgacatcattcccatccagcagcactccgatattttggtttcgctattgcgcgaaaaagggcacaatgtgacctacaatatcgtgccagatcgcggccattgcgatctgcccgcgcaagattggaacgccatggtgcgctggatcattgagcaagcgcaatcgcacaaatctcatctataaacgttgtggcattcctgcatgttgtaaatacactttaagaacatgcccggcgaccgcgcatagcgcgaaaaagccgggcatgctcttaaagcgcgtcaatccgtatccactttggcgttaatggtatgttcgccatgttgccacaggctgattggcacataatcttcaaatccctgcaatgcgtcatgcgcgtgtttttgccggtattcacccggtgtacacaaaaagcgactcttaaacacgcgaaaaaaatgcgaaagcgaagaaaatccactttgatacgcaatatccgtaacgctaatatcaccttcattgagcaaatagcacgcgcagcgtaagcggcattccgtgagatacgcgcagtagctgctgccaaaagtcttgtgaaaaataaagctgaaatagctggctgagaggttgcatgcctcggctacgctggtcaaatccagcatcggatccgagcagtgctgccaaatgtacatcagtgcaggctgcagcctttgcgaggtcgaagccgccgcgcacggccgcccatggcgcagcaaatgaatcaaaaccaggctgatcgtcgcgtatgccgcctgcagccgataagcgtcgctcgaacaatattccgcctccgccatggaaaaatagcgcaacacgtcctgcatttcccgctccgacagatgcgcaacataaccccggtcgggcagcggcacagccaatccattttccacatccggcagaaatgttgtgtgaatcaaatataacgggccaatggaatcgatgcggtgcgtgtcattggggctaagcaaatagagcaagccgcgagagagtggcgcagacgtgccattgatccagttggtgccatgcccatcaagaaccaattcaatttcataaaaattgtgcatatggatgggaaccggctcatctatctggcgcgtagaaatgttcaatttccgcatcggaagcatataaagctcaattgacgtaggatttttcaagataccgccccctcacccccagcatgctcccgaaaaaagcagcaaggattttttcccatcatagaccaaaatcaaaaaaaatgcaatagaaatcgcaaaattaaccattgcaaaacaatccgattggcgctatactttataatagtttattagaaaaagatgcggcaatccaccgaataaaaattggcacagtggcaaaattgcagcttgattttgcaaaatacagccataaaagaaatgggggcccgagaaaaagagatttctgcccgccatccgcagggcgaaagatattgcgtttcttactggctggcgtcgctgccagaagaagaatttggggaaaggaggcgttgaaaaaatcgctgatcttgcgcgcaataaaagaatccaaaaaaacgatctaagaagggagcatccaaaaatgaaggctggaaaactgtttgcattggtcatcgccctggcgctagcgctaaccgcggtagcgatcgccgaagaagaagccacggaaattgtcttccctctggaagaacccattgaagtttctgtatacgtctgcacaggggattcttcctattccctggaagaaaccgccatttaccagtggatggaagaacagacgaacgtgcatctaaacgtcgtgtattctacgaacctgacggaaaataccgagaagctgaacattgtcatgaacacgggcgactatccggacatcttgttcaagagcggcatttcgcccgatcagttgctcgagctcggctcggaaggcgtgatcctgcaattggacgatttgctgcaatatgtgcccaactattgtgcgatcattgatgagcgtggcgactggcccgccgtgacctcctcggatgggcacatctattccctgtttgagatttccaagcccaacgtgggcaacacgccccatatgtggatcaaccagcaatggctggacaacctggggctggaaatgcccaccaatgtggatgaactctatgccgtgctaaaggcgttcaaggacgaagacgccgatggcgacggcgatcccgacaacgagattccgtggattgcttccagcgacattacgcccgtggaagacattctgcccctgttcggcttcaacatgcagggctggtgggatccgtgggtcgtttctgaagacgggaacagcatcgagttcttccccgccaccgagcgctacaaagaagtgctcgcctttatcacccagtgctatgaagaagggctgctctataaggatagcttcagcgtcacgaacgagcaagtctgcgccatggggcaaaccggcgaggccatcggcatgttcggccagtggcatcccggcaacaccgttggctattacgacaagagcaaatccctggaagaaaatgtcatcacccagtatgtggccatgatacctttcgagggggcgaaatggcccacggccggcggcttgaaccgcggcggccttgccatcaccgacaagtgcgaataccccgaaattatgatggcctgggccaacctgctctatagcgaagaaggcgcgcgcgtggccaactatggcttcgaaggcgatacgtatgatctggtcgacggccaggtgaagatgcgcgacaaggacaatccctctgaaacctggggcgaaaacgtggaccatgcccggttgcagatgggcggcggcaccttcgcttccatccccacctacaccgagctggaaacgtattacgacctggaagccgaccccacagcccgcctcttggaggatacctacgatttgttcgaagagctggataagttctatcctgcctggccggccctggccttgacggaggaagaggccgaggttaacgcggatatcaacgcggatatcgacgcctaccgcctgtcctatcgcgcagaagtgatcactggccaaacgaacttggaggacagttgggacgcgtatatcgaaacattgaacaacatgggcctgcagacggctgtggacaatatgaacgccgcctacgcacgctacctaggtgccgctgaataacaggcaacccatcgccattgcagtgcttctctttcagaagcgctgcaatggcacaaaacgttggcttcgtcaacgtctagactgcttaaggaggcgttgagcatggacaaggtgaaatgtgatttctcgctgaaaaacaggcttgcgcatgatttgcggcgaaactggattttgtggttgatgtttctgcctgttatcatttattatgcgattttcaattacgcgccaatgtacggtcttgtaatcgcctttaaggattacaaagtcaggcgcgggatcctgggcagccccaatgtaggattcaaatattttgagcgcttcttttcgagctacaactttgtggagctgattcaaaatactttggggatatccctatattcgttgctggttggcttcccgctggccattctttttgccgtgcttttgcactatttgccctggcgccgcctgaaaaaaacggtgcaaatggtttcctatgctccgtattttatttctaccgtggtcatctgcggcatgctcaccatctttatggaccccacgaacggcgttttcaataaggttcgcgaactgtttgggctggaatccatagcattcctttccgtcccggaatatttcaaaacgatttacgtattctctggcgtgtggcagggcatgggctggagcgcgatcatttatatctccgccctggccggggtggatagccagatgcatgaagcggcgatcatcgatggcgccacgaaactccagcgcatatggcgcatagacttgccctccattcagccaaccatcattatgctattgattatgcagctaggcagcctgatgaacgttggttttgaaaaagtttatctgctacaaaacgatctgaacttccgcgcttccgatatcatctccacatacacttaccgcgtcggcttggtgaacagcgactttggctattctacggccattggcctattcaacacggtcatcaatctgctcattttggtctgctccaacacgatttccagaaaggtaacgggtgaaagcttatggtaaacaaacgtgcttatgcccatagcggaaaacggaaatataaaatcaacaattcgcgggcggatcaggcgttcgacgtggcgaatatcttgattatgatcttgctcctgttcatctttatttggccgctatggtttgtcgttatttcttcttttagcaacccctatgaagtatggcggggcaatgtgctactctggtttaaggggttcacgctgaagggatatgaccagctcttccagtatcaacccgtatggatcggataccgaaacaacattctctatacgggattggggtcggtgatcaacatgatcatgacggtgctgtgcgcctatccgctctcgaggaaagactggttcccgcggaatttctggatgaaattttgcctgattaccatgtactttagcggcggcctcattcccacgtatctggtggtaaaagggctggggatgacaaacaccatctgggccatgatgattccctccgcgctgagcttttacaacgctttgatcgtcagaagctattttatgaatagtattcctttcgaattgcaggaagcctccgaactggacggtgccaacccggcccaatatctggcgctcgtcgtgcttccgctgtccaaaccggtgctggccgtcgtgtggctatactatgccgtgggccactggaacgactattacaccgccctcatctacgtttctaaccgcgatctgatcccgctgcagaccgccctgcgcgaagtgctgatgtccgccgcttccattgcggatatgttgcaaagcggcaattccaacattgccatgcaaatgcaagaaaaacaggaattggcaatgagcctaaagtatacttcgattatcgccggcatcattcccatgatgatcgcctacccatttgtgcagaaatatttcgtcaagggcgtgatggtcggcgcgatcaaaggctaactccaaccgctcatgagaggtgtgatttgcccgatgtttgacgcgaacaaatttcttgagccagaccgccgttacgcgatttatcccatctatcaccagggcattttgcgcaaggcccgcgaggtggatgctttgctggattgcggctatgcgggcgtggtgggcaacctgccctacaccgagcgctttcccgaggacgccgccgcctgggagcagaccgcgcaggcgttccgcgcgtttaccagtcgcggcctacacgcctggatctatgacgaaaagggctatccttccggcacggcaggcggtgctgtggtggacgaaaacccggattttgtggccgaaggcctgtattgctacgaatactggaaaacgctttccggcccctgcctgtaccgggcggatgtgccgggcgaccacctggtggcggcgttgcttctgccgcttgatggcgaggatcccatcgacgtcacgcacacgcaggacgcgcgcggcactttgcgcatcccggtgccggaaggcgcgtatcacctgttcatgatgagccgccgccgcctttttgacggcacgcacgccgccgaaagctattccgagccgcgcaattacatctgccttagcgacaaagcggcgacggaagcatttctccgcatcacgtacgaaggctatgcccgcctgctgcaagaggaattcgggaaaggcatcctggccttttttaccgacgaaccttcgctgatttcttggaacattcgccaggcggtctatcccattgtaccgtggcaccacacattccccgacctatttcagcggcgctatgggtattccatcgcactcgccgtcgccgccgtggttacccgacgcggccgcgaagtaatccgccgccgctgcgacttttgggattttgtggctgataccgtggccgacggctattttggcacgattcaggattggtgccacgcacacaacataaaattttccggccattttttggaagaagagcgcctaagcgcgcacgtcatcaattatggctcgttctaccgcagcatgcgccgcatggattggcctggcatcgaccaattggatagcgaaccgcagcgcctgatggcgcgggacaaattgcccattgcccgccttgcggcctcctttgccgatatcagtggagaaaaagagagcttcacggaattttccgatcactcttctcgcatggaaaacaagcaaatcgggctagattggattttcgccagcgtcaattggcatctggcgatgggggtcaacaatttcaccagctactacgacttcagcgcgttttcgccggaacagattcgccagctaaacgattacacggcgcgcctaggctatctgctgcggcagggaaagcgctcctcgcaggtggcggtattgtacccggaggcgaccatttgggcggcctatacgccctccgtagtggaacgggcccgggacttttcgcctgaaaccctgcgggtagaaaacgccctccgcgacgtttcctggcagttgctggagcggcagattgattttgattatatcgatgaaaaactgcttcaaagcgggaaaatcaagcaggggcaattgcgctaccgggatcgggaataccgtgccatcgtgttccccgccgttaccgtgctagaacgggaaaccatgcgccgcctagaagaactggcgcaaaatggcgtcagcctcattttccttggcggcattcccgacgtggcgcgcgaaactggcgagccttgcgattttgcttcgcgcatgatgcgataccgcggacaagccaacttttattccagcgcggacgtccatttgcccggcagggcaaaaatccccgccctgcccaggcaactgctcctaacgcccgcgcgcctggaatgcgtgctgactggggcggaaggcgcgggcaaaatcgtggatggcgaagtcctttccgacgcaatcctttcgcacctgcgcgtagatggcgatacgcgcatcctattcctaaccaacatgggcggaaagccctatgaaggctcaatcgccctgcgcggcgcgacgcacgtgcaaatggcgaaccctatggacggaaccattgaggagattcactgcgcgcaggaaggcgagttgtgcaaaatccccgtgcgcctaaagccatacgccggcgtcgggtatcgcatccatgcccaagcgcgcgcgtcccaaaccaccaatttttaaaaagaaaaataggagaattttatgacgaatccatgccgatttcgcgccgcggctacgcgcgtccgtccatatgccgccccggcgcgcattcccttatcctttgtatatggtgaaaccgcgtatcgcggattgccggaagagctctttcatcccaccatccgccgctgtccagcggacgccaacctggtgtgcaagcaaatcaccggccgtctgcccgatgggctggaggtgcgcgtggaatatacggaataccaggattttcccgccgtcgaatggtatgcggagtttaccaatactgccgcgcaaaattcccccaggctccggcaggttcgcctgatcgacgaagcgttccgcggcgaaaatcccgtgttgctgcacagcaatggcgacaccgtaacgtatgaaggctatcaaatgttgcgcaccgccgttgacgaggaaggcctgcacctgcaaaccgattccggcagtccctgcaacggcgcgttcccctttatgcgcctcatgacggaaggcggcggctacaactttgccgtgggctggccgggcggctggagcggagaattccgcaaaacagcggacggcgtcgcggtgtggttcagccaggaaacgctggatacctacctgttgcccggcgaaaccctgcgcaccccgcgcgtgctggttatggcctatgacggggacgaggcggcgggccgtcaccaatggaggcgctttttccggcagcacctattggttcgagaaaacggcgtcccgctcgaccccatgcacgtcatgagctatggcggcggcggcgtggaattcacgctttctaccgagcaaaaccagctagaggccatcgatacctttctggcaaaaggcttccgcccggacatttggtggatcgacgccggctggtatccctgcggcctgaagtgggaagccgcaggaacctgggaaccccatccggagcactatccccacggcttggggccgattggcaaaaagtgcgcggaaaacggcatccgttttctactgtggttcgaactggaacgggtgacagaaggctcgcgcctggatcgggaacatccggaatggatgctctacacgacgaacgccgagggagaaacggattggacccgcatgctcaacctggccgaccaggattgcttgcgctgggccatcgatcgcgtggatggtctgatccaagagggccatgtgaagatttaccggcaggatttcaacattgcccgtcctgccgcgtactggcgcggcaaagacgcggaaaaccgggcgggaaccacggaaaaccactacattcaaaaccttttaacgttttgggatacgttggtggagcgcaatcccggcttgtggattgacaactgctcttccggcgggcggcggaacgactatgagctgatgcggcgcgccgtgcccttgcactacacggacgtaggctacggcgtgcatcccgaaaaacagcagcaatatcgcgttatgttcgaatggctcccctattttcgcgcgctgtgcatgaactgggataagccggacggctcctatgggcaatgggccatgcctgacgatccgccttattccgacgcgtttgccacgtatgcttcgctcgcccccgccctggaccaaaaaataccgccggactgctcgccggaagagcaagaaaccgcgcagcgcatgctggcaatctggcggcccgcggcagaattgatgctgcggggcgattactatcctttgctggaatcgcacaagcatgccgaccggtggtacgcttgccagtttgacgacccgcagcgtggcgatggtttcgtacatgccatccggaacatccgcgcggaggaaacgtcgatcacgctcttcccgcacgtggaacaaggcgcggaataccgctttacctgcatggatccgccgcgcgaaatgacgctatccgccgaagcgttgtccacccatgggctgagcgtttccctgccgcaaagggcgggtgtcgtttggttttatcaaaagaaagtgcccgccggcgcaaaagaaccggcggcggcaaaggatgcggaaaaatgaaactattgttggatggagtttggcagggaacaggatttggccccgagggagaaaccttctcgttcgaggccgcggttcccgggtgtgttcacacagatatgttgcgttgcggcaaaattccggatccctattggcgcgatcaagcccagtgcgctcgctggatcgagaattggaactggtcgtttgaacgcacattcgtcgtagagcaagtgcccacagccgcgcagttgtgctttgaggggctggacacctactgccgcatttacctaaatggcatagaaatcggacgcgcggaaaatatgtttatccctcatacgtttccagcgcgcggcctaaaggcaggcgaaaatacgctccgcgtcgttttcctttcgcccattgcggcaacgcgcggcttacctgaacgccccgcggcctttaccgccgaacggctgtatacgcgccgcctgcaatgcacctattcttgggactgggtagaacgctttgtaactatgggcatttaccgcagcgcctatctattttgggcagaacattgcgtgatcgacgacctgcggtgcgaaacgcgcgtggtggacgattttggcgcgctcctgttttgccatgtggaattccgccacatgagcgatgcggatttctgccggataacgctcaccgatcccgatggcaacgtggtgttccaaaaacgccgcaggatcgtggaagacggactatccgaaatgatcgatgtgccgcaaccgcaattgtggtggccgaatggttatggcgaccaaccgctataccggctctgcgcgcgcgtggaaacagcagagggcgcggttttggcagagcgcaccctgaacatgggcatccgcacggtgcgcattttgcaagcgcccgatctaccgggcagtccagaggctcaaaaatgccaggccttgcaaaaaggcgcgcacgtttctgacaaaaacgcccgctgggatcaaaatcgggaaggtgatttcgcaggctttacgctgatcgtaaacggcgtgaagatcttttgcaagggtgcaaactgggttccctgcgaaccgtttccttcggcggaaacgccgcaaaaaattcgcgccctgcttcggcagctgcaacttgcccacggaaacatggtgcgaatctggggaggcggcctttttgagcaggacgccttttacgacgcttgtgacgaactgggcttgatggtcacccaggatttcctaatggcatgcggccattatcccgaatgggaagacggctttttgcggcagctcaccgtggaagcgaggtacgcggcccgccggcttcggaaccatccctgcctcgtttggtggagcggcgataacgaaaacgccatggacgccgatgaagatatggcggattaccacgggcggcgttctgccctgcgcgccattgggcccgtgctggaagaaatggatcccaaccgtccgtttctgccttccagcccctatggcggtcggccctatggttcgatcacgcgcggtacgacgcacaacaccaattatatgggcgaaaaattttcgtacattcgcttccacgatatgcgggactatcgcgcctatttttcggaatatctttcgcgcttttgtgcggaagagccttgcatgggcatgccttcggtctgttctatgcgccgcttcctcgcagaagatgacatctttggccctgacgacagcatgctgcggtttcacaccaaaaacaatccttcccccgaatttcaagaattcgaagttttcgattacaccgtggccgccgcagaaaagctgctgggcgcggacaaatgcccagaagaccgggtgatgaagctgcaatacattcaatacgagtggatccgcatcaccatggaactatatcgccgcaacaaatggttttcttccgggctgatttactggatgctgaacgattgctggcctgccagcggttgcgccatcctggattactacgcccgtcccaaggcggcgtggtatggcttccgcagggcggcgcaaccggtgatcgcttccatcgattttacaaacgggcaataccatttatacgtatgcaacgatggaaggaaaccttgcgacggcgtcgcacgcctatttttgcagccgttcgacaaggtggaacccacgcgggaactttgtgcggaattccacgtccgcccaaacgaaagtgcgccggtgctttccgccgcgctgccggcgacgcggaagggggaaattctgctagcagaaattcaggggccaggcttccgcgaccgcgcgtatttctttgagaaccgcccctgcgattgccaattcccgggcgttccgcccgcggtgaagcaggtttctagcgattccatcactctgcgcgccagcgcgtacgtgcacgccgtatcgctggatggcgaaatggtttttgaggacaatttcttttccctgttgcccggagaaacgcgcaccatccatttctccggagcgggcgaggagatccgcatgcgcgtgttgcattcggccgcgccagacattgcaatccgccgttccccctttgcggggccggaacgcgattccaccggttgaggcgcgcgagccagcgaaaagcactttgacaattttgcaaccattgaggaggatgcatttgcatggttacatcccaagatttcgcatttatggagcgcgctctggcgtggagggcgcttaaatctctgccgctttgttttcaatatggcgcgcggctgatctgcggctggccatctgaggcaacgcccaccatcacaaaaacgcaaccagaggcgcacgtctgccagaccactgtgtacggcgtcttggcggacgggctagaaatccgcatggaatgcgtggagtatacggattttcccgtcgtggaatacatcgtctttctcaccaaccgcagcgcaaccgatagccagctcgtggattcgttgtgcctaaaaggcgaaatcaccgaaaaaagcgcggaactgatccacggaaacggcgataccgtacgcccagacggctatcgctggcaacgggacgcgttgcctttggcgatcagccccgtagacggcacttcgtgcaatggggccttcccctatatgcggctggcaacgcccggtggcctgatcaacctggccgtcggctggcccacccaatgggaggcacgctttgccctgggcgaacaaggcgtacaaatttccgtggggcaaaagcgctgccatacggttttgcggcccggcgaaacgctgcgcaccccgcgcctcacgctgcaattctgcgcaggcgaggaaaatcgcgccaccaatctgtggcgtcgctggtattttgcgcacgttctgccgcgcccggccggccaacccctgcggccgcttttgtgcctgcaccatttgggctgcgatggaaagccggaagccacagccgcaagcgaggaaaatcagcttcacgccctgcgcgaatatctgcgcaacggcttgcaaccggacgtatggtggcttgacgctggatggtatccctgcgatttcgtgtggacctatacgggcacctggataccggacacggcccgctttccgcgcggccttctgccccttgccgaagcctgccaggaatgcggcgccaaatttctactctggtttgagccggagcgcgcacaggcgggcagctggctggcggaaaaccatcccgaatggatgcttacgcggcatttgcccgatggtgctttggatttcgaccggctcgtcaacctaggcgaccccgcctgctgcgacgcgctcatcaagcatgtggacgcactcatcaagcaatatcacattggcatctaccggcaggatttcaacttcaatcccgcgcccttctggcaggaaaacgaggcgcccaaccggattggcatgctagaaaacctacatgggcagggctacttgcgctattgggacgcgctactcgcgcgcaatccgggattgctcatcgattcgtgcgcctccggcgggcggcgcaacgatatggaaaccatgcggcgtgctgtgcccttgcactacaccgacatgggatacggaaaccatccgctcaaacaactgcagcaccggcaaatgttcgcgtggctcccctacttccgagcgcacaacatgaactggcttaaccccgaccatacctatggcactgaaaaatatgcgcccgatgaattttcctattacgcagcgctcgccccttgccttacggacgtaacgccctattttgcgccgcccgaggctttcgcgctggcgcggcgcatgcaacccatttggcggcgcgcggcggaatatatgctttcaggcgattactatccgctaacggattgccgggcggacagccgcgatttttacgcgatgcagttccactgcgcaaaaagcaacgaaggctttgccaacatcgtcagcaacgtttgcaacgaagaaaacgccttcctgctgcgtttgcaagcattggagccgcaagctctctatcgcctggcagacgctggcgacacgcaaaccatggaatacactggcgcgcaactggcagacggcatctccgtctctatagccgcccacagcgccatagtctatttctatcaaaagatcggctaagccgttgccgcccgcgaatgcccgcgttgtttctccgaaatgtccgttgtcagggggctgcctccaataaaaggcagccccctgtttgctccacgatgtgccggcacggttatttaccattttattaagaagaaaaagtagaagggcgggtattgacaatgccggcgcggaaattgtataatgcaagcgataccgccgcggcggagcaaaaaaaattttctaccaaagcaaacgctggattcggaggacatacgtatgacgaacggcgaacggttccgggcctttttcgcgcgctcgaaggatctcgatcgcgcgcccgtgatcgagtgggcgtcctggtgggatctcacactgaaagaatggcgcaaggaaggtctgccggagggcgtggacttaaacgcctattggggcctagacgaactcaggcaattctggctgcccatcaaaagcgccggatgccccgcgcccgcgagccacggcgcggccattatggaaaccgaagaggattacgaacgcatccgccccttcctgtttggcgaggagacgctcgcgggcattgaagcaaccctccgcgcctttgcgcaggcgcagccggattgccccacgtggttttccatggacggctttttctggttcccgcgcacgctgttcggcatcgaagggcacttgtacgccttctatgacgagccggagctgatgctgcgcatcaaccgcgacctgtgcgcgtaccacaagcgttgcctggaaatcctctaccgctacattcagccctgctttatgacctttgcggaggatatgtcctacaaccacgggcccatgatttcccgcgagctgtacgacaaattcatgctgccgttctaccaggaactcacgcccatcattcgcgcgcacggcacgcgcgtgttcatcgatacggacggctttgtggagccgctgatcccctggttcctggagggcggcatcgaaggcatcctgccgttggaacgcatggcgggcgtggatgtgaaccgcatccggcagaactatcccgacctgttcatggtcggcggatacgacaaaaccgtgatgcacaagggcgaagcggccatgcgcgcggaatttgagcgcatcctgcccgccattcgctcgggagcgtacctccccggcgtggatcaccagaccccgccggatgtgagcatggaaaactatgccatctttgtgcgcctgctgaaagaatacgcacagtatagcggcgctgaccggaaataatcttctggtgtgttggctttgctcatgggcagagttagcttcactgacggcaagcgaagttaatccctcagccggctagcgccggcagctccctttttgcgaaaagggagccttttggttagtggtacgccgcagggagtagcactgcccaaaagcctcctttttcccgaagggaaaaggggcgcacgaaggccgccgccagtggcggaaacaggccgtagtaagcccagtgaaacagggaacatcgcaagtgcgctttgcgcacgaagcgaggcgaccatgttgaactgtggaacggtggcgcggcgcagccgtgacggagggattggcaaaccaacgacaaactgcgcctccggggccgtattaaaagcccccggaggcgacattttttgcaaagcagatatttgccctttcccgcgccgctcagcgcatatcgagaaccacactttcttccgggcatggtccgccgccctcgcccacataaaagggcgtaagtacaaagcgatccggcatgcgcgtatggcccgtgtagtacatagcgaagcgccaggcccattcgccgctttccagttgaacgggcgcttctggcgcgtcgccgctgcccgtggcgcgccaatccatgccgtcgcccggctccaggcgatagtcccaatagcctgcgtcggggtcgtgcttatcccaagcgcaatcgtgcgcaagcgccgcttcgtggctatcgaacacgagaaaccactcaaatgccgcgcccgtggcggagatttccgcccgcgtcacgcacaggctatatccatcgaaggcgaattccagcggctgtccatcgtgcagcgcggtgcgcgtttccagggcgcgcgcggtggttgggaaggcgacgcgcgcggtttccagaaaagtatacgtttcctccaccgggcggcgcagcgcctgcggagacggcgctccttccggcacgcgatagatatccagttgcaattccagcgtgtgtgtagtcaattcgagagaagcaccggcaaacgtctcctgccagacgccggtgccgctttgcccggccggaaaaattgcctgctcataggacgcagaacccgtaccgacggtatccggcagcgcaccatcgagcaaaatgcgccgcgcgccaatgtacagcggcgcatccgtccggttctgcacggaatactggagggcaagggaattttccgagagcagcgcttcgggaacggaaagcgccaccgtcccttcgtattccgcgtttaccgtctccagcagcggttccagtgccgcgagcaatttctggtttcccgcatatccactctgccagaaggaaagcaggccgaactcccgggcggcgaccgcggtcgcgcacagcagtatgacgcacagcgcaaagcaaagcagggccttgcgcacgcgccgcgtgcggctcctgcccaaggtatacaccatcgcctccgtgcgcgcgcgcaaggcgggcgcaggcgtgacaccggcaaacgctttccgatattcgctttcaatcctcttcatccaaaatccctccttccatgagcaacgctttaaaccgccgtcgcgcgcgggtgagccgcatgcgcacgcccggcgcggatttgccgagcacgcgcgccatatcctccgcgcgcatgccttcaaaatagtataggtgcagcactgtccggtcacccggtggaagttgccgcagcgcgtgcagcacgaaagacggttcctccggcgcgctctcgcgcccgcgcggcaggtattccaccaaggttacgcgcctgcgccacgcgctggccacgacgtgcacggacaaatgcgccgtggtgcgaatcagccaggccttcacatgctcgtcatccgcaaattcccgcttgcacagcgccagccgcaaaaacgcctcctgatacacgtcctgcgcgtccgccgcgttgcgcgtgcgcgcataggccaggcgatagaccattgcggaatgccgctccatggcctggcgcaggaatgcttccgtttccgcagaaaaagcgcccatcgcattcacccccttcacctataacacaaggcaagggaggaaaacgcaacggacgcgctgatttttccctttatgatttttttgtttgaaacaacggccctcatcccaagccgcctagcccaacagcagcagcatcagcgggatggtggcgatgcaggagagcgtggaaacggaaatgcccgtggccgcgtcgttcacgcgggcgtcgtatttttccgccagcatctgcccggcggaagcggcgggcatggcactgcacagcaccaggatacccagcggcatgccagaaacgcccaacgcgcgcgcggccagcagcacgagcagcggcatggcgagcagcttcaccaccgtcacaatccacagcttggcgttgagcaactggcgcgggcgcagagtatccatgcgcgcgcccaatagcagcatggaaagcggcgtgttcagcgcgccgagctggttcacggcagaaaggatgggcgtgggcaggcgaatgctcaaaaggaaaagaatggtgcccagcaccgcgcaaatgaagcccgggttgagcatgcctttgagcgagccaatgtgaaagcccgtgaacagcgaaacgccgatcgtccacagcacgatgttgaaccccacgatgtacgcggccaggtacacggtggccgcgtcgccatacacggcttccacgatgggcaggccgatataacccgcgttgggcatggcggccagcatgcacagcacgggccgcaggcggtcttccacccggccgcgcaggagcacataggccagcgcgcaggccaggctcagcaccacgatgctgccgcccagcacgatcataaagccttcgaacacttccagggaaaattcgcgctgcgtggtcatcagcatcatggcgggccaggtgaccatcagcaccgtggagttcacgcccttgatcaccgggtcggtaaacacgccgcgcgcgcgcagcaatagccccatggccgcaatgataaagagcatcaaaatctgatagaccaccggcaaaatgttcataagcgcatcctcgcaatccactttggtgatggcaccattatacgcctcgcgcgcgcccagcgcaagggaaaattggcaaaagaggcgcaagtctttcaattgtataaactgcggcgcaagccgactgcaaggttgcctttttatgaagcatggaattcgcgcccgctttatatgagagacttcggtcggtattttggcatttttcgccttgtcaagcccccaaaacgtccattcgcgcagaaaaatgtcc

SEQ ID NO: 949 - DNA, 8263 bp, Unknown
  16S sequences of unknown bacteria
ttaaaattatttaattttgctatcatgcagagagagccgtacgatgaggttggcaacctgttctgcgggcatttcgcaatcggttttgacccattcgcgcagaaccgccgcgatgccgttaacatagtaggcagcataaaaaggtcgttcttcttttgggaccgcaaagcgcttcatgatcggctcgaatacatggcggtacatttttttgaccgtactgcctgcattcagcgcgtacggctggcggaatgccgcgcgcatcacgtgtttgttttcgaaaacaaaatttaaataggggagaagataatcgtttgtcagaaaaatcagttcggaaagcgggctttcatcgatttttgatatgatctcgggagtttgcccttcgaaatacgaaagaaatgtttgattcagacgctctaaactttcggcaagcaggtcatccatcttttcgtaatgcaaataaaacgtagaacgattcacgcccgcctttttgcagacctcttttacggtgatatactcgtagtctttgtgttcaagaaggcgcatcaatgcttcgtccatcagatttgcggtattgaaatatttgctctccgccttgttcataccttctcctttgacgagcacgtcagtcttcgctgatttcttttgccagtgcgattacgtcggctgcgtatttttgttttcctttttccaatatttttttgtacagcggataatttacggaagcccctgcaatgccgactaagccgagtacgatgccgaacgccgtcatcgcgaccgagccgcttccgatgacctgcatcgaaaggcacatgccgatgcccaaaattagtgccgaaacgatgccgaaagtataggaaaatatttttgaggggcgcttcgccttggcgtccagttttttcagcgacagtaccttagaagttgccttcgccgcatactcgtttgcgatggattccgcataaattttgtctgtgttcaagatttttacctccttttgattacggtaacattgtaacacgtcgttgcctgattttgaacgacaaagaagggataatgtgttgatttaagggcaattatataaaaattacgatataaaaacttggaatgcaatttgatacgataaaaaatcaaggtgacgaatttgttaacagcatcagtaaaaaggataaatcggataatcacgatgacaagttaatgcgcgataatgtgaaatattgtcatcacattggaaaatgaaaagaacctaagccgagatccgacttaggttcttgttggcgcagagagagggatttgaaccctcggtacccttacgaggtacacacgatttccagtcgtgcgccttaggccgctcagccatctctgcaaaactaccatattattttatagtgttttacagtttttgtcaacggtttttaagggcgcattcaagaaaattatttataatgggcagtttgtcatatgtgcgcgcggatgaatcgccgtcagagaaatttccgggctgaaacaggggggagaacgaaattatatttttcggatatttaatttggaataatgaccgcagacggcgagcgtgtagttcccgatcttaaagcagagaacgggaagttcctgcaaattgccgcaatagtggatctttcctttgcagtattccacgcgccgccaatcggaggcgagcgttaagccgagatatttgatatacgcctcgcgcgcggtccagtgctcgtaaaaatcgcccgtgcaatggatctcgcgcttttcccgctcggaaaatttggaaagtacggcagggcgcgccttgccgtccagacattcgcagtccaggccgacctgacgttttcctacggcgagcgccaaaagccccttgctgtgcgtggcgttgaagaaaactttgtcgccttttatgtagggcttgccgttaatcgatttacaaatttccgcatttggtatattataatacttgtgaagaatttgcttgataaattgttccgtgtccgtttgttcaaacgtataaaaaatatctaccatatctgtattatatcataaatcgcataaaaatcaaggagtttttgaaaatgagcagagctgacttggcaaagtccaacttcatgaaagggtacaattgttcgcaggcggttttgttggcgtttgccgaccttgcgcatctcgacgaagaaacggcgctgaaaatttcctcatcgttcggcggcggcatgggccgcatgcgcgaagtgtgcggtaccgtgagcggcatctttatggcggcgggcatgatcttttacgatgcgggcgcgcccgcggcgaaagaaaagagcaatcagtacgcgatcgtgcaggaactggcgcggcgctttaaagagaaaaacggcagtatcatctgccgcgaacttttgtcgggcgtccataccgattccacgcccgtagccgaagcgaggacggaaggctactataaaaagcgtccgtgcgcggatctttgctacgacgccgccgagatcctggaagattatctccgcgaacggagcgtcatcggcgaataatttcacaccctccgtctcttgtcgcatatactgataaaaagcgattcgggaggttacaggtgtcaggtttacaagtggatctgccttatccgagcacgacggattttatgcgcgacgagtgcagcgtgcgcatcatttcccccgcctatgcgggcggcgcgagcgagatgacggcgattttacaatatatttatcatgcggtgcatttcgactgtgcgggaaacaaaaaattcgcacgtatattgcgggatatcgcgatcacggaaatgcatcatttggatatgctggcggaaatgttctgcgcgatgggcgtgagcccggtttacagcgcgtgtccgccgtgcttttgcgatttttattcgacgcgcaacgtcagttattcctgcacgccgcagcgcatgatcatggacgacatcaacggggagcgcgaggcgatccgcgattacgagaggatgctctgcaaactgaaaaacgagcaggcgggcgcggtgatctcccgcatcattctggacgaacaactgcatttggaaacattgaaacgtatgctcgacgaactcgtgaattgctgaaagaaaagcggtagaattaccgcttttttgttttttcgggcatatatttccaatatcgcacgggcatatatcccttcatctgtttttcgtgcgggcgttcggcaatgttcaccgattcgtaatattggatccagagcgcctgaaaagcttcctcataatcggataactcaacgctgacttcgtcgtccgtccgtacgagaacgcagtctttttgattataaagcgcggcgagattccgtttggtatcgtgaatgataaacggctggtttttcaagcgcgcggtaaagtgggggacgagcaactccaaaatatcgttgtccgattcgaagggggcgtaaaagacgccgttttttccctccataaagcgtaggaaccccgacatcaggtggatctcgccgcgcacctttcgcaccgattccatggcggcaatgacggcgggctcggataagcggtcgcgcgcgggcgctttgaggcgcacgatgcgcctaagatattcgagcgcgatctgctctttccgcgcgtctccccgccgaagaatcagatccagttcctcttcggcgtgtttgtcgaaccggcgcagttttttcagtacccgttccgctttttcctcgtccgtccgcacttcgacgacgttgctgtcgaaagcgagttgtacgtttttctgcgaggtgacggtgcagttttcgtccgcataggcagaaaaaaccgcggtataaaaacattgcggggaaccgtctacgagataaatgttcataattgccccgtcagcgcgcttaaagttagttcgggcgtggaaaacatggacaattgctcgtatttctcgctcttttcttcgagcatgagcatggtacgcacgttggaaatattttcgctgccgtaaaacttgcccttgcaggtgataaaatgccttgcgcgtttcaaaacgatgcgcattttggcgagcatctcgaaatccagagcattgtatttgcgcgctttcatgatcttataggcgccgatattgccgatgccaggcacgcgcagcagcatttccagcggcgccgtgttgacttccacgggaaataactgcatatttttgagcgcccaggcgcatttcggatcgtattcttcgggcagattttcgccgtcgcccgcgatctcgcccgcgtcgaacccgtaaaaacgcatgagccagtccgcctgatacagtctgtgttcgcggagcagccccgcgcttttcgcgggcaggagagagtgcgccaccacgggaatataggaggaatagtacacgcgcttcaaggagaatttacggtacatcgcctcgctgagttttaaaatttggccgtccgattcgggcgaggcgcccacgatcatctgcgtcgtctgccccgcgggcagaaatttttggcgcttgcccttttcttcgttcgcctcccgtttttccagcgcgagttgtcgcatgggcagaagtacgctctccttgttcttttgcggcgccagaagtttcaggcttttttccgacggtaattccacgttataactcatgcggtcggcgtacatcgccgcgcgcgaggtgagcaagcggtcggcgtggggaatgcctttgagatggatatagccgttgaaatggtagacttcgcgcagtttgacgaccgtttccagcattttttccatggtcgcgtcgggcgagccgtccacggcggaggagaggaacagtccctctatataatttcttttgtaaaaactgatgacgagttcgcagatctcgtcgggcgtggcagaggcgcgcggcacatccgcctccgcgcggttgggacagtacaggcagttgtacgcgcagcggttgctcaaaaggatcttcattagcgagatacagcgcccgtcgggcgtgaaagaatggcagatgccgcacgccgccgcattgcccatgccgtccttcgtgttctgccgccgcgagcccgaagaagagcacgatacgtcgtacttggcgctttccgttaaaattttcagtctttctatatcgatcatatcacaaaaacccgaacaaatgtttatattttgattatagtacgccaaaaggtaaaagtcaaatgatttccgaaaaaattttactttttcacttgtttttcatcgccttatggttgtataataatattgggcgtttataatgaaccgacagcctgcaaaggcaaattacggaggataggaaaatgcgagttttgattgtggacgacgaggcgatgatacgcaacgttttgaaagaatatgtggaattcgagggcaacgaggctttcgaggcgtccgacgggatgcaggcggtaaagttgtgcaaggaaaacgattacgacattattttgatggacgtgatgatgcccatgctcgacgggttttcggcggtcaaggaaattcacaagaacaaggatatccccgtcatcatgctctccgctcgcggggaggaatacgataaactgttcgggttcgaaatgggcgcggacgattacgtgaccaagcctttttcgcccaaagaggtgatggcgcgcatcgcggcggtcaccaagcggcacaaggcgggcgcggcggggcaaaagagagagatcgaaaaattcgaagggctggagatcgacatgaagggccgcaacgtatatgtggacggacagaaactcgaactgacgccaaaagaatacgagcttttgttttatctcgtaaaaaacaagggcatcgcgctctcgcgcgaaaaactgttgtccgacgtgtggggcttcgatttttacggcgacgaccgcacggtggacacgcatatcaaaatgctgcgcagcaatttgaaagaatacagaaaatttatcgttactttgcggggactgggttataaattcgaggcatgaggcaacatcggcgtttcaaaagcattaatttcatattgtgggtcagttttctcgcgtttgctgcgttcatactcatcttgacctgggttttccagatcacgcttttgcgtacgtttttaaccgtacaggtcaaggacgagttggaatctttcgggagagagatctatcagacgctggaaagaatgtcgccgcagtcctcgcaggtgatcgacggctatatcctctccaaagaaaacgataaccgcgccacggatatttttatcctgaatttggaggacgggggaaaactgcacccttcttccgaggacgggcagttggtcacgggcgtcgcttccgatcagttcgaaaaggtcaaggaaaaactggcggacagtccctatggggacagcgtcatcgtccagatttccggctcctcctacgtctatgccgccaaaatggcgatgatgacggcgggatcgcccgaagtgacggacgtctgtctgtatatcagttattccaccgttctcgcggataagaccgtgggcaatatgcagttgcaactcgtgctcatttcgctcatcgtcatttttgtcgccctgatcatttctggattgttgtcgatggaacttaccaaacctatttctcagatttcccgcgccgccaagcgcatggcgacgggcgattattcggtggatttccaggcgcagtattcctatgcggaaatgaacgcgctcgcggaaacgctcaactacgcgaaagaggagatcagccgcgccgacgagttgcaaaaggaagtgctcgccaacgtgacgcacgatttaaagacgccgctcaccatgatcaaggcatatgcctcgatgatacaggagatctcaggcgacaaccccgaaaagcgcgaaaaacacacgcaggtcatcatcgacgaaaccgacaggctcaccgcgctcgtcaatgatatcctcaaaatgtccaagatccgttcgggcatggacacgctgaaaacggaagagttcaacttatcggaattcattcataccgttctcgaacgctttgaatttctcacggaaacgcaagggtacacgatcgtgcgcgacatagacgacgaactgtacacccgcgccgacaaggataagatcgagcaggtcgtgtacaatctcatcggcaacgccgtcaactatacgggcgacgacaaaaagatcaccgtttccctccacagaaaaaacgaaaagatccgcttttccgtcacggatacgggcaaaggcattcctcccgaggaatgttccaccatctgggagcgctattacagttcggcggaaacgcataaacggcccatcaagggtacggggctggggctctccatcgtaaagaccattctcgtgaaacacgggttcgggttcggcgtggacagcgaagtgggcaagggcagtacgtttttcgtcgatttccccgatttataaaagaagggcgtacgcccttctttttcttggtaataaacgcttgaaaaaaagagcgggaaatgttacaatactgtttatggaaaccattgttgcagcaagcggaaacaaagcgaagatccgcgaaattcaagaaatttttcagggctttaccgtgattcccatgcaggaagcgggctttttgggggacatcgaggaaaacggttccacctttacggaaaacgcgctcatcaaggcgcgcgcggtcagcgaaaaattgggctgtatcgcacttgcggacgacagcggtctgtgcatgtacgcgttgcgcggcgcgcccggcatttacagcgcgcggttttgcggcaggcacggcgacgataaggcgaacaaccgtctgctgctcgaaaaactgtccgacgagaccgaccgccgcggctatttcgaaagcgcggtcgccatttgttttcccgacgggcgcacgctcaccgcgtccggccgtactttcggcgtcattttacccgaagaacatggtgagaacggattcggttacgatccgctgtttttcagcaccgagatcgataaatgtttcgggatcgcgagcgcagaggaaaaaaacgctgtttctcaccgaggcagggctctgcgcgccttggcggaaaagatgcgggccgaagggattttatgaaaacggtggtcgtgatctccgatacgcatcggaacgtcgcgccgctttcgcagatttctcaagtcctgtctgaatgcgacatcattgtgcatctcggggatatggcgtccgacgcgcgcgaactgatgcgcacgtatcccgaaaagacgtacgttttggcgggcaacaacgacaacaaaaccgcccggaactggatgcctgc

SEQ ID NO: 950 - DNA, 1548 bp, Unknown
  16S sequences of unknown bacteria
tctacgcgcttgccgctgagggtgacgatcacatcatccacggtatagccctctgggccgactttgttttccgccgcggcgatgacggcgatcaggttttgtttcagcttcaggcgggcggcgagctccagggtgcacagcgcggttgcggcgccgcacatgtcatacttcatgccgctcatggatgtgcgcggcttgagacagtatccgccgctgtcaaaggtgatgcctttgccgaccagggcggtaaagggcgcatcgccattgccttgataggtgatgcagatgaggcgcggccccacgctcgagccgctgccgaccgcgagcagggcgccggcgccgatggcgcgcagcgcatcggcatccaggatctcgatgggcagcgaaagcgcctcggcggtctttcggcattctgccgccaaagcatccggccgcatcaggttggcgggcgtattgcccagatcgcgcgcatgtacgacgcatcttccgatggtctctccctcctgcaggctgtcggcgatgtccagatcgctggcggcggcgccctgcatcggcacttttccatagcggtaagtgctgtatgccgccgcaaggcccagcgcgcgggcggcctcatgcagatcgagccttccgcagaccatgctgttcatccatacgcagcattcctcttcgcaggcatacagggcgctgcccagacagcgcttggccttgccataagtgatctctgcgcgccttcccaggccggcgaagatcagcgttgggacagcgatgcgccccagggtgctcagctgctggatctttccttccctgcctgtttcctcatgggcaaaatcatagccgagcgcgtcgcagatcgatgcgggcacggcgtcgtcttcatagacgggaacgatcaggacacgcggctgacgcagcgcttcctgaagtgtaattgttttcatgatcatccttctttctatccgtcattatagcatgatttatacaagatgaaagtaaaagactgatgtgctttcatccgaatgtaaatttttcaatctgttgcattttctgcttcgtttttcatccagtgtgttataataaatttacgtcgaaaaagaaacaggagggtgacaagatgatgatctatatcgtgagacacggagagacccagtggaatgcggacgggcgcattcagggacgaagggatatcgaactgaatgaaaacggacgaagacaggctgaggctgccgcagaggcactgcgcggaaagagctttcaggcgctgatcacttcgccgctgtcgagagcgaaacagacgggcgccattctggcgcagtttgcgcagatcgcagaagtgcgcgaagacgcacgcatcgtagagcgtgatttcggagagctggacggcgcgcgctttaccgaggatgtccgtcaccgcctgtatcaggaaaaggtgcagggggccgagagcctggaagaagtcgctgcgcgcatggccgaagcgtttgatgagtatgtgcagcagtatgacggggatatcctcgtcgtctctcacggcgcggcgatcacggc

SEQ ID NO: 951 - DNA, 8660 bp, Unknown
  16S sequences of unknown bacteria
ctcataagccctttgttcaatagatatgcaaaaaaggctccggttaaaaccggagcctttttattctttcattctttttgtctatttgttggctaaaaattcgtctctctggcggttccactcttccatatatttctccaacccgccttctttcaatttcgcgacaaattcctcgtaatttttttccgtttcggcgccgaacatacccagattaaaggacgtgccatactccgttaccaacgcggaaatcacagcccattctgcgctgaccgggttgtagtcaaagttaaagccccaataaggccactcttcatccttgatctgattggctttcagcttttcgttggtcgcgttgatatattcgtcatccgtcttaggccacgggaagtctttatgacggataccccaagcccaaccatcaaactggtagtcagtcgcttccggaccgggttcaactgtattagctgccttgtcataaacgtagtgtctgccttcaataccgccagccagcagcatataggtctcaaaatcatttttgatgaagtccagcagaactgccgctctttccggtttggagcagaaagaggggatcgccatcccgtcgccgatgtaggagtcacgcagcgcacggtagccctcggggaagatatctaccatttctgcgttaatgcccttctcctcgaatccctgaagcgtgttaattccattatagtagttgttgtagccggtaacggtctgaccattccggaacattgcggtgatgccgttggtattggaaatcgcatcagaaggccaaatgcctgcctgcgcgtattttgccatgtccatcacgtaagttttgtactgctcagaagtatgcaggaagaaaggtttttcaaaagtcggatcatccagctggctgtaatacatgtaatcagatgcctgattgttaatcagattgaaacggtaaatcaaaccgatatcatacatgttagcaacagaagaagcattaaatgcatacttgccgttggacacctcattggtgccaaccgccatcaggaatttgtcaaaatcatcccaggtgtgaaaactgtcggcagtgtagccatatttctctgcaacatccatatcaataaccggtccacgatctgggaaaatagaagcggtgttgcggggaaccatgtagattttgccgttgatatgggtttcctcccaagcagattccggcagaaccccataagtctgaggcagataggtctggataaagtccatatccaactcgcggaaaccgcctttgtccacctgttcacggtaatatgcatgatttgcagtataaaccaagtcgatttcgtcgccgcccgccatgaccagcggatacttggtggtcaattcagagctggggataaagtacatctccatcgtggtgttgaccgccgccttggttttttcgttcacctgcgccattacttccgcaatggcgttgggctcagagccaaccacataggtgacgatattttccgttttggacagatcaagatttgcataaggattgtccgggtccgcattcgcggcatctccggtggccacgctgctgccgctggataccgcagagcttgtggagttgtctccacatccgctgagcagtaccgacaacaacatcatcgcagccagaaccagtgcgattgttcttttcatgtcgtcctctcctaatagaaaatttgagtcagctgagccgccggtctaaccgtaaccgccggcctgtcccccggctatcggagaaccgccccgaaacttaaaatcaccgctgtgaaaaaatggagaaatactgtgctgaaactgcaggatcaccctgcatgctgaaacaatagtacgtgagtaaaacatgcagttcggtctgtttgggggcatcatcctgcacccatcctaagtctttgttccttttgatataaccatccccttcatctgcggagagtcatcacttctccgcactgatttggtcatatctcacagaacaaattcttagtatttgtgcatacatccattataattgtcaagcatcagaataaatctatattattttgtgatttgatatattattatggtctttcccttttttatacaaataaacacaaaaagaggacctgtttgacaggtcctctttgcagcaaggttaaggaaggaaattaagccgctttgttggccaggaactcgtctctctgacggttccactcttccatgtatttttccaggccagcatcctgcagctgttttacgaattcgtcgtaagtttccatcgtcttgtcgccgaacatacccagatcgaaagagggctgatactcggtgatcagagcagagataactgcccactcagcagaaacgggagtcgggctgaactggaagccccagtaaggccactcttcgtctttgatctgagaatttctcaaatgctcgttggcagcgttgattcttgcatcgtcggtggacgggaacgggaagtctttatgacggataccccaagcccagccatcaaactcatactcgccggcttccggaccgggagatacggtgctggtcgcctcatcatagatgtaatgacggccttctacaccaccagccagcaggaagttggtctctttatcacatttgatgtagtccagaacctgagcagctctctcgggctgggtgcagaataccgggatggcatagccgtcgcccaggaaagagtcacgcagaggacggtaaccctcggggaaaatgtcgaacagttcaacattcatgcccttgtcacggtagccccggatcatggtgataccattgtaatagttaccgcgggaagtagcggactggccgttctcaaacagagtgacgatagagttggtgttggagatggagtcagacggccagcaaccagcagccgcgaactcggccatatcctgaatgtaggtcttccagtattcagaagtatacaggaagaaaggtttctcaaaggtcggatcatccagctggcagtagtacacatagtcagaagcctggttgttaatcaggttaaaacggtatctccatcccagttcctggaagttggaagtagaggactgatagtacgcatacatgccgttgccagactctttattgccgatggccagcagcagttttttaaagtcatcataagttttgatgtcgtctgcggtaaagccatatttctcagcaatgtccatgttgacgaacgggccgcgatccgggaaaatttccgcagtattacggggaaccatgtagattttgccgtctacatgagtctcttcccaagcggattccggcagagttgcccaagtctgaggcatgttggtctgcaggaattcgggagtcagttccataaaggaagctttctccacatagttgcggtagtctctgtagttaccggtatagatcagatccagctgatcgccgccagccagaaccaacggatattttacattgaactcagcagagggaataaagtacaattccagagtagcgttcaacgcagttttaatccgctcattggccatctccagaatttccgccatgtccagaggttcatcagcaacagagtacatgatcagatttacttctttggaagtatccaagtttgcatagggattattgggatccacatttgcagtgtccccagtggtggcgccggtggaaactttcgagctttccttggaatcaccacagccgctgagcaacaatgtcatcagcatcattgcagccagcaccagagcaatggtttttttcatagttctcctcctaatagataattctaaccgaacggtccttaaccacaggccgccggacccgccgccgccttgctatcagcggaaggtatatcaataaagaacaaaacacagtgcggaaaaagaaaaatccaaatatttgtacagtgttggaaagactgcccgcaaaaaacggacgaagtaaaacgttgcgcagtgattttcaaaagtatagaaaaacatccgacgcggttttgcctttatctgcaaaatatgaaaccaagggaccagaaaggactcgtcattttctacaaatcagtactaccctgcttggtcgatagtcctattatactgttgtatacataatttttatctgcaaaatcttgctgttgtatccattattttgtgtcgatttttgaagaaaaaatatttttaaggaagtaaacgttttccttgtttcacgattctatgcggtcaatataatgaatcataaatccgctttaaatcctccagcacctgcagatgtgcaaaatcccggtgatacaccattcggatttcccgtaccagcgatacattttcaatgggcacaattgccagcctgccctttcttgcgtcctgaatcgaggcactgcgcgccactaccgaaacgcccaaatccaacgccactaagtctttaatcatggcgacattgtccacctccataatcacgttgaaattgcggatagattccaaatgtcgttctaaaccgttttcaaacagatttcgggtacccgctcccgctggccgcagaatcatcctctcgcttttcagttcctgcagttgaacactttgccgctcggcaaagggatgctgcggcgaaacaatcaggcaaagataatccgtatccagcagcaccgattgataggagaccccctccggcggcgccccttccgtcacagcaatgtccacctcaaaaagttccagatgcttataaagattatttattgtatccgtaattaacgttatgtgcgtatccggattttcattgcagtattgggcgataacctgggggattatattttcgctggccgtctgggtaataccgattaccagatgccttgcgtggcggcgttcatcctcaatggcctgtaccgccttttgggatatggccatcagccgatgtgcataacgcaaaaggatcttcccttcgtgggttggcagaagttttttcgttccatgctgaaaaattttgattcccagctcctcttccaacagccgaatgtgtcgggaaatggcaggctgtgtcaaatgcagttcgtgggctgccttggtatagctcccggctttttccagttttagtagtgtaatgattttggagtcaagcataacagcgccttcaatataacaaaaatttataatatcaaataaaattataatttgatattatcattttctgctattataatcaagtcctatgttttgcggaggtgctttatcatgttctcttttctgaaattcagtacgaatctggcccattcccccaagattattctcatgctcgcagtcatgctgttcgccggattttttatgactcgtctgaccaaacttctccatctgcctcatgtcactggatatattctggccggcgttgccatcggcccgcatatcctaggcctggtcgataccgacgccatcgcccgcatggattttgtaaatgacattgcgctggcctttattgcttttggtgtcggccagtattttaagactgttaccctgcggcaaagcggacacaagatcgttgccatcactctttgggaatctctgtcggctgcagttctggtcactgcgtccatgtactttctgtttcacttttccctgcccttttctcttcttctaggcgccatcgggtgtgccactgcacctgcctccaccattatgaccattcagcagtacgacgcgaaaggcccttttgtagacctgatcttacaaatcgtcgcattggacgatgctgttgccctgattgccttcagcatctgcgccgcctatgtgcaggcttccaacgccgggggagtcagcgccggactgatcttaaaaccagttctttttaatcttttggctctgctgttaggctttttgttcggctttgttctgcaccgtgcagtagataccgaccgttccgttcagcaccgtttggcgctgaccattgcaatcatcctgatgttgaccggcatatgcgcagctatggatatctcgccactgctttcctgtatgatattgggagcctgttatatcaatatcggcggcagtcaaagcctattcgaccaggccaaccgttttatctctccgatattgctgatcttttttgtcctggccggagcccgtctgaatctcccctcactgctaacagccggtgcggccggcatcgcctatttcttgatccggatcggaggaaaatatcttggggcttatgcgggttgcctcattaccaaaacagagagaaaagcccggaattttcttggcctggccctgattccccaagccggagtctccatcggtctgacggctttgggccagcgcctgctccccggtgaaacaggaacgctgctttcgactattattctttcctccggccttttgtatgaaatcatcggaccagcctgtgccaaagcctccctgtttctgtccggcaccgtttctacaaaggaaaaaattccgccctccggcaaacttccttcctcggtataacatgtcctgctttcattgttttatagtgctttctgcaaaaagttttttaccccgcttgttgtttttctgcttttttcggcttgcaggttagcaggattccgctggtcagggcggtaaaaggggctacggtgcaaaagccaaaactgccgatgtccgggcgttttccaccacctcattgaccgccgaagtgatgtccgccgccaaatccatcaccgcaccggaagcgccaatgaaaatactggccataaaaatctgcgtcagattcaggtcctgatagccactgtataaaagactttctgaacaactcatcaccgcgccgtgaatgcgaaacaggtcggtgaataaaatacccagcacacaggtaaccgcgattcccaatcccgctcccgcagtggcgcaggacgcccgtcggctgaacccgtagaccagtgcaataatcagcaccgccatcaaaagcgtaacgcccaggccgatccacaccggattggctcctctgagataaaaagggatcagtatcttccaaatcatcaagacggtcagcacaaaagaaagcactgcccgcaagcccgtacgtccggcaaaggccaacagcagaacggtaaaaaggccggccagcaaaagctccccgcccagccggtaatggtcaatcatgcttaccgataaaatttttccatctttttggttgaccagcaccaacgccgtgtccccttcctgaaacaccttatcctgctccaacgagccgttgagcatgttgaccccgctggtcacctgccctttgaaagacccgtctaataaacgaatggcgcagatctgctctccaaaacgaaccagcccggtgtcaataatggcctgattgtcgcaggcaatcaccctggcagtacagtggtcggcctccgtaaaaatcaccgcgtcctcatatccggtgggcagaaaagccagcagcacaacgcagagcacgcagatcaccaccggaagataatataactttttctctttggatatggatgcaaacatggttccctccaaacgccgaaaggctacggcgaagcggcgctcctccgcagcctttcggccgctttttttattattgagaaatctgaagcagtccggccagcttgtgataaatctgtgtattgtcgtaatatccttcaaacatgccgctaccctctccctgggcaaaaaccgccaccggcaaaccggtatgagcgtaggaggaaaagtgaatgccggatttattgttgagcagatgagtgatggtcacagaaatgggttcataggagccatagaggacatattcttcctgtgtcggctccgtatcgctgggactcatggttttctggtaagctgcttccagcaggccgtattcataatcagtcagtaccagcttggaatcctccgtcgcctccgggtcattgggagccatcagaccaaaaagcgccttgacatgctgcatcacggtcacgaaagaggtattctcttccacgtatttggtcacataatcactgtcatatttggcgtaagaaatcttctggttttccaggttgtccagatacgtgtcgtaatcggtaccggcgtatccaatggtcaggccgccggtctcgtggtctccggttacaagaatcagcgtttcatcggggtgctgttcgtaaaatttcaacgcctcatccactgcgtcagccaaagccactgtgtcggcaatggtggatccggctaccgggaactgcataaagttcagcgcctgagaaccgttcagaatcccgtctttgtcctcggctagcgcgcccagatagtctgctgcagcctgaaactgagggtagctcataccgtctccgatgaacagaaatacatatttgagctgtttttccacggcaggtttctgctgcgtctgagaaaccgcatctgttgcagcggatgacacaacgggcgtttgctggcagcctgcgaacaatccgtagcacagcatcaatgccagcacaagtgcacacattttttcatcttcgttcctccaaaatttacttttcgtgtttccacggctttcattttacccggcacatgtaaactgctccatcactttcctgtaaaactcccgtcaaaagctcgtcacaaaagaagttttttagtagaaaaaagaggaaaaaggcccccttttgcgcagaaaaatcttattttttctcggtttttgttcccattttccaccctctcccc

SEQ ID NO: 952 - DNA, 3453 bp, Unknown
  16S sequences of unknown bacteria
gcgcagtgccgtcgatgcaatcgtactcaatggcatatccggggcgtacaatgcgggcctgttccaacccagggatggtagccagcgcttccttttgtacatccagcggcatgctggtggaaaagccctgtacatatttttccgttgtatacagcccttccggctcgataaacagctgatggcgcggcttatcggcaaagcggacaaccttatcttcgatgctggggcaataccgcgcccccgttcctgtgatgacgccgccaaacataggactgcgatccagattggcgcgcaaaatctcgtgagttttttcgttggtataggtcaaatagcaaggcgtctgctcaaagccgtcaaaggtttcgggcggtgttaaaaaagaaaaaggaacgatgggcgtatcgcccggctgcacctgcattttggagatgtccatggtttttccgtcaatacggggtggggttcctgtcttaaatctgcgcaaaaccagcccgcaatcctcagccaggctttggctaagctgcgtggcccgctgtaaaccgctggggccggaaaggctggtccaatccccggtatacaagcagctgttgaggtatacgccggtcgtgatgaccacagccgccgcgccgaaatcctcgccatgcgtggtgcggatgccggctatccggctgcctttcaccaatattctagcgccttccccctgcaatagatccaaattgggctcttgctccaaaacacggcgcatagcggcggagtaggcttgcttgtccacctgcgcacgcaaagaatgcacagctggccctttacgcatattcagcatacggctttgaatgagggtttcgtctgcggtcaggcccatctgcccgccgagcgcgtctacctcacgcaccaaatgccccttgctggtaccgccaatggcagggttgcagggcagatatgccatatgatccaaatgtagcgtcaataaaagtgttttttgtcctgtgcgcgccagcgccaaggccgcttcacagcccgcattgccggctcccacgacgattgcttgataggtatgattcatctcttatttccccacgcaaaaggttgcgaaaatttcatctataacctcttccgataccgttttgcccgtgatttctcccagcgctttcagcgcttgccgggcgtcctctgcggcgatgtcggcgggcaggcctgcttggtaggcctctaatgcctgcgtcagcccctgctgcgcgcgctccagacaagcggcgtgccgggcattggtaatgagggaggcctcatgttgctgtgcacctgaggccagcagggctgcctgtaatacagaaaatatgccctcaccgctttggcagctgcaagacagcaccgccgcagcttttggccaatgagcggccaaagacgagacgtctagctgccaaggcaagtcagccttgttgagcgccacaacaaaggggcggccttccagcgccttggacaaaagcgcttcatcctcctctggcaaaggctgagcgccatccacaaccaacaccgcaacatcacagttctgaatcatggataggcccaaatcaatgccgcgtgcctccaacccttccgcattgtcgtgaatgccagcagtatcatataggcgcagcacgatgccatccacctgcacggcttcttcgatgatatcgcgtgtggtgccggcctgctcggaaacgagcgcgcgttcaaaccctgctgcagcattaagcagtgagcttttgccggcattgggacggccaaccagcgcacaccgtaccccttgcttgaccaatctgccggcccgatagctgcgcagcagggcggttacctcggttaaaatctgcgacatggaagcaaagccttcctcattggcggcctgttcccagtcatcttctgggaaatccaagcctgcctcaatgcccgccaacgccagtgtcagcgcgtcacaaataccgtccaccttggcaaagagcgtgccgtgcagttgagagagagattgacgggcagcagccaacccctctgcaccgattagatccatcacggcttcggcttgggatagatccatttttccgtgcaaaaaagcacgctttgtaaactcccctggctccgcagggcgcaggcctggcagcgtgccaagggcccccagcaactgctgaaccaccgcaaggctgccatggcagtgtagctcggcactgtcctccccggtatagctggcaggggcacaaaacaatacggccatgccatcgtcgatctgtgtgccgtcaaacacaaaccgtccataaataagcttgcggggctccattggcgaagtgccagccggctgaaacagggcctgcaaagccgcctgagcttgcgggccgctgatgcgaatgacggcgacgccgccaacaccttgcggtgtggacagcgcgaaaatggtatccttttgcaaaaggactcatcctctctatagaaaaggcccggcaatagacgccgggccaaacttttattttgcggtaatgaccacgtgccggaagggctcctccccttcgctgtgggtggaaacatacgggttatcctgcaaagacgcatgcaggatacggcgctcatagggattcatcggctccaaagaaaccgatttgccagaacggcggacatcctcggccatgcgctttgccaagcgcttgagcgtatcttcgcgccgccctcggtagttttccgtatccacgatcacccgacggtattcgccttcctgccggttggcgattaggctcgtcaaatactgaagcgcgttaagcgtttcgccccggcgcccgatcaggatgcccatagagggcccagatatgcggaggtataggccgctttctccgctaaacgcatccaccacggcatcctccatgcccatttggcggagcacctcccgtaaaaaggcggcttctgcgcctccgtcgacgggctcgccccaatcctgagctggcggcgccgtgcgctgagctctccgcccgcggggctcttttcggccgcgttcacgggtacgcgcttgctggcgctctttcttctcctgcgcctcctgttcagcttgcttttcctgttcctccaatacgcgttcaacctcttctggcgcgcgctctgtcagccggacgacacactgcttgctgcctatgccaaacaaccggcggccgccctcctcaatgatttcgatatcgacctggtcgatggaaagccccaattggtctatgcccatgaaaatggcttcatccaccgactttgcggtcacttctatggacctcatgattctatcctcccatgaaccacgcttgcttttttctgctgctttttcttatcctccattttgatcagctgactcataatggggctggaaagcatgacgaccaggttggttaccgtccaatatacggcaaagcacatgcctgcgctggcggaccaccatacgatcagcaatggaaaaatcaa

SEQ ID NO: 953 - DNA, 16837 bp, Unknown
  16S sequences of unknown bacteria
tatttacttcttgtacctatataaacgaagaaaccgcatgttttactacaacacttgaaaaataattaaaaacacgaaatcccattttataacagaataataacccaaaacatcccgaaacgatgatataaaagctcgcatgaatcaacaacagccccggataccagcataaaagctcgcataaacaacaacagcccggaacgatgacaataaactgcgctgtgtgacttggagcggactgagaagttctgatgtgctgactggtgcgtacactttagtgtacgtaacgaggcagtacaacagggcttctctgtccgatacacgtcatacgagcttttatgtcatcgcttcgggctgcgttaatattcatgcgagcttttatgtcatcattccgggctgttatagaatccgtcgagtttttatatcatcgcttcagactgatatcagattttgcaacctacttcttctcaataaagatttttctggtaataaagttatacaccatcacaactgcggtcgcaccgactttggtgatcatataatggataccgagaagatcagttcccagccacatacacagttcattcactcccagtcctacaatactcagcaggacaaagattacgaactggctgcctttattggcatttttatcggtctcaaatacaaatgtaacacttaagatgtagttcactgtcacagatactgtaaaagaaatagtactggaaatcagcgggttaatgccaaatacttcggtcaggaataccatgattccccaatcaatgaagaaacacaggaatccaacaaatccaaatttaatcatctgttctattaattttttcatcttacttatttactcccattttgcttttgttccacagatcacactgtagagacagtctgcaatctgttcatatcctgctcttcccggatgaactgcatctgtaggtacttccatcatctcatcagaatgagggttgactggaacttcttccgtatcaaaattgttggcactgtcatggcagatcgacgccggaacaaaatacagatagttctcatccttcagtgtttcttccagataagtcatcagatgaaataccttttgatcctcatcatacttatagcggtctccatacagagcctgccccttattattccaggaaccgatgccatcctgattggcaggatagatcgtgtgtaccagatagatcggcagtgtcggatctgtctcatggatatttttcacaatggcaacaatattatcaccattttctgtcggatcttccgcaagtccgttggttcccaggaacaattccactgcatccgggtggaatcctgtcttttccgtataatatttccagtcaaagctgtcagtcttctcattgtagaaagggtgcaccttctcatgtggttcttccatagtgtaaggtgcgtccgtcagatagtcagcagccgaaaaacctcttctggcttccgtcaaggaaccgcctacaccacgggttcccatatagataatcttattatccgtcagttcattgagacgctcataagtggcagtattgcaagacagactgtcaccgatagtcagcagtgaaaagctcttcttctcttccggaagatcttccacgatcttcaaagtagtagaagcagtcgccacctgtgcaccgttatcatcaaaaatagtaaagatcagcgggtaatctccctccagatcatccgttccggtaatggagaatttgcgttgcatatttttgcctactgcgcaggtccatttcacattatagtcctcgatccttgttccaagagaagagatctgattgttataaagttctatggtcacaccagaagccacatagatttcctccggcagaaacaactgcacactgctgtagagcccttcatcattctgaacaactccctttgcatccagctttgcattcagttttttcacttcatactcccgggccagctcatgcactacaagcactgctcccaggaatacacaacagatggtcagtgccaagattgcactgcgatatgctccccttatgactttctcccgttctaatctcttcatgtctctcctctaaaagcgcagggtaaaatcggaataatccagtgaaaaattcgggttatagtacggatctcccgcatctaactgttctttccatttatcccggaaatgtgcgcattcccgttcatagcgacgaagtttttctccctcttccatgccgcgggtcttggattcgtagtgatacagctccgcaaatggagtgaaaatgttcagatatcctttttcccggattttcaggcacagatccacatcattaagggaaatggtaaatgactcatcaaggccatccacttcctcataaatgctctttttcaccatcaggcaagcccctgtgacagctgtcacatcctgtgcataacagagtcttcccatataacccaggtgctctcttggcatcttataatgggtatgtcctgcggaacgatgagctcccagcccgatcaccacgccagcatgctggatcgtattgtccgcataataaagctttgctcctaccgcaccaacatctttacgctgtgcatacataagaagctgctccatccagtccgggctgatcacttctgtatcgttgttcaggaacagcagatactctccttttgtctctttaactcccacattgttgatactggaatagttgaatccaccttcataggttacaatctttacttttggatccctttccagttctttgtagtaatcacggatgctctgctctacactgttgttctccactaccacgatctcgtaatttttccaggtagatttcttctcaatagaagtaatacagcgtctcaaatcttccacatgatccttattcggaattacaatactgatcaacggctctccattgattggatacttgatctgaaaaatagtcggaaatgcacgagtgctctccacttccacttcaattccataataatcacgcatatgatcatgaactgctctcttggccgcgtcaatggcgtaggtcttggcaccaatatcagctgccactgaattcggatgggatctccaatagtaaaggatcttcggaatatgacatacatgctttgcctcttcggtcaggcgaaggatcatatcatggtcctgacttccatcatactccggacggaataacccggtcttcttcagcagatctgcgtcaaacatggagaaatggcagatataattgttggcacgcagattatccggagaataatccggcttaaaatgcagtacgatcagatcatcaagattcggagaggtaaaggtcgcctcatccgtataaacataatctgcatctttctcacagactgttttcacacactcaaacagcagacttggatgcatcacatcatcatgatcaaaaaggccaataaaattaccggttgccatggaaaaacatacattggtattcccggagattcccaagttcttctcgatcttctgatatttgatccggctgtctttctctatatactcctgacagatcctgcccacatctgtatgcttgtcatcacttccatctgccagacacagttcccagttcttgtaggtctgtgacactacagaatcgatcatttcccgcaggaacttctccggggtattgtacagaggcaccagaacactgatcttgatctctcttggaaatacagtctcttcctctctgcgtctctcctctgcattcgggaaagattttgttccaaaatccagacgcttggacgcttctccttttttctgtttccagcggcggtacattcctttgaatccaccgtaatgaatataggcatttctggtacggatcacaaaatgtaccactacccgcaccggttttgacagcttccagtaccaggtatccctcaccccgtcaaatcgcttgtctctgtgtgcaggcagttctgccttcttgttctcttcactcattttcctgtcctctttaatttcttcagcagcttaaatggcgcactgttgtaaagtcgctctgctctacgcacccggttcaatagattcatacaggcataagctgcatccgggcttatagtctgaacactcagctccacataaagtctgcttgttccttccacgattccactgatcagaagctgcggatcttctgtggtgtagacgatgcctgtgttctccagctctcttccgttatgactccagggcagttcataagaacctcccagttcccctaatatccgtctgacctttacaaaacaggtctcttctgccgggtcaagccgcacagccttacatcctgcaggaagcagaatcgtcagacggatcagcccttccttgtcaggttcggtttcaatccagaaactattgttttctgaaaatccctgtccacagtctgtatagacctgaatctggtcttttttcgcatttttcagaagctgctccaacttccaggttcttcctgccgtgtgaagatactgtgcaccgatcgtcacggttccacccagcagccagagctggaaatgatgttccatctcctcaaatatcttctcttcttctgtggagatgcctagctgtgccaaatatcccatctgcttaagctcgcttctgctgtgcagataaagagagaccgctctccagatcaggtattccactggaacctggacatcaaaggtccactcatagtcaatgatctgtgtaccatcttccgtctccatgagatttccaaagatccagtccagattgttgaccggtgcgcccagatatgctttcttaaaatctgctgtgccgaacatttccacaaacttcggactgactgcaaatgtctgcaactcccgctgcagacattctagcagtaacttcttgtattcctgcagtgcttcagccagctttccatattctttctgtgcccgcaggtcatccagccgctcttccagtgtatgtccacttaaaaattcaaagtatgccgcatcctcttttaattcgcagcggttcaccttcacgcaagccgccgcatactgtgtgcccagcacttcttcccagtgcttcatagctgttacatgcgcttttgcttcctggcttaccggaacttttctcacctgacagccatcctctgtcttcaggatatctgtccgaatcataaactcttttgcccggtcattggaatattttacatagaccggcagatccgtgcgttccggtcctgccacgatcagaaatgtattggaaaattccggaaatcttccatccgcaatgatctggtcatatactttttcttcatcaaacagaaccagacgctctccttcaaaattccgaaggttctgattcagctctcctgcacccgggagccagtgatctgaatacatactcatcggaaaccagcgctccgggtacggataatacatccgatactccccaagaccactcttttccagaagaacttccagctcttttctggaacatgtacttccatttccttccaggctgtcaaaataacgtcctgtatgtggctccatagctcctgcccagtatttcataccaaaccggttatccaccgcaagcaccagatgtccctttggatgtaaccgcttcttaagaatcttcaatgcctgcacctgcggattctctcctgcaaaatacctttgagcctcacttaagatacccggtgctatgatccagtcaaaattgccttcgatctgttccaggtttttccacagatctcctgcgtagacaacgagattatccacatcctgatgtcgggttgccaacagtttacaccggctgaagttctcctcaagacagatcacctctgctgcctttcctgcaaaaccacccgtcagttctccgctgtctgcaccaaattccaatacccgatcagtcttctttacaggaagccactgggtcagatttgcccgcagatgggacaggtgatagagtaccggccagtccggtgactgctgctgacggcagtcatacccttctgccagcaattcccggattcttgcatcttccaaagcctctgtctgaagaagtatttcttcttctctatattgaatcgttacttttccaatctgttcctgcatgtgttacgcctttcacgccttttcaacggtgattgccgaattcatatcataaaaaccaaccgtatccttatcagacaatacagtcattcccaccagatcatacagccggtggtatacccggaactcatcacccacatatcctgtacagccaagggagatcagataatctcctccctgcaggtcgatccgctgggtataggtaacgatccggctctcaccggcttccacgacacctgtctccacgcgctcgaacatggtattggttcctgtaatatccgtaccctgcttgttacggatcgtgatcgtaaaaatcgggttcttcacctgctcatggaagtagagctttgccttgatctgacaggtggatcccttctcaataatactggaatactgaccgtactggtcaatgatacaaaaatctacgatctctgcctgtttttcaccataatctaacagctttggattgatctcaaagtgctctttccatgcttttccatcttccacatgttcattgatcgcactctttccattcacatcctccagggtatcctcgtcaagctgatggaccaaaagcttcttatacatgttgaccatatcacggggggacccttctgccagcttcacacctttgttcagaagtacaaccctgtcacaatattttgcaatgctggtcagatcatggctgacaaacaaaatggtcttgcccagcttcttgaactcttcaaatttatgataacattttgcctggaagaatacgtctccaactgaaagtgcctcatccacgatcaggatctctggatcaatattgatagccactgcaaatgcaagacgcacaaacataccactggaataggtcttcaccggctgatggataaattcgccgatatcagcaaaatccagaattgcctgcagtctgtcattgatctcctcctctgaaaaaccaagcatagtgccgttgaggtacacattttccagacctgtatattccatattaaaaccggctcccagctccagaagggcagagatccgtccattgatctccatcgttccgctggtcggacttaacacaccggtaatgatcttcaggatcgttgatttaccggaaccattgacaccaatgattcccaccgtctctccctgatggatctccatgctcacgtccctgagcgcaaagtgctcagtgtagcatttcttcttagtgagtcccagagaatccttcagacggtcacggttacggttatataatttgtatacttttgtaatatgctctaacttaatcgcttcgctgctcatgattctccttctcttacagtacgtctgcaaaatgaactttcagtcgacggaatactccgcttcctacgatccaggtcacgatcgttactgcccagaaataaatattcatccagccaagcccggctatagaaccggagccgaacaatacttcccggtaaccatagacaatatagcaaagcggattcagttttaatactgccaggattggatatttggcaagcagatcctccagtgaccacatgatcggtgtcatccagatacctacctgaaggaaaatattgatgatctggctcaaatcacggaaaaagatcaccagtgaactggtcagcatgcaaagtcccgtcacaaagatcatcagacagccgctgaaatagaccacccacagagtgtgcagtcccggataatatccgtacagtgcaaacaaaagcaacataaacagcacgaaaaacgcatgaataaacaacgccgcaatggtcttcaccagcggcagaatgtcgatgttgaagaccacttttttaacaagataattatattccagcaacgcattggtaccgttacttaagctctctgaaaaataaaaccacggtacgataccgctgaccagccagagaacaaagggcactgtaatgccctgttttaactcggcagtggcattgttcagaccgatttggaatacaaaccagtataccagaacgatcacgacaggctggaccattgcccataccacgccaaaataggaacctgcatatctggtcttgaaatcattctttgccagcttccagatcagcttcctgttggtccagaaatctcttaacattcggagcatctattctctccttactttttcagttctttgatgccgccccatttatgatccttctcggaaatggtcagctccatgccttccggaatcggccattcaactccaatatccgggtcattccatgccagtccgccctcatcgttcggatgatagaaatcggtgcatttgtaagcaaattccgcataatcagacagtaccaggaatccgtgcgcaaaatttttcggaataaagaactgctttttattttctgcagacaaaagtacaccaaaccattttccataggtcttggaatccggtcttaaatctactgccacatcaaatacttctccgctgactacgcgaaccagcttatcctgcggataattgatctggaaatgcagaccacgcagcacacctttcttggatgcagactggttgtcctgaacaaactccatatcaataccggctgctttataatcattataattatatgtctccataaaatatccacgctcatcaccaaatacagtcggagtgatgatcttcagtccttcaatatcgcaggtctctactgttatctttcccattttttacgtccttccttacagtccatttgccacatctgtcagatactggccatatgcagtcttcatcagcggctcagccagcttcagaagctgctccttatcaataaatcctcttcggaatgcgatttcctcgatacaggagatataaagtccctgacgtttctgaaatgctgctacgaaatctgctgcatccagaagagcatcatgattgccggtatccagccatgcaaatccacggcccagagtctccacatgaagagttcctcttctcagatattcgttgttgatgctggtgatctcgatctcacctcttgcagacggctttacatttttcgcgatttcaactacatcattatcatagaaataaagtcccggtactgcatagtttgactttggatgttccggcttctcctcgatggaaacagccatgccattctcgtcaaactcaaccacaccgtattctcttgggtcacgtacatagtaaccaaagatcgtagcaccgctctcctgagctgctactcttctaagtacctgtgaaaagctctgtccatagaaaatattatctccaagaatcagggccacactgtcttttccaataaagtcagcaccaatgataaatgcatctgccagtcctcttggctgttcctgcactgcatattcaaatctcattcccagctggcttccgtctcctaacagttcttcaaacaccggaagatctctcggtgtggagataatcagtacttcacggattcctgcaagcatcaggatcgacagtggatagtagatcatcggtttgtcgtataccggcataatctgtttagataccgccttggtcagcggataaagtctggttcctgaacctcctgccagaataattcctttcattgattaagtccccctttggtttttatttttttattccgagtccatggcacgaagcagaaaatcacagtctgtcagaaaatttcttgcaaataagaaatacagctttccgtcctcttcttttacttcgtacagtctcactgactcattatccggcatggctgatttcacatacagctccaccggttcaaattcatctgtataatcgcaataataaacactggctccctgatagctttcgcccacgcatgccagatcactgctcacatataatctccagccatccgcagtcttctcgcaggacgccatctcattatctgcctcattgggaagcagtgttttcggttcactccaggtcattccatgatcagcagattccatgacgcagatcttcgaaggccccttgtcataatcttccatctcaaagaaataataaagtgttccatcgagataacgaatatctccatcttccagattctgctttctgctgatgatatctgtcatatattcccagttgaccagatcatccgaatgatacagccttaccgtatagattccattgtctccatccggtgacggattattgatggttccgtcgatctctgtgttggtcagcagatatccatcatcgatctgcatcaggattggatcaatggccagtgtatccgttgtaactgccacctgatcatccatcagctctgcatcagatgtaagtttcagaatgtgggtctcattgctgtgattgctgtatgcaactgtatagctgtctgctgcagttgtctgggattctgctgcaggctcattgcctccatcatcctccatcacgtagatccaggatgcctgtgttccttcaaatcggcgaacctcctgtccctccagatcaagaatacggatctgctcatccacgctggtaataatgtgatctccgataaatttggcatctgcattatgatactggttcagcgtgaagccattctccggctgcacacttctgcctgcaaaaagcgccagtccggcgatcagaattccgaccgccggtactgccaggtttttatttatttttatacatttcttcataatatttctgataatcaccactggttacatttttcatccagtcctcatgttcaaagaaccactgaatggtcttcttgattccttcttcaaacatggtctccggataccagccgatctctgctttgatcttgtccggtgcgatagcataacgacggtcatgtccttttctgtcagtcacgtaagtgatcagcttgtcgcttaccagttcttttcttggatctccatccggcagcatctcctgaagggtatccaggataatgtgaatgatctggatgttctgcttctcgttgtgtccgccgatgttataacgctcgcccagcttgcctttctcctgaaccatgtcaattgctttcgcatgatcgtctacatagagccagtcacggacatttttaccgtcaccgtataccggcagcgattttccctgcaatgcattgttgatcaccagcgggatcagcttctccgggaactggaacggtccgtagttgttgctgcagcttgtgatgttgcacgggaatttataggtatcgaaatatgctttggtcagcatatctccgcttgctttacttgctgagtacggactgtgcggggagaacggagtggtctcatagaaataattatctccatcatccagggaaccgtatacttcatccgtggaaacatacaggaatttcttgtcctccttgaagcttccgtccggcagctcccatgcagcctttgctgcattcagcattaccagtgttcccagtacgttggtcttcacgaacacttccgggttcttgatactgcgatctacatgactctctgctgcaaaatgtaccacgcggtcaatatcattttcatcaaaaatcttcgtgatggctgcgctgtcacaaatatcagcttttacaaatgtatagttcggctgattctctacatccttcagattttccaggtttccagcataagtcaggcagtccacattgatgatgcggatagtgtctccatatttgcggaacatgtagtgaatgtaattggaaccgataaatccggctcctccggttacgagataggttctcatgaaatttcctccatagtattcattttcttccattttgacagcgcaaaaggcagactacgccctttggcacgctgtatttggaattattatagcattattaggaattgattacaagttccagtattttttcatggattttccaccgtaatcgactcttcctgtgcatttacaccatagagaatcccgttctctttataaaaataaatgtaatccgtatcataaagtcccagcgcttctgtcagaaaatccagacgaactgtatagatcctgcggatcttctccagtttttctgcaaaaccagatccattccaacggctttcattaatctgcgcatccgtcccataataccccagataccagtccagtgaactgataccgtccggatcatatcctgtctccggattcagtgctttttccagagccggaacaaattttgtcatccactccttgtagactgcctctgcaaaatctctgtgatgataaaactgcatccaatagccctccggcttcagatctgatgcagccgcaaaccagctggaggctgctcctccttctcttgccagagaatgctccatatcccatggccaggaggcatgcaatttcccatctccacaaatatccgaatccttataataatacacacttgaattcacactgttttcttcattcagttcgtaaaacagccactgatctgcaaaggattccagatcaatatagtctgtataatactttcctttgtcattgtagccgtcctttgcatacagtgcattttcaaaatcctgccagaaatctgcaatataatatacttggctctgggatgcccagttcatgctcggaatcataaaggacagattccggtcactgacaaaattggctttcgttcggtcataatcctcattatccagttcgataatatagccgccagtcacatcctccggcgtctgatccagttcataccaggttcgctgggcgtaaaatccttcatttttccaggtcgtatgtgcatactcccgcagttcacttttgctgttcagctccttggtctctgttttcagatcctttagatcaaaccgggtctttccgatctggatcttacctgtcagcagatacactccctcatattctccattaatatagagatgcacaaactctgaggaaggggcataagccataccgatctcattgaccagatcataagtgagcttgtaagaaagcaatgaattgtcacgataagcggccagaagcacataatcttttgctgcacccatacctaacagatcctgtttctctgtaaatgacaagttgtaactcttcttcggtgcacggaaggaatcatttccatgacccttgattttctcaagtctggcagtctgggtgacctttccattggtttccagaatcatacaggttccctgtacttcattttgcttgtctgctcccagataagaaaccgcatcttcccgatccagatccagcatcattgtcgccgcatgttctgcggtcagatacgtaatgggataggtatagccttcatgctccaactcatatgttttctgccccggctctctggtaaactggttcacatccccatcggtaaaggaaaatgtaaccgccagctctgtctgctcatatcccgccgggattgcaaagcaccaggacttatcttctgccgaataatatccctgtatggagactgcactcagactgactggtacttctgcggtcgctgtttccaccacatctgcatattctgtggtcagagctggaacatcatcttcctgttcccacagattccaaccatccacaccccatgtcaggtcaagtccccgcacttcctgattgaggctctctgccgtctcttcctgtcccggcgcaaagctgttccggatctcaccgcgactctcccctgtcagcagggtcttcccttcctgctccggtgccagctgtccgttcacagttgccagacttccacagttcaaaatgcaggaacccagtcttgtattggatgcaatggctcctgccagcggtgccgaaaagtcaccactctccacctgcagatttgccaccgttccttccaggttgcggaacagtcccgcatctgtatccgatgtgatcatcacattgctcagatgatgtccatttccatcaaagattccctgaaaacaatactgcgtattttctgcatttccaataaccagatcctcttccacctctgccagatccagatctgtattcagattcacatactgtcctttatatgtatttcctttattcacgctccgtacaaatgtcagataatcttctacagaattgatctccaatatcagatcttccttctctactgcgtcatctgccaccggcatggtatcttctgtattctgattgccccagcctgcgatggtcttccgattgctccagcctgctgcaagcacggcagcactgatcagcaggattatcaaatattctatattttttctggtctttgcatccattgcctcatctcctgtccgatttgtttctgcattatatactgcaaatcctttgttttcaatattttctgccattcttaaacgaatcttaatagataaggcgacatttacttttcgtctgtaacatgctatattgaacaaaaagattctggaggaatttccttgaaaaaaataaatagaactctactacagatcaccgaaaaatactattggctctggtttgctctgctctgtgcagtgacagctttcctttgttttcgttgtctcggtgtgaaagcaatcgactcctgggacgaagctcgccatggcatctctgcctatgaaatgctgaaaaacaaacaatttctggtcaacacttatctgggaaaaccggattactggaatgtaaaaccgccgctttcctttctaagtgttgcagccggatttgtgctctgcggatacaatgcagtgggacttcgcttcttctccgctttgttttatcttctgactgtcatctttaccggattatttgccagaaaatacagccgtctggcatccctgctgaccatggtctttttatgcgccaactattttccattcaaagcgcatctggcacgggccggagacgcagacagtctgtacttgcttttgttcaccctttccatgctctgtatgctgaaagtccatgataacggtcgctggctctatgcctgcggattgttcttctccctggcatttctgaccaaaagctttcacgccggaatgattgcagccgtaggagggctcttccttctgctgacaaaagaattgtttcatcaaaagccaaaacgctggatcattttcattgcctgtgcggtactgccgatcctgatctggggcatctgccgttatcagtacgatggcattacctttttccagaatatgtatgaagcggacattgccggtcggactgcagccggtggtctggaaggacatggattcccattttctttttactggacttccatcttctggaattttgactacatctacggatggttgaccctgatcgtgatcatcggactgatctgcctgtggatacgtccgctgcgtcctgtggatacgccgcttcccaatgtggatctcactggaatcctgctttggttcttcgttccattcctcggattctcactggtatccaccaaattaatgtggtacgtatatccctgtatcgtaccattatgtatgctggctgccgtctttgtggcaacctttcttacaaccgtgcttacagagaaacatgtgccgggctttgccggactattgatcagccttgtactgctggctggaactgccgtctttgtctggaataattactgtgataatgtacgtggtgccagaagtaatgaccttcagacctttgtacaggagcaattcagtcgtgacagtgatcttgcaggatctaccatctacctggatgcttatgatccattcctctatgctaatactacagactgggagcagaacatgcagcttcttgccatgctgtccggtgaccttgattgtcaggatggaggcgcagaagcattccttgaagcacctgaacatgcacttctgatcctgtccattccgtttttacaggatcgcccggagttgaaatcttatcctgtgctggcaaataatggacagtatatgctgatttcttcagtgtcaaagtaaagcctcgcagaggcgattttgcgaatgtggctctgaagagttataaaaaatccgtggaatctgattttttccacggatttttcatacttatttcagtttatttcattttaaaggtcgcacattctgtctgaccgcagtgacaggcattgcttcctgacacctgaatctgatccgccgcgcatttgcaggaatggttataacaacaacattctgcttcacatgctacttctgtcggtttacttggaatggcattgctattggtcatgccatcctttttctcgcggaaactctcgcaacaggtctcatctgtcactttcgcattctttcctcccacatggatattatccttacagcaggaatcttctttgttgtacgcacagtttacaactgaacaatccagtcttgtcatgttcgtccctccttccgattattacttttgtagtatctgaagattgggtgaaaattatgtatggtaaaatgtggattgtccctatgtgtacttttatatcacttccagtacttttccatatacgtttttgcctctgcctttttcaggcaaaaacgcatctcaacctgaaattgtgtattatcataggttcctccccactcctggcataattcgatcatattttttattccacgttctgctcccggtacgattccacgctccatgccttctgccaatccacgctccataccttctgcaatcatctggtctactgcaccacacatattgattccccattgttcgttttgtaaattttcttttaatggcaacattcgtttatctaaaaaattccacattacgtcataagtgtcttcgtgaacctcacatgactggaagtcacgtgcttctcagccgctttagacggca

SEQ ID NO: 954 - DNA, 25286 bp, Unknown
  16S sequences of unknown bacteria
tcatctgcaccgccgaccaactggcccgccccagcctgcagcgcgccaatgcctttctcgcccagaacaccgacgaagccgccagccaccttcatctgcacagccgaaacgctcgcgtcctttgtcggcgcgctcagacccttcagagccgtgatctgcgtctgcagcccggcaatggcgttatcaagatccgtggtatccgcgtccggcgttgcggcaagcagcgccgtcttcgccgtctccagcgccgtgacagaattcgtcagttcgtcgacagcactgtcgcgggctgttgtgatcttctccccggcggcgtaagcgtcgtcaaggtcgctggacatggtctgcgcaagctgctgcagccccgtcaggctcgttttcagatctgcaagaccggcctgcagcgctcctgcgccggtcttcgcatccgcaagccctgtatacaggctagctgcgccttcctttgccgcggcaatgccgtctttcagggtactggtgccatcctgcaggctcagggtatacccagccagcgtgccagcaccggcttttaatgtgccaatgcccgtgtccaggttggcggcaccgtcggccaggctcgccgcgccatttttcagggtcacactgccgtcggccagttccgttgcgccgtccagcagctctgcggtaccgtcaaccagctgctgcgccgcgtcctccagctcattcagggagctctccagttcatcggcagtcgcatcggtgtccacgtccagatcgttgagcaggtcgctgctagccatggtcagcgtcatatccaaggagaaattttccacatccgccgtcacagtcacagagtccgacagctccgggatatcaaagtcaccgctcagctgcaggctgtcagccaggcccggcaggccatagcccaggatgatcgtccggtcgccgtcgttttccaccatgccgtggtcaatttccacattgctaatgcagtcgctgtccagcagcaggcccgtcaccatcaggaaggggacgtacatcgtctgctgcgtgccgccgacgtccacagtctttttctcattgttggtatactggatctgaatggtcagctttccgctcttgcccgccagatcctccggggcgatcttcttgccgtccagtaaatacgtgaagctgacacccacgggcagcgcatccgttgacttgccctggtagtagacgtcgccgcccttggtatcccaggagaggctctcgccgctgccggacatcgttgcatcacccttgacgacttcgatatcgctcagactggagctgtccttcaggacatcctctaggttcgtatttttcagccagtcggagacgatcgtctccgttacgctgccgtctgcccctgcgatggcgtaaacggtctcatccttttccaccgggctctgggccgccattgcgccgatgcccagtgtcgagatcagaaatccggcagctaacaggccgctgcccagccgtttccactgcattttcatcgtaatcatacctcctgcttttgctcatgcgcacgcatcgcgcgctttgcaccataggtcgttgccaggatgggccggtcgaacacatacagggccgacggcaagatcagcaagaccactgccatactaatcaatgcaccgcgcgccatcagcgagcacagggcactgatcaaatctacttcggaatacaggccgacgccgaaggtcgcggcgaagaagcccagtgcggagaccataatggactttgccgaggtctccagcgcaatgtgaaccgcgtctcgcttaccctggccgctcttccgctctgccagataccggtttgtcatcaggatcgcgtaatccaccgtggcgcccagctgaatggtgccgatgacaatggaggcgatgaagggcaggaccgtcccggtatacgccgggatgcccatattgatgaaaatcgcaaattcaatgatcgccaccagtaagatcggcagcacgaccgaccgcagcaccagcgcaatgatcaggaacaccaggccgatggacacggcactgaccacagcgaagtcatggtcggtgatggtgatcaggtcctttgtacacggggcctcgccgatgagcatcgaaccgtcatcatagcgcttggcgatcctctgcagctcggtgatctgcgcattgacctcgtcgctggctgtggcatactgggagccaatcaggaccagcttgtaatccttgctctggagcatatccttcagatcatccggcacaaagtcctccggcacccgcgaacccagcagactatccatgcccaggacatagctgacgccgtcgacgtcctccatctctttggacatctggcgcacatccgtcgccgatgtatcggcatccagcagcagcatgtgaaccgcacccatatcaaaggtgtcgcgcaaggccgcgttggcctggacactgtccagatcctccggtagggaggaatccaagttgtagtatacgctggtgtgggtgtagccgtaaatggccgggcccaacagcagcaggaagatcgccagaaatactttataatgcttcgtcacaccgccggcaatccgcccaacgtccggcagcagcggcttatgggtcgttttcttgattgccttatggaagaacagcaccagagacggcagaatcgtgacgcaggcgatgacgcccagcacgacgcccttggccatcacaatgcccagatccaagcccagggtgaagctcataaagcacagggcgatgaacccggcgaccgtcgtcaacgagctgccgaggacggaggagaaggtctctgcgatggcgtgggccatggcctcctcctggtcgtcgtaccgctccaggttttctgtgaagctgtgccacaggaagatggaatagtccatcgtgacgcccaattgcaggaccgccgccagcgcctttgtgatgtaggaaatttcgcccatgaagacgttcgttcctaggttatacaggatggccataccgatgctcaccagaaacaggaccggcagcagcagcgattccattgtcagcgccagcactacacagctgagggccacggccagcagcacataaatgggttcttccttctcgcacagctcccgcgtatcggcgatgatggccgacatgccgccaacaagcgcctgcttcccggccagatcccggatgtcctgtaccgcttgaagcgttctgtcgctggacgtgccttctgtgaagaagaccagcatcagggtgctatcaccattctggaatttatccaaaagatcctggggcaggatctccttcggaacggacaggctcgcgatactgtcataccacagcacatcggcgacgccatccaccttggaaatcttctcccgcagctgggagacattcttgtcgtccataccctgcaggacgaccatggaaaatccgcccttgccaaactcatccatcaggatgtcctggcctaccatcgtatcaatgtcatccggcaaataagtcagcacatcgtagttgactctggtagagatgtatcccagcacagaagggatcagcagcagtactgccaggatcaggatcaagacgcgatgcttggctataaaccgtccaaacttaatcatcggttgttccgcctcctcgaattgactatcggtcatttatcgtctcgcattgtaccgcactatttccaattcgtcaagagaaaaaatgacgaaacgtcatatttttttcgaaaagttattgcatattttttctcagtcctctataatagcggcgttggggcttgcgaagcccccttgcgcctggcaatccgcctggcgcaacgcacgactaatttcaggactgttggccgagggccgacggtctgcaaggggagattcgatgagcaaagtcgaggaaaacaagcggctcaagcggaacgcgatgctggacgccgcccagaagctgtttaccgacaagggcctggccaagacctctgtctcggatatcgtagaaaattccggcgtcgccaaggggacgttctatctctattttaaagacaaatacgatatccggaactggctgatctctcaccgctcccatcagatcctaaaagacgcctacctggcgatggagcagaccccgctgcagaagctggaggatcagttggtctttatctgcaatcacgtgctggactatctggccacgcaccaagatctgctggggctcatcgcccggaatctcagctggggcatcctcaagcggcagctgacccggccggagccggatgatgactttgcgttcacccaggtcctgatggagctgatcgcagccaacggtgtcgggcgggcggacgcagagatcatgctctacctgatcgtcgatctcgtcggctccagctgctacagtgccattctttacgccgacccatgcacattggaagcactgaagccccatctgttcagtgctgtccggcacattgtccggcagtttaccacacccgcagcaaagtaagcataataccccggcttgtctccagatcagaaacaagccggggcgtcgttttgccataggggaaaacaacagcgtgccgctgcttgcggcacgctgtttgattgcaatgaaatcagtctgcgacgtagggcagcagagcgatctgacgcgctcttttgattgccacggtcagctggcgctgatgggcagcgcaggtaccggtggtacggcggggcaggatcttgccgcgctcggacaggtaacggcggagcttcgcggaatctttatagtcaatgtgcgcaatcttatcgacgcagaagctgcataccttcttacgcttgcgcggacgaacacgatcgttagccatggtgatttcctccttcttcgagtatagtgaaaagttcaaatttgcagatcagaacgggagctggtcgtcgtcatcctccagcatggcaaaatccgatgccggtgccggagcagccggggcactcggtgcgccgaaggacgctgcaggcgctgccggagctaccggagccgcgccataggaccctgtgttataagacgcgccaaagggatcggcctgcgtatcgcgcttggaatcgccgaaatagatattatccgcgacgacctctgcactgcggcgcttattgccttccttatctgtccagtttctgatttgcaggcggccagaaaccacagccatgcggcctttggtaaaatacttgctgacaaattccgccgtgttgcgccaggcaacgatgtcgatgaaatccgtctccttttcgccggtctcacgggaaccgaaatcccggtcgactgccagcgagaaagacgcgacagcaataccgcttcctgtacggcgcagctcgggatcccgggttagacgccccatcaggacaatgtggttcagcataatgggcctccttattcttcaacagcggtgatcagagaacgcatgacgccttctgtgatcttgaatacgcggtcgagctctgcaggcaattcgggcttgcattcgcaagtcatcaggacgtagtagccctccggcagatcgttgatgggatatgcgagcttgcgcttgccccactcttcgatgctggtcagagtaccttctgcttccaccattgccttgaacttttccaccaatgctgccgtctcatcctccgccagattggggttgatgatatacaggacttcatactttgcggaaaccttagccattgtgttgcacctccttatggtctttatgggcgtcgcacccagcgacgccaaggatttgtccggttaaacagactaaattataatacctgttttcaaccgaaaagtcaactaaaaaatgcgaaaattccacatttttacagaataatgatcgccaaaaagctcatgggcgcgtcggaacggttataaatcgcgtgggaatggccatcggtgcaatactcgcagtcaccagggcggagcgtataggccacgccgtcctcctccacgacggcctcgccggagaggataagatacgcctctccctcgccggtgtggctatgacagccgatggaggcccccggctccatggtattgcaggcaaacaggcgcgttttcgtcacctcttccggggaaaacagcatctggctgctgtagcggcccgttccgcccattacattttcccgctgcgtcacgggcatatcctttgcaaatttgatcattgcggctgcctccttttcgcattccgtatgcgtttggtggtttcttctaaaatcagtatagcaggtttttgcacaatgtcaatcgcccggcatttgacgcggggcggcgccatctggtatgatgcaggtagcaagaacccgggggtggtgctatgacacgggaccgttcgttttaccggcagtttttcacgctctgcctgaccctgatggcagagcggctggtcgtctgcagcgtaaatctgctggacaatatcatgctgggcagctacgcggagacggccatggccgccgcggcggcggtcaaccagctgcagtttctcttccagcagctaatctatgccaccggcgccgggatggtcatcctcggcggccaatactgggcccagggccagtgggaccaggtgcggcgcatcgtgcccattgggctgcgctggggtgcaggcttcgccctggtgtttttccttctcgctgcactgctgccccggcagctcgtcagcctgtttacaaaagaccagaccatgatccagctcggggcagaatacctgcagatcatcaaatacacctgtccgctttttgccatgacgcagctgctgctggccagtctgcggaccgtcaaggtcgtgcagatctcgctgcgggtctcgctgctttcgctgctggtcaactgcgggctcaattatattctgatctccggccgcttcggcgcaccggcactgggcgtgaccggtgccgccatcgggacgctgaccgcccgggggctcgagtgcactgttgtgctgttttacgtgctgcggcgcgaccgcatcctgcggctgcggcctgcggacctccggcaggcccccgggccgcttgcccgggattttgcccgcctgaccgcgccgatctgcctgatcgaatttctctggggctgcaatatggccatccagacgtcggtgatggggcacctgtccgccgccgccatcgccgcccagtccatctccgtgacctccttcacactgctaaaagtcgcaagcctcggcagcgcatctgccacgacggtgttgatcgggcaggccgtcggccggggtgacgaagcgacgatccgcgcctatacccgaaccctgcaggtgcttttctgcgccctgggtctcgtcctggcggcgatcatgctcctgctgcgccgcccgctgctgcagctctacgcgctgcagccggagacggcggccctcgcccgccagtttattttgatccaggcggcggtagtcttcctcaacgcctaccatctgccgacgaacaccggcatcatccggggcggcggggatacgaatttttctgtcaagctagacctatgcgtgatctggtgctttgccgtgccgctgtcactgctggcggcgtttgtctggcactggccgcccgtcgcggtgctgctttgcctgaatgcggatcaggcagtcaagtgcatccccattgccatccgggccaaccggtaccactgggtcaagcatctgacccagccaacgtctaaccccgataccactgcccctggcggacatcctgccggataaattcctgccggatggcgttgagcacccgctttttatccccgctccattggggcgccagcagcagccgctttggcccgtcaccggtcagccggtggatgaccatctccggcggcagcagccgcacacaatcgcacaggagctgaatatatttctccagtgtcagcaccgggactcgaccagcgcgccagtccgccgcaagatccgtcccctccagaacatggagcagctgcagcttgatcccgccgaccccggcgtgcgcgatgtatgctgtcgtctggcgcatctgtgcggtcgtctccccgggcaggcccaaaatctggtggacaatgacagtcagtcccgccgccttgagccgggccactgcgtcctcaaagaccggcagcgcatagccccggcggatatgccgggccgtctcgtcaaaaaccgtctgcaggcccagctctacccagacgggcttgcgccggttcaaccgcgccagcagcgccaccgtctccggcggcagacaatccggccgagtcgcaacggagagggcgacgatctccggcggcgccatcgccgcggaaaacagcgcctctaaatacgccgtcggcgcataagtattggtaaagctttgaaaataggcgatgtaccgggcgtccggcgcttttcgcgccacccgcgccttggcctgggacagctgggcggccagatccgcgcagtggggcgcggcaaaatcgccgctgccctgctcggagcagaaaatacagccccgggtcccacaggtgccgtcccgattcgggcagcccatgccgccatcgagcgccagtttatagaccttgccgccgaattggctgcgcagcgcctcatttaatgtatgataccacacaccgccgcctcctgactttctggtaaaatgccgattgcaatttcccgccccctatggcataatagccggtggactgcggcacttgccgccgccttgttttctggctgggagggatgcctatgtactcggttctgcgccgctttgtgcgcttgaaacagatacgatactagaatatagagtaagaaaggcttcgcacaacccatgaagaaaatcaccattcatcaagtcaccttctgcggcattctcgccgctgtttacgccgcgctgaccatctgcacctccgccatctcctacgggcagattcagttccggttggcggaggcgctatgtatcctaccgtattttaatccggtctcgaccattgggctgaccctgggctgcctgatcgcaaatctgttctcgacagtctcggcgctggatatcattgtcggcaccgccgcgacgctgctggcctgcctgctggtgcagcgctgccggaagcccgcgctggtcccgctgcctgtcgtcctggtcaatgcgctcttagttggcgcggagatcgccattgtctcgacgccggacgccttctggaaaagtttcctgctcttcagcgcgcaggtcggcggcggtgagctggctgtcatgtacctgatcggtctgccgctgctgcttctgctccggaagaacgagcttggcgaccgcatcgctaagctttgacacgatgcgcacgaaacgtttgacgcgcctggccctgctgagcgccgtggccctggggctgtatgtgctggaggcgcagctgccaaaccccatccccgtcgccggggtcaagctaggactgagcaatatcgtcagcatctacacgctctttgcctacggcccctgggccgccctgggcgtcctgctgacccgggtgctgctgggcagtctgttcgccgggcagctcatcagcttggcctattccctggcaggcgggcttttgagccttgcggccatgctggtcctgcgccaagttctgaccctgcggcagatctgggtcgccagcgtgttgggcggtatttttcacaacatcggccaaatcctgatcgcgatgctgctgacggcgacaccgcggctcatctactacctgccggtcctcatcgccgctggaatgctggcggggctctttaccgggctctgcgcccaatttttgctgcagcatatgaaaaagctgccgccaggttaaacttcaaaaatcgccagccctctgttcgaggtctggcgatttttcgttttttctggactaactcatgccttcccggcgcagcccaagacgtccaccagcttgtgacggaccagctccttgatattggcgcgggcgggcttgaggtactcccgcgggtcaaagtgggccgggaactgggtgaagtgctcccggatgctgcccgtcatgaccaggcgcaggtcggaatcaatattgatcttgcagacagcgctgcgggccgcttcacgcagctgctcctccggaacgccgatggcgccgggcatcgcgccgccgttggcattgatcttctccacatactcctgcgggacagacgatgcaccgtggagcacgatggggaacccgggcaggcgcttttcgacctcgtggaggatatcaaagcgcagctgcggcttcgtgccgggcttgaatttatacgcgccgtggctggttccgatggcgatggccagggagtcgcagccggtcttcgtcacaaattcctcgacctcttccgggcgggtgtaggacgaatcctctgcggagaccttgacctcgtcttcaatgccagccagtgtccccagctcggcttcaacaacgacaccgtggtcatgggcataggcgacgaccttcttcgtcagctcaatattctctgcaaagggcttgctactgccgtcgatcatgacggaggtgaagccgccatcgatacaggccttgcaggtctcaaaatccgggccgtggtccagatgcagggcgatggggatatccgggcaatccagcagtgccgcttcgaccagcttgaccagatacgtatggctggcgtaggcgcgggcacccttggagacctgcagaataacgggagctttttccatggcgcaggcttccgtgatgccctgcacgatttccatgttgttgacattgaatgcgccgatggcatagccgccatcgtaggccttgcggaacatttcctttgtggttaccagtggcataactaacgctccttatctattacaatgatattgctattatagcccctggggccccgtgccgtcaatggccgcgaccggaaaatctggcagaccgctgagattttcagcagaagtcacaacttccccccatccgttttgcgcaaagtgccacaatccctgcaaatgggattgcaccccccgtccggctgtgctatactggatttgtagcgccaccggcgcaaaataaggaagagaaacaactgtgaaggagaaacgttatgtctgataagaaattagttggcagctgcctgatcggccaatccggcggtcccaccgcagttatcaatgccagcgcctatgggctgattgaagccgcgctgcaaaacgaagcaatcaccaaggtttatgcagcgcactatgggatcagtggcgttttgaacgatcagctgatgattatggacgaagaggacccggaaaatctgcgtctgatgctgcagacccctgccgccgtcctcggctcatgccggtataaaatgaccgagccggaggagaatgacaaggactaccgccgcctgctggagattttccagaaatatgatatccgctatttcttttacaatggcggtaacgactccatggatacctgcaacaagatctcccgctttatgcgcgaggctggctgggagtgccgggtcattggcatccccaagacgattgacaatgacctgatggagacagaccactgccccggctttgcctcggcagccaaatatatcgcgacctccatcatggaagtcgcccgggacagccaggcctatgaggcgggcatgctcaccgtcatcgaatgcatgggccgtcatgcgggctggttgaccgccgcgtccgtcctggcctcttacgccgggtgcgggccggacctcatctatgtcccggaggtcgattttgatattgagcagttcctggccgacgtccgggaatgctgcgaccggaagggcggctgcgtcatcgccgtctccgaaggcatccattatgccgacggcgcctttgtctccgccgccatctccgccaacgacggttttggtcacgcccaactgggcggcctggcctcccgcctagcagaggtcttgaaggaagagattggcggcaaggtccgcggcatcgaactctccctgctccagcgcgccgccgcccattgcgcttcggcgaccgacgtcaaagaagcctatgagatcggccgcttcgcgctggaatccgccattgccggtgagactggcaagatggctggtttccgctgccagcggggcccagcgggctatcagtgcgagtacgccctgttcgacctggccgctgccgccaatacggaaaagctcatgccccgggaatggatcaacgaggcgggcaactttattaacgccccctacattgactactgtctgcccctcattcagggcgagccggagatccagcggcgcgacagcctgccccgctactgcacgctgaaacaggtctatgccaaataagaagaggtgctttttatgaaaaaagtattgttgattaacggcagcccccacaaagcgggctgcaccttcaccgcgctggaggagatcgcccggcagctggaaaaggacggtgtcgccagtgagatcgtccacatcggcgatgggccccattacggctgcatcggctgcggcgcctgccgcaagacaggacactgcttccggaacgacattgtctgccagctgcaggaaaagatggcccagtgcgacggcatgatcgtcggctccccggtacattatgcctcagcagccggggcgctctgtaccgtactggaccggctgttctactcctcggccgcctcgtttgacggcaagcctggcgcagccatcgtctcttgccgccgcggcggcgccagcgctgcctttgaccggctgaataaatacttcaccatttccaacatgcccatcgtctccagcaaatactggaattccgtccacggcaacacgccggacgaggtccggcaggatctggagggcctgcaggtcatgcgtacgctggccgacaatatggcctggatgctgcagcagctggacgcgcctgtccccgcccgggagaccccgcaaaaaacgaattttatcaggtgataccatgtttacctttttggattactaccgcatgaagcccgcgctgctgccggaaggcgtcgaggtcatccgcggccagaccccggcaggcggcgcttacgctgtggtcctctatctggacagtgccgggcggaaaaccgccaaggaaaaagccacgcgcatcgacgtcgtcgaatgcagcagcgaggggcgcgaaatcttccgtacgcatctgaacaaaaagtaaccccggcgcaagctgccgctggattttccccggtccttttgccgcgccgcgcgcaaaagccggggattttcccataacacaggaggtcaatatgcagaaaaaaacagaattttccccagaacagcttcatttcctgcgccttttgggtaagcagtacccgacggtccaggccgccggtgcggagatcatcaatctgcaggcaatcatgaacctacccaaggggacggaacactttatctcggatatccacggcgaatacgaggcgtttttgcatctgctcaactcctgctccggtgtcattcgggaaaagctggacgagctctttgccacgaccctctcccagcatgatcgcaatgagctggcaacactgatttattacccggaggagaagctggccctcgtcgccgaggaggcggaggacctggatgaatggtaccggatcaccctgtaccggctgctggagctttgccgcttcctagcctccaaatatacccgctccaaggtacgccacgccctgccccagggttatgccgacgtcatcgatgaactgctccacatccgctatgaggagccggacaagcgggattattatgacatcatcatcagcaccatcattgatatcggccaggccgccgaggtcatccaggccatctgccaggtcatcaagcggctggcggtggaccatatgcacatcgtcggggatatttacgaccgcggcccccgggcggatgtcgtgatggattccctgctggattaccacagcgtggatatccagtggggcaatcacgatattctctggatgggcgccgcctccggctcccgggtcctggtggcgacggtgttggcaaattccattcactacaacaacctcgatgtcattgagacaggctacggcatctccctgcgccccctgtccatttttgccaacgaggtctatcgcgactgcgatacccactgcttccgcgtcaagctgaccgagctggacggcgatacctcagaaaaggacaagctgctctcggcccgcatgtacaaggccattacggtcattctcttcaagctggaaggccagctgctacagcgccgcccggagtttggcatggccgaccggctcctgctggatcagatcgactacgacgcaaaaacggtctgcatcggcggcgtcacatacccgctggaggactgcgacttcccgaccgtcgaccctgcccagccttaccagctgacggcggaggaggatgcggtcatcaaccaattgacggcgtcgttccgacgcagcgaaaagctacagcggcatatccgcttcctgtactccaagggcgggctgtataagatctacaatgggaatctcctattccacggctgcatccccatgacgagcgacggcaagctgcgctccttctccatcggcggaaaggagcgctgcggccgggccttcctggattatgccgagcagaccgcccgaaaagcctattacgacaagcccggttccccggagcggctctttggcatggacttcctctggtggctctgggccgggcgcaacagtcccatctttggccgagaccgcatgacaaccttcgaacgccgcctgatcgccgacaaatcgacctgggacgagccgaaaaacgcttactacacctggtatcacgacccagctgtctgcgatatgctgctgcaggaatttggcctggctgggcctcactgccatatcgtcaatgggcacatccccgtcaagacgaaaaagggcgagagccccatcaagggcggcggcaagctgatcgtcatcgacggcggcttctgcaaggcctatcagcccaccagcggcatcgcgggctataccttgatctacaactcccacaatatccgtatcgtctcccaccagcccttctccggccggcaggacgcgctggtcaatgaccacgatatcgccaatcacaccctcgtctttgagcacatggagtcccgggtcaagatcgcgcagaccgaccagggacgggagctgcaggcccggatcgacgatctgcggctgctgctggaggcctaccgcgccggtgctgtcacagaagatcaccgtccctgaacgggcaataggagtgttcacccttgctgttttatgtatttctggtgcttgccatcgctggtagcgccgcgctgacgtatggactgggctggtacgcccatgccgccgcactctggcaagcaccgctggcggcgcttgccctgtttctgggcctgacctttgtttttctgctcttttttgccattgctgcgctgctcgtccccatggggcggcagcaaacgcggcgcagtacattttacggcggtctgctgcgggccttttgtggcttggtcttcccgctggcgggcatccacctggaggtcaccggtctggagcagttgccgctggacgggaattatctgctggtgtgcaatcatctaagcgtttttgacccggtccttctcatccgcgccctgccccggcaagcccggcttagctttgtcacgaagcaggagaattttgacctgccagtcgtccggcagtttatgcacaagctgcagtgcctgccgctggaccggcacgacgaccggcaggccctgcgggccatcctgcaagcggcaaagcagctgcaggagcagcccctttgcatgacgatcttccccgaggggcagacgagcaaatctggccagctgctgccgttccgcaacggcgcgttcaagatcgcccagcgggcaaagcgccccgtcgtcgtctccgttctggaaaattcccgagcgatttatcacaatctcttccggcgacgcacccgagtgcgggtccgaatcctcggcgtggttcccaccgaagatgtcgccatcctgcgcaccgtacagatcggcgaccgcgcccacgctatgatagcggcagccctacaggcagacggcgcctgagggcaatgccgtttctgaatatcgcagcgaaaaactgcaagctttttggcaaaaagcttgcagtttttcccatcatttcatgttttttgaagcctccagttgacaaaatgatctttaggcggtattctaatctatagcgctctactgatacctgccgcctgcgctgcggcaaagaagaggagatcatcttccatgaaccaacccgctcttttgattatggccgccgggatgggcagccgcttcggcggccccaagcagatcaccccagtcgatgccaatggtcatattctcattgacttttccctttatgacgcctggcgtgccgggttccgaaccgtcatttttatcatcaagcccgagatggagccggatttccggcaggccatcggcgcgcatatcgcgccattttttgaggtccaatatgtccaccagcggctggactgcctgccccagggctatggagtcccggcaggccgcgtcaagccgtgggggacggggcacgccgtcgcctgcgccgctgaggcgctgcgggaccagcccttcgccgtcatcaacgccgatgactattatgggcgcgacgccatgcaggccatttaccaattcctggctgccaatggcgcacccaatgcccacgcgatggtcggctaccagctgcgcaacaccgtcacggaattcggctacgtcgcccggggcgtctgccagatggaaaacggcttcctaacgggcattacagaacgcacgcacattgaaaagcgcggcgcagacgccgcctacctggagggcggccgggaataccccctgccgggcgataccgtcgtgtccatgaacctctggggcttccgtccaatgatcctcgatgagctctggcgccggatgcccgcatttttggacaagacgctggcggaaaatcccctgaagggggagtatttcctccccagtgtggccgacgcacagatccacgagggcctgggcaccgtccgcgtcctcaagacaaacgcccagtggcacggggtcacttaccgggaggacctggaatccgtccaggccgccctggcagagatgaccgcccaagggatctacccgacgcgcctttgggacccggcaaatctgaacaaagcataagcgaatttcaaaaacaggcatggtagctgccatgcctgtttttattttttataaagtaatatattctgggaacgcctcttttcgcaggacgccccacatcttgtcgatataagaaagcgtgtagaaattctcgtagtagtgatagtaaaaagcgcccttgcacgtcatctcataggtatccccccgctttgtgaggaatccgagctgcttcgcaagccacagctcaaagccatacatccttttcagcggcacaccaaagaatttttcaaaatcgcccgccgtcacctttgtactgtacgccgtccagaacagccagtagatcatccgctgacgcttggtaaagcggagcgtcaaggaggtcgcaagcttgcccgcgcggatcctctcgcagtaagcggcgacatcgaacgtgttgatcttaaactgcttctggaataaactcgtcgcagagcagccaaaaccgaggaaattctctctggtcatggaggaatagttggcctcgggttcacttgagaacgtccagatggagctgcgcgtatagccttggcccaagcagtattgggtgatggcattcagcaaggcgcgcttctcttttttcggcattgccggaaccgggctctgcgtgaaggtgaaatcaataaatggatagatggcgacatggtttgcccctagggaaaaggccatttcaagatccgatctgagattctcgtaggtctggccaggtagcgcaaagataaagtccatcgataccgtctcaaacgggaccgccgccaaagccgcctgcatcgccgcagtatccacggtctttctgccaagaatcttttgatacttatcgcaaaacgattggatcccgatgctgatttttgttacacccgcgtctttcaggatgcgcagcacttccacatttacattttccgggtgaagctccaggccgatcccctccgtgataagaaagtgctcctgcagcgcatctacgatttctttgatgcggcttgccgcaagggccggtgtcccgccgccaaaatagaggctggtcacaggctttcgccctgcatgctggctgcccacaagatggatttcctggagcagtgcatctatgtacgcatcacactgctgggcagaataccgcaccttgcaatatgggcagaaattgcagatgcttttgcaaaacgggatatgcacatacagcccaagcttttcacacgcggcaaaaggcagttgctggtcaaattcgtttctgaaggtaaagggctgtaccgtccgcgtgagccacattctcgtaagacttgtaataatacccataggcctcctaaatgtactttaagtacgtgtgaagcatctcgaaaatgatctttggattgccgcggaatagcagcgtgtattccgcgacaaaaaagtaaccgcattgttcgcagaggccgggaacgtcaatacagcgcccgcaagtggacagcttgccatgttccatcaccacgcactgatggcagggggtcggaaaacgattttcgatcagatagggaaaagcgctttccagattaaagatcggcgcgcccgccttcctcatccgcgtaatcacagcgcagcaagcggccttttccgctttgcacagcgccaattctttggtatccggatacggcgtatggaaattgaacgagacggcgcgaatatttttcgtgtcccgcgctgtcaagcatacatcccgcacagaatccttgttgatctgattgattgccatatagaggcagatattatccgcggttgcattgcggatattctccatgatcgtatcataggtatcgccgcggatctcgttatggcgtcgctgatcgccatccaggctcaagaggatcagattcgcctccggcaaatcaagaggaaatgtgccgttcgtgacgacatttacaatgaggaaccccatgcgtttcgcctcgatgaccagatcccgcagcgagcgttccccatcccgccaaagaaaagtctcgccgccgcaaaagaacaagatccgcacccccatatcatagagctgctgcatctcctgccggatctgcagatacggatggacgatcgctgtgatattattgacggagcaatgcttgcagtgcaaattgcatttgtccgtcacgatcaccgtaccaaggatcggttttttctttttgaataaaatggtctgaacgccaaacgcggcaaagtgcaagaaagaggacagcttcatatcgcacctccgtcacttgattgcaggctgtttcggtgtgtacattcccatcatatccaaaatattccaatttttcaagatcgtattacatattttatataaaacgatgccgaatatctgattcggcatcgtttcttgtcttcttactccctccgcatcagacagatgctgtaagactgctgttttttacaatggccgtcatatcagcacctgtctgccctgcgggttccttttttatgccgtgcccagctggggtcacagtgcctccgcacgcaggatatcaatgatattatcccgccgcagcttgtgcatcgcatagagcatcgtcgcaaacacgacaacgaacacgctgaccaccgcaatgaccacactgacccaagggatcgtaaaggcggtctcataaccggcgtccacagagcgataaattaaccagcagaccgcagccgagaccggcaagccccagagcagcgatttcagcccatagcgcaggcattcaaagttcatcatccggtacacatcccgacgggacataccgacagactgcagcacagccagctcccgccgccgcagcgcaatattcgtcgagatcgtgttaaacacattggccgccgcaatcagcgagatcagaacgataaacccataggagaacacgttgacgacggtgatgaccgcccggcggccttccgcgtcggcagcattgtcatgcacatagccggagatctgccgctctgtcagatgcgcctgcagcgtattataggcctgtttgtgattcgatgcccggaacaggaaccggatttcccccttttcctgtgccacgcccgcaatcttgtcccaggcagaatagggatagattaaaaacaaaccgtcggagacgtaatacggctgttcaatcaacgcagtgcccaactgcagctcccgcatttcgctattgccatctgccggcagctccagccagccgtcgtcggcgtcctcctgctcccgtgtcccgttgttcacggcatcttccagatagctcagctccagctgccctgcttcatcgtaatacgcgtcggtataggtataccccgtacgcggctccgcgcagagctgcgtgatcgaatccggcagtggatcgtgccgcagtgtcgcatagctgacaagtttcgaggaatccccagtcgaataatactcccgcgtattatcgtagaccaatgccaccggctccgccgtctccggcacgccgctctgcttccgcagcgcctggtagtctgcgtcgcggaggaagataagatttgtctgcagtaccggcagatcgtcaaacaggtcctggtattccggcgacaggtctgccttttccggcagcagcgtcaccggcgcactagcgaaaaataccccttcctgaacaccttccagcggcaagaagctcttcagcatctgctccgggtccccggtgtcctcttccgaaagggtgacggcaatatcatagccatccggccgcatcgcgctgttcacgccctgcttgagataccaggaaaaagccgaagccgagagaaacagcaccagactcataaacaaggagaggaccgtggcgcggtattggcgccggtttcgtttgaaattcttcgccgccagggtcccggtatagccgaagagccgctctgtcagcgcactggtccggacctgccggggacggatccgaatatccgtcgtctggcgcagtgccgcgatcggactcagccgcatggcccgccgcgccgggagccaagcggagatcaaggtcgtaacaagcccaatggctgccgacaacagcagggcccacggcgccagatgcagccggattaccaccgccggtgcatcgacgccgaaaaagctctggaacgtatcgcgcaggcaatacagcgtcacgccgatcccggcgcagccgacagccagcccgatggggatcgcaatgcagcacagcaccagtgcttcgtacaaaacactgtagcggatctgccgccgggtcgcgccgatggatttcagcaggccaaattgcttcgtccgctctgccacagagatggagaaggaattatagattagcgcaatggatccaaacatgatcagcaccagtaggatcgccatcatcccataaaggacggcaagaacgctctgattgccggatgcgccgtagtacagcagcaggttgctgttggtcttccactcgtcacactctgtcataccgtccagcagctgatagatctgccgcggcttttccacggtaaacagcgccagatacgtaccatcgcccgccccgccggtcaacgcagtataagccggtgcgtcataccattccaggatataatccagcggctggaacaggcccacaaccgtataggtgtgcttttcctgcggcgtaaacgtctcatcgtcccgcaacgggatgttctgccaaagcgtttggccaccagcttgacggatgccggtctccagctccagggtgctgcccaggcgatacggcttcccgtccggctgcaaatagctggtgggcagagcgatctcgtcttccgtgaacggaagacgtccctgctccaagtgcacagcaagcaagtcctgcaaattggccgaggccgccgccaggtacagatagggccgctgggcgttcaattcatttccctgcgcataaccgatgcgctcgagtgtcgcgacggatgtcacttgtgcctcattttcgagcttcgccaacgcttccttgctgagctcctcaccaaaggcgtgataattcccttccatcgcctggcagacctccaccatatactgctggccgctataggcccccgccgccaccgcagtcaagagggcaacggacaggatgatcccgatgatcgtgaccaacgtccgggagcggtttgctttgagggaccgccaggtaaattgccgaaacagcttcatttccgcagcacctcatctctcgtgatcctgccatcttcaatggcgatgatgcggtctgcctgcagcgcgatattctcatcgtgggtgatgatgatcagcgtctgcccatacttctggttcgaaaggcgcagcagctcgacgatctcctggctgttcttggaatccagattaccggtcggctcgtccgccagcattacagctggcgtattcatcagcgcccggccaatggaaacacgctgctgctgcccaccggagagctggttcggcagatgccgctcccggccctggagccctaggatctccaccatctccgccaagcgctgggggtcgaccttccggccgtccatccgcagcggcagcgtcatattctccgtcacattcagaacagggatcaaattgtaaaactggtaaaccagccccacctgccgtcggcggaaaactgccagctgctcctcattctgggcataaacatcctgcccatcgacccagaccgtgccgctggtcggccggtccaccccgccgagaatatgcaagagcgtcgatttgccagacccgctggggccaatgatcgccaaaaactgccccttcgggacggaaaagctgatatcatccagcgcccgcacttcattttctccgtttccatacacctttgtcagatgctcgatccgtaataattccatatttgcctcgctttcttgcaggatcatcttcttcctctttagtataaaggaaatcaccgccccgtgcgtgacgaggcggtgacaattatgtcacaaagtgcagcgctcggccgccgcacagcactcaaatcgtgccatggtaaaaccggaccgtaaacagcgcaccgccttccggggcgttttgggcccgaatggtcccgttctgggcggaaataatgcgctgcgctagggccaggccaatgccaaagctattggccgccgcgttatgtcccttataaaaccgctcaaacaagtgcggcagatcatccggtgcaaagcccgggccggtatcctgtaggcaaagctgcgtataaaggggcgtctgcgagatctccaccaggatcttgccgccttgcggcacatgctccatacagttcttcaggatattccccagcgcttcggcagaccaggcgccatcgccggtatagctgccggagcccgtgacctgcagcgtgatctcccggatctcccgcgcgatctccaagggctccgccgcttgccgcaggacctgcgccgcatccagcgtgttgcgccgaaaataggccgtgcctgcatcaattttggccagattcaaaagcgcgtccaccaaccaatcaatgcgctgcagcaattgattgagctgctgctgcagctcccgctgccggaccgagtccgccccgacctccggcagcatcgcagcgatcaggttgaggctcgtcatcggcgtgcgcagctgatgggaaatatccgcgatggagtctcgcagaaaggccttgtcctcctggtcacgagcactactctgccgcagcttgacaagcagcttctgcagctgcgtctgcaaaatagcaagctccccctcctggcaagcggaaaggagcgcgccatcccgcccatagagagcctggtcgatacactgactcagctgctccatctggcggtctcgccgcaggctcgtcaccagataatacagcaagaaaaacagacagactgcaagagccaaaaaaccgcaagcaggctgtatcacaaagccaacagcgcaagcaatcacactcactgccaaaagcagcagtgaccgccgccgaaattccacgttctgcagcagctgactcatagcatccgataccccgcaccgcggacggtcacgatataccggggatcctgcggattatcctcgatcttttcccgcaaccgtttgatatagactgtcaacgtgttgtcattgacaaattcccctgccgcatcccagatctcctccaaaaggcggctccggctcagggtctgcccccggtttgtcgccatagctgccaggagacgatattccagcgtggaaagaaacaggtcctgtcccttcttcaatgcgcggcccttaaccaggtccagcgtgaggtcgccacaagatatctgccgcgcaccgccggaccggcgcagcacactgcggatccgtgaaacaagctcccgcggccggaagggctttgcaacataatcgtcggctcccatatccagcccggcgacaacgctgtattcatcgccggaagccgtcaggaagaccaccggcaaatttttgtcctttgctgcagaacaaacggcaaagccattgccatccgccagagaaatatccaccagcagaagatccacagcatcctgcgccaatagtgccagcgcgccctgctggcccaccgcatggcacacggaaaacccttcctgctgcaaaaatactcgcagcatctgcacaatatccgggtcatcctccaccaaacaaatccgctccataagacaccccccaattttttaccttaagtatagcagcattccacgcataataccagcctcagtatgacacgcaggtacggaaaagtctacaatctatggacagattttagcataaggaatagaataaagctacccattggataatgggtgaaaagtaagcatgcatctggataggttctggaaatacggaaaccttaaagtagattagggtcaatcgcaaatcctgtgtaaacgctaaattggggtgcaaaatagagcaaaaaattttaaggcgggcgctgcgcaagctgccgccttttctataaaataacagtgcttcttgggtatgtcaagcgcagaggcatcagccaccattcatctcggccggtcccgggtcccatggtcccgggaccgtcaggtactgtcaagaattatgcgcaaattcattcgcagactcaagcgaatggtcaaatgtgtgcaaaaaggaaaacccaccgaggaatctcggtgggcatatagatgttggcgttacctattttcacggccagtcgcccggcaactatcgtcg

SEQ ID NO: 955 - DNA, 11946 bp, Unknown
  16S sequences of unknown bacteria
cccccctctgccgcgccgcccgccggcaccgcggtgcggcccggctgcgcagccagcaggctcagcgcggcagccgccagcaggcacacaaacgcctggtaccatccttttgccatttcattcgccccttcgcaatcctacttcgctcagtatgcccgaaggtgcaaaaaacgatactgacagttcctgccgccgaatcggttaaaaataatcggagatatacggcacctgctgctcgatggaatcttccagcagatcaatcacggactccggcgcctggatacgcccgattttggcaagataatccggccgtttatagcccatcagcatggtggtcatggtctgaatattgatatggtcggcgctgtgcgcattggtgcgcacagcctcgccccggccgtcccgggaaattttcaaaagaaaggtaccctgattgcacttcatcatcggatcttccagcgtaaacagccacgtccggtccacagaatcctttttgaacggatattgcgcaataaaggcagggaaatctacaatgcgcgccatataatagggcgcaatttcttccttgatgctggcgtcttccagcaaaaaggccagtggttcattggtgtagatatcgcctttcaccagatggatcatggaaaagtgggcggaaacgaaattccacagccccgtccgggcgttttcgtcctgaaaaatcatgtctttaatatggaaaacctcattggcaatccagtaaatgacagcgccgtccggctcgccgtcgggattgtaatacaccgccgccatcatatcgtccgaatcccacagccaatattcgttccaggccagctcgtcgcgcaaaacagcgccatgcgtgcgcagagcataccgctcataggcatgcttcagctccggcccctcggttttaacccgccgcacgtcacccgccaccgggcaggggcggggcagctgatgctgcttgatttcataggtaatcttatccgagacaatttcccagcctttccggcggtaataagggatggaatagggataaagataacagatatgctgtccctttttctgcatgttccgcaatgcctgctccagcagccggtgcatcaggcccatgttggaatactccggataggtgcccacgccggtcagcccgcccatgcgataggtccggccaaaaatccgcacctgcatggggtataccgccacctgggaaaccaggttgtccccgtcgaaccatcccagcacatccgctttttccatggtgggaaatttggcccggatgatctccttttcctcccagccaatagaggttaattcctgctctgtcacctggaacacatagcgcagcagcgcgttgtactgctccatatatttcccggtaaccggtctcatgtttaatttttttcgatccataaaccgtcctttgtgattctctgccgccggacccatccggcagcggtatttattgcgtacattgcgtgtttttatgataccagcaaaccccctcccgccgctcaatcacaacccggccgccgtcggccagataatcaataaacgaacgcatgttgcgctcacacaccgcacatttgaacgccttcgtgctgtgcatgtccaaacgccgatacaccgcgcgcacccattcttcctcggacatctccccctgcaggcaatcgtataccagttctgcccggtccagaatataagcgatattgttttcaattaaatcgccgatatcgctgtagacgccccgatgcgccagcacataggcgtcgcagcgcagcgcgcgcaggctcgccttggccttcagatcgtcggcacggcacaccgccgaaggcatctttgccccgcgcatcaccgtttcgctcatcagcgcgtcggccaggtacgccactttatccggggtgataatgccgatctgccccggcgtatggccatacagcggcaaaatgccgaagggcacgccgcagaaaatcttcacccgctcgccgggcatcacaatctggtcggcctggtagcactggccggccatcatatcgtcgatctccctgggcgtcatggccgggtaggctccgcggtaggccatttcgctgaccgccgtacccgcttcggccaggctggccagaatcgggcatttatagcggtacttgaggtgctcggcattgcccgcatggtcgtagtgcgtatggctgacgatgatgccaatgggccgcacgccggtttcctcaaaaaaacggatcagcggttcccggtcctccctggcatagccggtatccaccaggatgccgtcgtgctcccccgttttataaaacagcagcgtgcccgccgtcacatccaccgtatacgtgttccccttgaccagattccattccattgtgttatgcctcccatgtaccggcgcggttgaaatgctccacgccgtcctcaaatcgatgctccagccgtccctcgctgcacagcagctgcaccagagaccggatcatgtttcccgtttccagcgtccggtaataataggcgccggcgtgcaggccaagctccctccacaccgcgcggatgatctgctccatggacatgggcttttcaatgctccgccacaccgtttcggcgcgctggcggatatagcggaggttttcgtcaatcagcgcttccagctcctgctcgatgctgccatgcgccagaatataggccgcgcaatgatagcgccgcagctttttcttgctctccagatccacctcgtggctcagggcatagctgagcttggcctgccgcagcagccgccccgacatcagggtatctcccacatagagcacgtcgtccggcgtgcggaacgccacatgatccacagagtgccccggcgtgtggatcacctcgaacaccgcgccgcacacctccagcggcccgtcctccaggccgatctcctcgtccaccgcataggggaactgctgccagaacgcttccacttcccggtaattcccgttttcatgccccgctttgaaggccagcggcgacgcgtgggccgccgcttccagccggggcagatagatccggcttccctgccgctgctgcagcgctgcgttggccgccacatgatcccagtggtcatgggtgttgaggatggcgcgcacgcgcagcccctgcccctccagccactcttccagctccccgtggagcatgcagccgctgtccagcaggataatctcccgctcattcagttgataatacggcaccatagcccgcggctggacaatgcaccaggtattgcccgccacctgctgtgcggtcagtttcatacgcaaatctcccgtgatttctgcacgccgcgccggagtcttgttgcgcggcgtacggcagtccatggaaaattatactcccattcgccaaaagccgcaagagtgcgccgcacctttccgccttcctctttgacaaaagcggggaagcgcattataatagtgctatctgttttgcgaacgtaagcgcaaaagccaaatgaaacaactgtcccgcccggttgccctgtctgcgtacggacaaggcgcgcaggccgtgcccggctcttgtttcgtttggcttttttatagaacacaatacaaacaggaaatgtgaggcgaaagaatgtgtttacattttgaaacagtaactgcgaaaaaccgcggagccgtggaacatctggcgctcttgccggagcaggccggttttatcgaaagcccgacggaatgcctgcgcgaggccgacgcatctgatttctggcggccggtgggcatttacgacggcacggagctggtgggctttgccatgtacggttaccttccctttttgggcgagggccagctctggtttgaccgcctgctgattgacaaggcctttcagggccggggctatgccaaagcggccattgccgctctgctggaacggcttcggcaggagtacccctgccgccgggtctacctgagcgtatacggcgacaacgccgcggccattcatttgtaccagcaggccgggttttcttttaacggcgactacgatactaaaggcgagcgcgttatggttctggatttcccggaaaccgggccggcagaaacgtaacgctgcacagcgttgtaaataaaaaggcgcgcagtgcttttcgcactgcgcgccttgtaccggagcaacctattggttcaggccaataaaacgaagtaaccgcctgccttccacaactagcggttacttcttgtaacatgtgggggacaaaccgttttccgacacggttcggcattcgcttcttgcattttgtcaaaccatgtggtatgctgaacgcggtgctgccgataaacggcaagcggtttgttcccccgcatcaacggggggcacttcttgttccccgttctttacgaaaggggggctgtcctatggttacatattctgatctgattcagactggaattctagtcattggcattattgccctgtttcttcaggccaataaaacgaagtaaccgcccgtcctccaaaactagcggttacttcttgtaacgcgaggggacgaaccgtttgtccggcagcaccctttttctatatttagtatagtgcagaacctcccaaatgtcaacaggtcagaatccagaaaagcgaagcgtctgaaagacgcttcgctttaatcttttgaatctatattgatgcttccatgttcccgttctacttcttccagatgctgaagcaatacaaattcgatataattggtaaccgaccgatgttgctgtgttgccagcatgccaatcttctccaacacttcatctggcaaacgtagagtaaatactcgcttgtttgtggccaccttgcaacgtcctccctcacaatcatgctacaattatagtaaaattttcactaaattgatacattcacttgacatgcgagtgacatcactttatattaaaagtagtaacaaaaaattttattcaccctcaaaatcaaaatcgtttaattccgggaagtccaaaaattcagaaagtgtcatattaaacgtaatcgcaattttgtgtatggtttgaagttttggattttgggatcttccatgtaaaatactatccactgtagcctgactcaggccgctcatattagcaagcgcgttgatcgaccatccgcgccgtttgcagagcgcttggattctgtctgcgataatttgaccatacgctgcatctttatccatcattgtataaccttgctatcctttatattttatcattcataggatagcaataatttttaccattattactgatgcatcattaactctacagcatatacagctcttacatcaatctacataaaggaacaaaaattatgaattgtccggaatcgtatatcaaaaacctatataaaactttatggagcaccagcgatgctcccgcggaaggcgtcacgccctttgcccagcagccggagcataccatctggacgtttcaggcggaactgcgcgaaatccaggacgccctctctccgcgggggccggagagcctcgccgccctggagcacgccctttccatcggccgcgcctggtgggagcagtgcggcctgacgcttttccgtcagggcgtccgcgtttccaggctccccctgtcttatctgcgcgaaaccgtgggcgtgtccagctatgaagactgcggcctgctttccctctctttcctgtccaacgaacgccagctggattatatcccgccctttgccgatctgctccatgaggaagccctgccctgccgccggcttcatgccgatctgctggaggcgcaggaggatctgtgcgagctgcccgatgcccactgggacgaagatgacgtttccgaattttactgcgcccagctgggcatgtgtcaggcctgctcggaggaaatgtacgcctacggcctgcagtacggccggaaaaaagaaccataaacggatccccggaaggcttctgccttccggggatttctaatcagcgcaaaaaaaagccccttttgtatgttccggccggaatgccatacaaaaggggccttttatagggcgggggaacccccgcgcccataaaagccatacattgggttgaattgcctgaccgcccaggcggtcaatggtaccggcggaccgggccgctttcccaccattcaaagcaaatcgaaatttactttaccagttcaatcagagcggtttcgctggcatcgccgcggcgcacgccggtgcgggtgatgcgggtgtagccgccgtgacgttcagcatagctgggagcaatttccttaaacagcttcttgacgacgtcttctctggtaatgaagctcatggcctgacgataggcggccaggtcgttcttcttgccgagggtaatcatcttctctgccagcggcgcaacttccttgcagcgcatcagcgtggtttccatctttcccttgtccaggaaatcggtcacctgctggcgcagcatggccttgcgctgggcagtggtcttgccgagcttacgggttccgggcatgtatcttctcctccttgtgtaggaattgtgttggccatcaacggatggccggcttagttgttgtcgtcatccgccaggctcaggcccatcatggccagcttgttgatgacttcctccagggacttgcggcccaggttgcggaccttcatcatatcgtcctcggtcttggaaatcaggtcggcgacggtgttgatgttggcgcgcttgaggcagttgaagctgcgcacgctcaggtccagctcttcaatcgtcagttccagcaccttgtcccgctgggtctccgtcttttccaccacggtggagcttctgcccacagtttcagaaaggtcggtgaacagggcaaaatgatcgcacaggatctttgccgccagagagaccgcgtcccgcgcagtgatggtgccgtccgtccaaacttccagtgtcagcttgtcgaagtcggtcatgttgcccacacgggtgttttccaccgtgtagttgaccttgtgcacgggggtgtagatcgagtcgacggggatcacgccgatcaccgtctggggcgtcttgttgcggtcggcggacacatagccgcggccgtggttcatggtgatctccatgttcagcgtggcgccctcgcccaaagtcgcaatatgcagatccgggttcagcacttccacatcgccgtcgctcttgatgtcgccggcagtcacttcacagggacccaccgcttcaatataaacggttttcatgccctcgctgtggattttggccacaatgcctttaacgttcaggacgatgtccgtcacgtcctccttcacaccggggatggtggaaaattcatgctggataccggcaattttgatgctggtggcagcggtgccgggcaaagacgagagcaggatgcggcgcagcgcattgcccagggtcgtgccgtagccgcgctccagcggctccacgacatacttgccgtaagccacatcgctgggagtttcaatgcactcgatctgcggcttttcgatttcaatcatcagttacccctcctcctcatgcagcgcatttcgcgctgcggcgttcgtgtgaatcgtacatactgagggtaaaacctctattacttggagtacaactcgacgatgaggtgctcctcaatgggcatatcgatatcgccgcgctcaggcatcttcacaacggtgcctttcagtgcgttcttttcacgatccagccactgaggaacggtaacctggatggcatcctcgcccaccagtctcttgaacttggaagaggcgcggctgctttccttcacttcgatcacatcaccgggcttgacgagataagaagggatgttgaccttcttgccgttgacggtgaaatgtgcatggctcaccagctgacgggcctcacggcgggtcatggcaaagcccagacggtacaccacgttatccagacggcgctcaatggtcacgagcaggttctcgccggtcttgccggccatcttctcggccttctcatagtagccgcggaactgcttctccatgatgccgtacacgaacttgaccttctgcttttcgttcagctgctgtgcatactcgctctgcttctttctcatctggccgccgggattgcggttggtctccttcttggaataacccatgacggtaggagaaatgcccaaagccttgcagcgcttcgcgatcggctgcatattcttagccatatttcaatatcctccttacttccgattagacgcggcgtctcttcgggggacggcagccgttgtgggggatgggggtgacatccttgatcatggtgacctccagacccactgcctgcagcgcacggatggctgcttcacggccggcgccgggacccttgacgtatacttcaacggacttcagaccatactccatggcggcctttgccgcggtttcagcagccgtctgggctgcgaacggagtggacttcttgctgccgcggaaaccgaggccgccggaggaagcccaggacagagcattgccctgctgatcggtaacggtgaccatggtgttgttgaaggaagaacggatgtgaaccgcaccggcgggtacgttcttcttttcgcgcttgcggcgcacagtcttctttacgttagccattctgaatctccctccttacttcttcttgttggcaatggtcttcttgggacccttgcgggtgcgtgcgttggtcttgctgcgctggccgcgcacgggcaggcccttgcggtggcgggtgccgcggtagcagccgatctcaatcaaacgcttgatatccagggcgttgttgcggcgcaggtcgccctccaccatatagcccttatcgatcgcctcgcgcagcttggcctcttcctcgtcggtcaggtccttcacgcgggtgtcggggttgatgcctgtctgcgcaagaatgtcatttgcgctctttctgccaataccgtagatgtaagtgagtccgatctcgactcgcttctccttgggcaggtcaatgccggcaatacgtgccatactttttaagcacctccaataattagttagccctgtctctgcttatgcttggggttttcgcagatcaccatcacgcgacctttgcggcgaataaccttgcacttttcgcacatgggcttaacggacggtcttactttcatgtcaataaacctcctgttacttgcttcgccaggtaatccgaccacgagtcaggtcgtagggagacatctccaccgtaaccttatcaccgggcagaatcctgataaaattcatccggagctttccggatatgtgcgccaaaatcgtgtgtccgttcccgatatccacctggaacgtcgtattcggcagcgattcgagaaccacgccttctacttcgatcatgtcgtcttttgccaagcgtatccctcctggtcaagataaccttccccgctgcgcggggcatgttgcggaacgcgttgtgccgttcctgttttttcctgcgcgctcaggcgcacctgagcgcgcagatctgctgatcccattacagtttccatccgtactcttcccagctggcgtccagcgcggtcagaatctccggctttccgtcggtgatgcagattgtgttttcataatgcgccgcccacttgccgtcctgggttttcaccgtccatccgtccggcaggacctggatggcggcgccgcctgcgttgaccatcggctcgatggccagcgtcatgccgcgcagcaggcgcggcccgcggccgggaacaccgtagttggggatctccggggactcgtgcatttttgtgccgatgccgtgacccacatactcccgcacaatggagaaaccgttgtcctccacatattgctggatggcggcggaaacgtcgcccagtcggtgcccttcggtggcttgggcaatgccttcaaaaaagctttgccgggtcacatcgatcaggcgctgcgcttcttcggagatcttcccgcaggggaaggtagcgcagcagtcgccgtggtatccgccaaggaacgcgcccacgtcgatgctgacgatatcgccctcctgcagcacccgctttccgggaatgccgtggataacttcatcgttcaccgacgcacagacgctggccggaaacccgttgtagttcaaaaacgacgggaccgcgccctgtgcacagataaaatcgtgtaccgcccggtcaatctcctgtgtcgttatgccgggacggatcatggcgcctgccagagcgcgcgcggcagaggtcagtctgccggcgcggcgcatggcctcgatctcatggggcgatttcagcgtaatcatacgttctgccccaatgcttccagaatcttctgggtcgtgccctccacggttgcctggttgaatatttccttcaggttaccctttttggcataatattctttcagcggctccgtttcgcggtgatagacctccaggcgggaagccaccgtcttgggcgcatcgtctgcccgctgaaccagcgtgccgccgcaggcgtcgcaaacgccttccacttttggcggaatcgccacaacatggtagctggcgccgcacttctcgcagacgcggcgtccgctcatccgctgcaggatctcctcgtcggagatctccaggttgatcacagcgtcaaaaacgatgccggccttgtccagcgcttcagcctgggcaatggtccggggcacaccgtcaaggatatagccctttttgcagtcttccgcctgcagacgttcgttaatgatgccaatgatgacctcgtccggaaccaggtggccgtgatccatatattccttggcctttaacccgatcggcgtcccgtccttaacggcggcacgcaggatattgcctgtagaaatcgtggggatacccagcttctggttcaggatggccgcctgggtgcctttacctgcaccgggcgcacctaacatgatcagattcatcatgttcttcacaccttcttattcaaggaaacccttgtactggcgggccagcatctgattttccagcgccttgatcgtttccagcgcaacgccgacaacgatgatgacggaggtgccgccgatggcgagacccgaaatgctgatgaacttactggcaaccagcggagcgattgccacaatgcccagatagatcgcaccaaacagcgtaatacgggagagcaccttggcgatgaaatccgccgtcggcttgcccggacggaagccggggataaagccgccgttgcgcttgaggttgttggcgatctcggtaggattgaactgaatggtcgcatagaaatagctgaagccaatgatcatcaggaagtaagccagcatatacagcaccgacttggtgtcgatggcttggatgaaaccataccagaagctgccttcctgcggagcaggcaggaacgcggcaatggtagccggcagcatggcgatggactgcgcaaaaatgatgggcagcacaccggacatgttgaccttcacgggcagcgttgtactctggccaccgtacatcttgcggcccacctgacgcttggcatactgcacgggaatacggcgctcggcgttgtaaacgtgcgtgatcagaacgatcagcgccagcagacccaccagaatgcccacgataccaggcacgcccagcacctcgcggttgctgtacatcgtgccgataccggcggggatgcgggaaatgatggaggcaaacaggatgatggagataccgttgccgataccgaattccgtaatctgctcgcccagccacatgatgaacgcagaaccggccacgaaggtgacgatgatcacgaacgcagcggcgatgctgtcgttggtcaggatattatactggttgcgcatcagcatatagtaggcaaagccctgaatcaggccgatacccaccgtggtataacgggtgatactggcgattttcttgcggccttcctcaccttcctcccgggccatgcgctccagcgcagggatggccacagtcagcagctgaatgatgatggatgcgttgatataggg

SEQ ID NO: 956 - DNA, 21748 bp, Unknown
  16S sequences of unknown bacteria
aaggttttggaggtttcaggaaccttttttcaaaaggttcctgagtccgttccctccgtttcctctccctccccgaagcgggtttcgatcaagcgggggcagcattcgggggaatatctccattccgagatatgcggtgtgcggtcgggatcgacgaagtaccgcagcggcggtcttgtctctatctgtgccgccgtatctatgatgataagttttattttcatcctttcggggataatacttttgatgtagaccgcgcagtgcttgccgggtgcggctccgtcgcgcagctccgcaagcccgcagagattcggcatcagctcgacgaacacgccgtattcctcgaccgatctcaccgttcccgtgaccgtctgcgccggactgaacagcgcggcgttctcctcccatgtgccgagcagctcacgcaggctcatatatatgcgcgatccgttatccccgacgtccctgaccgccgcccacagcttctcgccgacggcaacgcgctctctcggatgggatatccgcgataccgaaagcgtatccacggtcatgagtgcgacaagcccgcatcctatatcaacgaacgcgccgaagctttcgagatgcgtcacgcgcacggggattatgtcccccggtacaaggcgcgacacccgatcctcaaagcacctcttctgcgcctgcgcacgcgacagcatcgctgccgtccgcccgtcggcgtcggtgaaaaatcccgtcacggtaaacgcaaccgcgtgtccgacccgcgttatcaccgcgatatccttgatctcctccccggcgggggaatacgctgcgctgtcgcgctttatgtatccgttcattcctccgaggtccaccgtgagcgtcatttcggtacagtcgcacttcacggcgagcgcttcaagtatccgcccctcgcgcattgcgcgttcgagcatttcgcgcgacgatatgtactcggtattctgcggcgtgccgaaaagcccgccctccgggagatagcttttgtccgtcattttggtttttcctttcggtttttatttttcttgtaaatcatatgaaacgtgtcccctgataattccttatatcctgcaagttgattcggcttttacataagatttttaccgccgccgggcggaaaggagatgctatgagagaaaagtcaaagtccgtcaaaagatccccccgcaccgttcttgcggaggtcgttacggtaattttcgcttctgtactgttcggaatatcgatgaacgcttttcttgttcattcgggtctgattataggcggtgcgaccggtattgcaaccgtggtgaactatctgttccgcattccgatcggtatcgtcgttatcgcggtaaaccttccgcttctgataatcaacgtccggcaaaacggcattcgttcaatgatgaaaacgataatcggaactgtcgtttcctccgttgcgatcgacgtgttctcgtttgtcccggcgatgtccgacgatatgctgctgtgcgcgcttgccggcggcggcggaatgggcgtcggcgcggggatcatgttcatccgcggctttacgacgggcggcggcgacctgtgtgcgtcgatgataaacaggcgcgcgccgcgcttctctccggggcgtctgatcctcataatcgatgcgaccataattgtggcggcggcgatcctaatgcggaaatatgagattctgatatactgtctcgcggcgtcggcatcgtacggtcttgccgtggatttcgtgataaacggcgcgttcatctgccgcagcgtattcattatatcggatatgcacgaagagatcgccgaccggatcatacacgagcttgaccgcggcgtgacggttctcgagggggagggctggtatacgaaggagccgcggaaggtgctgctctgcgttgtccgccgccgcgaggaattctcgctgcgaaagcttgtcgccgagattgatccgaatgcatttatcatactttcgtcgggcgccgaggtcatcggtcacggctttgaaagagaacggtaggaaaacgaacgcagaagaacggggttgggatgtttttgataatttaccggtttacgaatcctccgccccttcgggcatgcagtgccgagaacacgttctgccgaaagaatgccgtaattatctgatatttaacagagtaaaaattttgttaaaccgttgatttaatggcagaggtgcggtataatagttacggaaaggcttgttatgtaatttcctgcggcttccgccggagcgcaccttgcgtggctcatatatcatatataaagatatctttttctcgggaggtacaccatgagaagcaacgacaacgaaaaaacaatcacgttcacactcggctcaaacgacgaacgtgagatgaaaatgatcctctccgctgtctatgaggcgctgagcgaaaagggttacaatccggttcaccaaatagtcggatacatcctttccggggatcccacatacattacaaaccataaaaacgcgcgcagcctcatctgccgcatcgaccgcgacgagctcatgagcgcgcttgtccgtacatatctcgggatagaccgcaaatgacggtatatgatctgacaaaacatgccgagtgctcactgcccgaaaatacggcggtggcgctcggcaattttgacggtgttcacatagggcaccgccgcctgtttgatgcgctcgaaggggatttgccgaaggctgtattcaccttcaccgatcttcaccgagcctcgccgtgcgtcctgacggagaccgacgaaaagctttcgctgattgcctcctgcggagtggaatacgcaattctcaccccgtttgccgaggttcgcggcatgacgccggaggctttctgcgatttccttgcggacggtttgaagatttcccgcgcggtatgcggatacaatttcacgttcggagcgggcgccgccgggaaaagtgccgatctcgagcgccttctcaaggagcgctccgtcggctgcacggtgatcggtcccgtatcggtcgggggcgagaccgtatcttcaacaaaaatccgcgcgtttctcgccgacggcgaggtcggtcgcgccgccgagtttctcggacgcgattattccgtatcgttccccgtgatccacggcagggagctcggtcggacgatcgggattcccacggtaaatcaagtgttccccgacggtcacgttattccgaagcacggagtttatgccgtgcgcgcatacctcggcggcatggcttattccggagtatgcaacatcgggctccgtcccacggtgggggatcaacgcggtgtgactgcggagacacacatcatcgacttttccgggtggctttacggcgagacggtgagaatagaattcgtaagctatctccgacctgaggtgaagttccccacgctcgacgcgctgcgcgcacagatactgacggatatcgaaaaaacgaaagcgcttgtctgagtccgcgccggaacgcggcatgtcgacggcggcgctcccgagccgtccgcgctcggcggatgcgccgtattcaaaaccaaagatcacccccaaaagaaaggtggctttcgcccggcgaaagccgtatcggtgaaaaatgaaaagatttcttgccctgattttctccctgatcttcatcgcctcgctgtcgctcccttcgtttgcgatcgacaatccgcccgaggtcgaaaaatgtcagtccgcgtatctttattcgttcgcaaacaaccgcgtactgtatgaatacaatcccgaaaagagggtctaccccacttctacggtcaagataatgacggggcttctcgcgctcgagcattttgcgggagcgctcgacaccgaggtcaccgtcactaaggagatgctgtcaaaggtcaagggaaataagctctctccgtcgctcaccgccggggaggtcgtaacggtcgaacagatgctctacggatgtcttgtcggcggcgcaaatgatgccgcctatgttctcgcttatgcgacaagcggaaatgttgaatcctttataaccgatatgaacgcaaaggcggctctgatcggcgcgtattccacaaaatacacaaaccccaccggaatgcacgacgatgctatgtacacgacggcgcgcgacaccgcgcagattgcgatatacgcgcagaagaacgaggatttcgcacggatagtcaagaccccgaaatacgttatggagaaaacggatctgcgtcaataccgcgatatttacaaccgcaatgcgatgatctcgaaattttacgcggcgggatactacgacgagcgcgccgtgggcatcaacgcaggagccacctcgtccggcggatattgcacggtgcagatgatgacggacagcaaaacaaatctctcatatctcgctgttgtgatgggtgccgaggaaaacgaggcggagaagaaaatctattcatatgagaacgcaaaggcactgctcgattgggcgtttgcgtcgtttacatacacggaggttttgtcgacggataaggtcgtctgcgagattccggtttctctttcgtccgcagtggattatgtaacactgcagccgaaggagagcctgacggtatatctcccgtcagatgttgacttgaaaaccgatatcacaattcactacacaacgctttacgaaacgcttgccgcccccgtgaaatccggagatatcgcggggcaggtcacggttatgtacaacgacgaaatactcggcacggtcgatcttattacgacggcggacatatcacggagcgaattcctttatatgctgtcgcagattgaggaattcacgaaaagcaaggggtttatcgcctttgcggtcagcgcagtcgtgctgtcggtaggatatgtgctgatacaggcgtttcgccgcggacgcgccgctcgccgtctgtaaagtgccggctgcggctgtaagggtggcggccggaaccgtacggcggctgctcccgaggctgtgcggacgatttccttgctgtgccgcgcgggcggttgaagctgtacggtgtatgggctgatagaaacggtaatgcacgagcggctgaagctgtacggcagagcctcggcatggcgggctgacaattgcggtaagccggttgaccgagcgcaagcgcggacaattttcgcaccgcgacgtgacggaatgcgacgtgcgcaataccgtttccggactctccgccaccggcggacgggcagtgcatcacgtcgaacacctcccgcgcggcgcggtatttttatattttcaagaaaaaacgaaattgtacttgatttttctcttgctatgtggtataattctatggaattaaaagtgaataccgtttttactcggagaagtcgcgtagctggtcgagcgcgcacgattggaaatcgtgtaacccttaacggggttcgagagttcgaatctctccttctccgccataaaaagcgctctgttttcagagtgcttttttgcatactttatcggtaatttcggcgagtgcggggcgagcgtgcggactgcgtggaaaagcgggtgcggtgcgcctccgaagcgaaagaggtcgcgcggaccttccgccgaggcagaaaaagatatgagaaagcactcccggcgcggctgctccgatgcggggatttgtgacaaactccctcacatttcagtgtgtgcgctgctccggcgcggaaaaacatgcggcgcgtctgccgccgaaattccccgccgattcgcccggaagcttcgcaaaaaagcctgccgaatgcttcgccgccaaagctttaccgtaaaacagattcgccgcgaaaatgcggtacgatccgcaagtcaggaggaacatatgaatcccgttatccgaaaaatgcgcgaggacgacttcgatatgctgtatgcgctgctgtccgatcctgcggttatggcttatctcgagccgccgtacggcgaggagcagacaaggcgatttcttgaaagcgcggggctgtcggagccgccgctcatctgcgccgccgaggacgacggaaaattcatcggatatgtgatcctgcacggatacgacgaacacagcatggaggcggggtgggttctcctccccgaattccgggggcgcggatacgcttcggcgctgaccgatctgcttatcgccgaggcggagcgtaaagaaaaggaccttgtgatcgaatgcaacccggatcaaacggcaacaaagcatatcgccgcaaagaagggcttcacataccgcggatgcgacggcggacttgagatataccggcttgacctccggaaagcggacacggatcacgccgagtgagggtacggaatcgctcggcgggagagtttcggaaaggcggaaggtccgaaaacccgcgaaattcgagaatccgcagatcgtgacgcccggtgaaacacacgtaccgcgaaaacgtcttacatccgtcccccgaccctcggggattttttattatgtgctttctctcagcccgatcgcccgccgccgttgtgccttgacacctgttatgaaatatgttacaattaatacacataattaccgataaaatcgaacatcccgtccggcggaagcggaaaaatccgtctccgccgcttatgaaccgaaacaatacaacgaaaagaaaggacgctttcggatgccgaaagccgagatctgcaaaatgaaaaaaacgatagcccttgcgctcagcctctgcacgcttgcatcgtctcttatgtcatgctcctcctcagatgccggaaaatactctcccgaaatcaccgtatcgtcatcgaatgcggaggattatgcggtatggctgacgaaccgcctcggagacaagcttaccgacagcatctatcttgcgctcggaagcgatgcctcccgcggcatcgacatgacggattttgaaaacgacggatacatactgcgcaccgaaggcggcagtgtgaccgtcgcgggaaagaccgagaccggacttgacctcgccgtgcgcaggtatgcgaacgcggtcgaggcgggcaccgcgtctgagctcgacgcatcgtaccacgagggataccgcatcgaaaagcttatgctcgcggggcacgatatatccgaatacgcgatcgagtatcccgcagagcacaacgagaacatgctctatgccgtctcggagatgcagaggctcataaaaaaggcatgcggcgcagagcttgatgccgcgcagggaatctcggtcagagaatgcgcgatagaattccgccacagccgggacgatagcctgcgctatgacggataccgctacttctttgagggaagccgccttgtcatcgagggcgccgtcgagcgcggatgcatgtggggcgtgtggttcttcctcgaaaacgagctcggctgggaatgcataaactacggaaacagtctcctccgcgaagccgatctcatcgaggtgagcgccgactgcgaaaagaccgccgttccgtcgttcgactatttcgatccccacgtaacgtacggtatgaagacggacacggagcgctacaatccccggaagtcaatcgattcgaaatattcctacggcgcgatctcatacgcatgccacggaacccagatgaaaaaatggggcggctacaacacggtagattatcagctctgctacaccgacgagggtgtgttctacaatgtaaaggatgatatcatcgagcggaccgagaatgctcttgccgccggctcggtcatcggaaaggacctcaaatccgtcgatgtctcacagggtgacaacggcgactactgccactgcacggagtgcatgaaggtcttcaaggaagagggcggtgccatgtcgggctgcgttgtgcgctgggcgaacaggcttgaggaggagatttcggcagaggaaggcggaaaatacgacgggcttgtgtatcttatcttcgcgtacatgggaactcagccccactgcaggaccgcgccgaacgaaaacgtgtatcttacctttgcgatgaacggcacctgctccgcgcacggcatcaacagccgcaaatgcacatcgcgcggcccgcttggccctgtcacggagcagccgataataaacaacgacaacttcgccgaatggacgaagggctggtgcgatctttcggacaacatctacatctggtactacggacttgacacaagcgtacagcagtacacgataatcgacgcgttctttgacgatatgaaattcttcgcggaatgcggagccgccggagtgttcctacagtttgagacaaacgggctcggaatgcagcccgtatggggacagctcgcctacatgatgaattggaatcccgacatgacgcgcgaggaatacgatctcgctctcgagcatcttctgcagaaggattacggcgacggatacgggtacattctcgaatacctcgatatctggcaggaatcgcaggacaaaaacaactgctgggactgctgggaatatgcaagcatcctctcggacacatacgacacggaatactacgcggagaatttcgaccgctcggtataccttctcgagcgcgccgccgagcttgcgtcgagcaaggcgcagcagacgagatgcgagcttctgacggcacatatatattatgaaggatgctattcctcatatttcagggcatacgacaacggcgacaccgagcggatagaggttctttccgagcggtacgaccggataatgaagatactcgcggagaaccgtataaactacaagtggatgaacggcggtgccgccgcgattcagacgaatctcgaggattccgcatggctcgactggatcaaggtgcgcgacgagctcccgtgcggggatgttcggcgccccatgccggataagtattcaggctgaacggcgcgcggggcggaggggggcgtgctcacacccgatgcggaaaagcgggagaagcagcgcacatctgccgaagccgatcctcggcgcgggaacgcaggtacgcggaaaccgtccccgcgcgggaaagcgggcgagactgcgcgtccgacgcggaggcaaacggggggcacacggacactcccgcccggcgcagcggagcgatcgaggcggcgcggggaagcgggagaagatgtgaggcagcacaccgagcatagagatactgcatccgaaacgaaagcggacgggactgcgtgtccgacgcggcagacaaacaaggttgcgcgccccgtctccgagacagaagagatgtgagacggcaagcccggcgcgggaagcgcagacggacgaaggagaacgtacattcgcgcaaatacggtgatccagccgcggcaagccccgctgcgggaacgtgaagtgcctcccccgccgaagaggcggtgaggcgaacactgcgagaacgggcgaggatgcgtgttcgatgtgatatgggtgttttccggaattcgaagtcggaacgtccgccgagcacggcgacagggtgttttccggactcccaaaacgatttacgttgttaaaacaacggaattcgaagtcggaacgtccgccgagcacggcgacagggtgttttccggatttcgaaaacgatttacgttgttaaaacaacggaattcgaagtcggcgcgttcgccgagcacggcgacatggtatttcccggactcccaaaacgatttacgttgttaaaacaacggaattcgaagtcggcgcgttcgccgagtgcggcgacagggtgttttccggctttcgaaaatgatttacgttattaaaacaacggaattcgaagtcggcgcgttcgccgagcacggcgacatggtatttcccggactcccaaaacgatttacgttgttaaaacaacggaattcgaagtcggcgcgttcgccgagtgcggcgacagggtgttttccggctttcgaaaatgatttacgttattaaaacaacggaattcgaagtcggcgcgttcgccgagcacggcgacatggtatttcccggactcccaaaacgatttacgttgttaaaacaacggaattcgaagtcggcgcgttcgccgagtgcggcgacagggtgttttccggctttcgaaaatgatttacgttattaaaacaacggaattgcattaatatgccgctgtttagggcgtttcccgaccgccgtgtcagggaaacgccttttcattatctgcgcggctttttctccgtctgccgaacggatcgcctgcgccgagtaaaaccgtccgccgccgcgcatcgcacggataatttcgtctcgctaaagccgaattccgttgttttaacaacgcaaatcacaaaataatttgcagaaatacccgcccctctccatctgcggcgtgaaaacggcaggttttccgcatatccgggaacggacattatcgcccgacgcgggaacaggcaaaacagcgtgaggcgagagcgccgccggatcgatgcgaacgtatattcgtgcacatacggcaagcccggcgcggctgctgccggacggagggatttggctgtccgtcccttcgcccgacgcgggaatgcgtccgcgggaacctgcggcatccgtctttcccgacgctgtgccgccggggacatgggcggcgtatcccgccgcaaattctcccgtccgcctcgccgctcctcggcaggacgacggaaaatccgaaaaaaccgcccgcagctattgacaagcggtgattttttgtgatataatgattctacctcacgcggggaggtcttttttctgtgcactaaagtgcggaaaacgccccgcttatgcgagggaggcacggttagtataccgtattcacggggaaacccgaattttcaaggaggtgccgaaacatgagagtaaagatcactctcgcctgcagcgaatgcaagcagcgtaactacgatacgaagaagaacaagaaaaacgatcccgacagactcgagatgaataagtattgccgcttctgccgtaagcatacgcttcacaaggaaaccaaataaggtgaaaggagcaaatgatggctgacatcgaaaagaatgtccgtaccgaagaaggtaccgacgccaaagagcttcccaaaaagaagtccgctgacaaagctgacaaaaaagcaaagaaaagcgataagcctgcgctccgtacccgcatgggagcatggtttaaagcgttcaagtccgagttcggaaagatcgtctggacttccccgcgcgcagtgctcatgaataccgccatggtgcttgtcaccgttgcgatcgtcgcggcggtaatcggtctgctcgactacgttttctcaaccacaatcgtcggtctgagccgtattatctgagaaaatgagcgatttcaacgagcagaacgtcggagcaagatggtatgtcgcgcatacctactccggctatgaaaacaaagtcaagatgaatctcgaaaagatcatcgagaaccgtaacctttctcatcttatcttcgacatccgcatcccgacggagaccattgtggaatcaaacggcggtgaggaaaaggagatcgaggagaaaatatttcccgcgtatgtccttattaaaatgattatgacggacgaaagctggcacgttgtgcgcaacattcgcggcgtgacgggctttgtcggtccgggatcaaagcccgttccgctctccgacgaggaagcggaggctatcatcagcgaaagccgcacttcacagaaggaatcgacgctcaaggtcggcgatgctgtcgatatcgtcgagggcatcttcgcggattacagcggtcgtctcgatgagatctcacccgacggaaacgaagtcaccgttatcgtatcgacggtcggacgcgacatgccgatcaagctcgatatgaagcagatcagaaagaaaaaggacgactgatcttcgggatgccgccccggtaaaacggcatttgtgggagggagaaaatttttcattctcccgtcataaaccacgaccgcgcaagctctgcgcgaaagaaaggatttttgaaaatggcaaagaaaataatcggctatatcaagcttcagctccccgcgggcaaggcaactcccgctcctcccgtgggacctgctctcggtgcgtacggtgtgccgatcccgaacttcaccaaagagttcaacgagcgcaccaagaatgacatgggtcttatcatccccgttgtcatcaccgtttacgccgatcactccttctccttcatcaccaagactccgcccgccgccgttcttataaagaaggcttgcggaatcgagaccgcttcgggtactccgaacaagacgaaggttgcgacgatcaccaaggcgcagatcgaagagatcgcaaagacgaagatgcccgacctcaatgcgggcagccttgagaccgcaatgagcatgatcgcaggtacggcacgctccatgggcgttaccgttgccgactgaggagggtttgacagatgaaattcggtaagaaatacactgacagcgttaagctgatcgatacttcaaagctttacgacgcaggcgaggcaatcgatctcgtttgccagacctccaaggctaagttcgacgagacgatcgagcttcacatccgcctcggcgttgactcccgtcacgcagaccagcaggtccgcggtgcggtcgttctcccgaacggaaccggtaagaccgtccgcactctcgtatttgcgaagggtgatgccgcaaaggctgctgccgaggcaggcgccgactatgtcggcgaggctgacctcgcagagaagatccagaaggaaaactggttcgacttcgatgttgttatcgcaactcccgacatgatgggcgttatcggacgtctcggtaagatcctcggacctaagggactcatgccgaacccgaaggcaggcaccgttaccatggatgttgcgcgtgcggtaaacgaggctaaggcaggtaagattgagtaccgtctcgacaagacgaacatcatccactgcccgatcggcaaggcttccttcggcaaggataagcttcaggaaaactttgacacgttggtgggcgccgtcatcaaggcaagaccggctgctcagaagggtcagtacatcaagagctgcgtcatcgcttccacgatgggccccggaatcaagatcaacggttccaagctcggctgataggctgataaatcgaataacaacaaaaggaaccgtctccggacggttccttttatattaggaagaagtactccggggccccccctttacaaaaagtggctttccccggaccccatgcgaggacgatgcgggacgcgagagaacgatgcggggaacgatgcggggaacgatgcggggaacgatgcggggaacgatgcgggacctttttgaaaaaaggtccctgcacccccaaaaacttttgaactgaatgggatcgggggtaaagctttctttcggaagaatgcttaaattcggaggatagcttgtaagttttgctgtacttcacagacacaggtttcacgttggagattagcgccgtacaaagtcagtcctacgttggaaaacggagcaccgctccgtttccggggacatggtaagtgagcgtacaagttaggctatacgttataccgtgtcctattctcgcggacacggtaagtaaacgtgcaattacagctttatgtaatccgtgttcaatctcagtcccacgttggagaatggcgccgtacaaagtcagtcctacgttggaaaacggagcaccgctccgttttcggggacacggtaagtaaaactgcaattacagctttatgtaatccgtgtcctgttttcgcgcaaagcaacaccgcgaagcggatctccgcttcgcggtgcaagtgattcgatatgttttttatcagccgtttacgttgtagttctcgctgagcatattcatagcggtaaaaagcttattgaagaaaatgaacggtcctacaacaatcagagaaccgaccacgttccaaagccaataatccgatgctccgaaactgtaatttattcctctgcgtccgagctctgcaccgatacgcgccgaaagtttatgataccaaacgagagtggcgattccgcaagtaatcggaccgacgatgaaaatgagaagacaataatgcatcgttttctttccgtcatatctgcctgctatcagattgatatcattgcttatcgaggacatgacgacaattccgtaaatgccgaaggtgataagagagagaagaatgaactttaaaaggcttctgtttgtcttgagctgtgccggaggctgtgccgcggttccgggagctgtctgcatctgttggttcatgagagatcctccttgttcttcattcgtcatgaagtaaaaatacccgcttgatttgatactccgatagcgaatgttattttttcgcacgataatatcggcaggctttaataaattatatcattatgtattatatatgtcaatatttttcatttattttgaacgtggcctcggataattttgttgtatatcacaatcttttctctgtttattttgtgcgtaatgtacaaaataccgtatcaagcttcccgcaagacaaaaaaaccggcgagatctcttccgaaaaaaatcctgtttccccgctctttcggacaaatgccctccggcgcggccctttccgtactatagcaggacaacatacatgcgccgatcgtttttgcaagaaatttaagtccaaacatttccggaaaacggaaccttcaaaaaggtaatcttcacttcggataaaatcgcaaagcccgtctcacggaaatacgttaaacgaacattcgctttctccgtaatgttatcccgtgttctgtcctcaaacatcagttttcataaaaagaccttcttcgcaggcttttttcttcttttttggtgttgttgcacaaaaaccatcgtgaatattctacgttctcacggcatattttttaaaaagcccttgaaattttcttcgccccatggtatacttgaataagtaactcgccgtttgaatgcggtaatttataaatattatataaaggagattctcacaatggcagatttcaacaccaaagtcatccgtaacgtatgcttgcttggtcacggcggaagcggcaagacctcactcgccgaggcaatgctgtattccgctaaagcttgcgaccgcctcggcaaggttcccgaaggaaacaccgtatgcgactacgacgccgaagagataaagcgcggcttttccgtcggactttcgattgcatcgttcccctggaacaccgtcaagatcaatctgctcgacacccccggcacgcttgatttcgagggtgaagtgagaagcggcatccgtgccgcagacgctgccgtcatcgtcatcgacggcaaatccggcgtcgaggtcggcgccgagctcgcatgggatctcgccacggaggcaaaggttccccgcgcattcttcatcaacaaatacgacgacgccgaagcaagcttcgagcgtgtattcaacgcactgcgcgaccgtttcgggatccagctttgtccggctctcgttccggtcaagagaaacggaaaattcgagctcattgatctcgtatcgatgaagctttacaacttcgatgagaagggcacgcgaagcgaagccgagctcaccgaggaatacataaagatcgccgacaagtacaaggacgctctcaacgaggcgatcgcaggaacgaatgacgagctcatggagaaatacttcgcgggtgaggagatctccaccgaggagagcactctcgcgctccatgagggcataatatccggcgacatcgttcccgtttactgcggaagcgcggctaaactctggggcatccgcgcgctgctcgacgcgattgaaggatcgttcccgcgccacaccgcgaagaaaaacgaaaccgtgatcgagaacggcgaagaaaagccgtatccgatcgatcccgaaggcgaatgctccgtattcgtgttcaaaacggtatcggatcagttcggaaagcagacgtacttcaaggtaatgtcgggcacgctccgccgcgacatgacgcttaaaaattccgcgagcggaagcgaagagaagatggctcatttctactcgccctgcggaaagaagcagaccgaatacgaagtgatgcacgccggtgacatcggtgttatatcgaagctcggacgcaccgcgacgaatgacacgctttcgcagtccggcacgctcaccttcaggaagatcgatttcccggagccgtacatggcgaaatccgtcgtcgcatccggcaagggagacgaggacaaggtcgccgcgtcgatactgaagctgaccgacgaggatccgacgctgaaattcgaaaacaacgccgagacgaagcagatgctgatctacggcatgggcgatatgcagcttgacgtggcggtttcgcgcctgaagtcgcgctacggcgtgaccgtgcagaccggcgagcccgagatcgcttaccgcgagacgataaagaagcgcgtacaggtcgaaggaaagcacaagaagcagtccggcggttccggacagtacggacacgtcaagatcacgttctctcccggagaggcggaaggtctgaccttcacgcagagcgtcgtcggcggaaacgtgccgaagggatactaccccgcagtcgagaagggacttctcgaggctatgcaggagggtgttctcgcgggatatcccgtggttaatctcgccgccgatctctacgacggatcgtatcatccggtcgattcgaacgagatctcgttcaagcttgccgcgcggcttgcgtacaaggaaggtctgccgaaggcggatccgatcctgctcgagcctgtcggaaagctcaacgtcaccgtgccggatgcgctcgtgggcgatgtgatcggcgacctcaacaagaggcgcggccgcgtgctcggtatgaatcccgccgaaggcaagagcggattcaccgtagtcgaggcggacgttccgaaatcggagatgacggattacgttatcgcactgcgcgcaatgtcgcagggacgcgcgcgctttacgttcaaggtagagcgctacgaggaagtgcccggaaacatcgcgcagaagataatcgccgcccgcgcgaaataaaggaaatacggacaggggaagtcttacggcttcccctgtttttattatatgtgcgaggtgaggcgcaccgctccgttttccggcataagcccgacattgcgctgcgctaaactccggcgtgaaacccctgcgcggggtcgccccgcgggcgaaaggacacggattacataagtctataactgtacgtcaacttaccgtgtccgcgagaataggacacggtataatgtataaccgaccttgtacgttcacttaccatgtccccgaaaacggagctacgctccgttttccaacatgagcccgaaaatacatggcattctccgaatgccatgtaaggcgcttgacatattgggacttcgtcccaaacccaagcggggactccgtcccctgcaccccgggcggggacgcccccgcaggcgttctgttaagtgcagcgaaaatttacaagctaccttccgagagaaagtcctgccccaatacccttcagtttaaaagtttttgggggtgtgggaccttttttcaaaaaggtccccgcatcgttcccccgaaggggcccgggtaaatccccctttttttaaaaaggggtttccccggtttattcctattccgttctcccgcatcccgagcctcggtacttttactccttgaccccgtattcattcattccgataaatcccgagagaccgcgaagcagatttcccttcgcgtctgtccaatcggtctcggctgcctccttcgcggtctttgcgtatccgcccgaggtggtcgaatcccacgtcgtgatccaatatcccgcacggaacggcgcgtacacgtcgtcgccgcacggattgtatccgagccttctcagccgatccatcgcggtcgcgtagtatccctcgagcgtgttcatgagcgccgtatccccggcagcctccgcgcggtagtaccttgtatacacggtggtatagtaaatgtggcagctgagcatctccgcgcgcttctgctgaagctcgctcgatgcaaggcggatcgcctcctcgacgagagagatcatctcgccgctgtgggtatcgtagtagtacgggtcaatgcggttgtcccacatggctttgtttccgccgattgcgtgccagcaggcattcgtgcgtctcgtatcctgtgccttcgtccacatcgttatgtagtcgcgcacgcagtcccagccctcgccgtactccttctcgagaagctcgcacataagcgcttcgtactcctcatcggtcatatccgggcgccaattcagctccgcgagaagctgataccgtatctgctccactccgaagccctcggtatccgcgttatagaacacgcccttcactccgcattcgcggaaaaagcggaagtcgcggagaagaacgtcgtcaacgacgttatactgaagcagatgctgcggaaggtagtaatgccatacatacacattctccgtcaggtcgagccatccgcgaagccacgatgcataatccttattattcacgcccgcagccgtttttccggtgcagagcgagccgtctgccggatgcgcggtacagcaaagatcggtgcagaacgtaacatgcacatactcggaaaccgtcattctcttcggcggagcgttatttccccaatatgcgaaaatctgataatatatccccggatattcctcgttcagctcctccgacagtcggttcgcaaaatcgaccacggcgccggaattgcttccggtctttgagaacatagcggtgcagtccttgcacttgcagaaatcggggttgtcactctgtgcaatatcaagcgagagaatatcgacgccgggcacatttcccgaggcaaccttcgccgcgagataatcggcgatattatctctgacagatgcgtatgtatcctcgtttgtatagcatatctgactgcccgaaaactcctcatctacccacctgctcatcccgtggctcggctgcgagatcgaagggtacatgctgcgcagcgtttcgggatcgggtacgtcgctgtcgaagagctcatcatattcgtagtgcatccaaaggcggaagaaatcgaacgcgggagtctccgccgccgccgtatccgcgggaatatcgaggtgatcgctctcctcaaggagatcgtcaccgaaggtgagctgcttccaaccgcattcgttccggaggaagcggtacacgccgtagatgctgccgcgcttgttcgagctttcgatcacgagccgccggtcttcgaagaagtagcggtatccgtcctcggagagagactcgtcgtcggaaatgcggaattcgatcgcgcactcccttttcgtgatcccctctgcggcggaaagctccgctccgcaagcctccttaagcttcgactgaagctcggacacggcaaagcgcattccgcgtcccgccgcggcgggatattcgatcgcgtattccgaaatatcgcgtcccgcaaaggtgaggctctctatgcggcatccctcgtgatacaccgtatcaaacgaggtcggcgcaccctgctcgacggcgcgggcgtacttgcgggctgcgatgtcaagtccgaccgcggttttcgccgcgattactacgctgtcgccgtcgctccgcaggaagtatccgtcgtcctcgaaattttccgtatcgatcccgcgtgaggcatcgtttccgaccgaaaggtacagctcatcggtgaggctttcgccgaggcgctccgtcagccagacggcggccgactccgcgccgctcgacgaaacggtgatcttcggtgagtaagcctccgacctgctcggagcgcaggacgaggcggctgccgccgtcactatgagcgccgccgcgagtgccgaaaatcttcttatccggatcattcgttatttcctttctcaatagaaatacctttacccccattctatcatacccgtcttttcaagtcaaggaaaagtattttcttttccccgccgccgcacggagcacttatttctgcgagggacgcgctctgcggcggttttttcgtataacggcgcctatttcgcaagttttccattgacagaagggcaaaaagagtatataataatgatgtatttggatttaaggtactgctttttgccgtacttttcatattcaaccgaatatttcatggaggtgctgttatgccgtatattattactgcggtcataactcttttagtggcgcttccgctgggtatttttgtcggaattgcttaccgccgtcgcattgccgaggcggaaatcggttccgcggaagaacaggctaaaaaaattcttgaagacggaattaaggcagcggaaacaaagaaaaaagaggctttgatcgaagcgaaggaagaaatccttcaagcaaagaacgacttcgaccgcgaagtcaaggacagacgcaacgagctttcccatcaggaacgccgcgttaccgcaaaggaagaatcgctcgaccgcaagagtgacaatctcgagaaaaaggaagagcagctcgcaaagaagatacgcgagaacgaagaactgaacgaaagcatcaaaaagcttgctgcaaaggaggaggaaaagcttcaggagatctccggcatgaccgccgagcaggcgaaagcggagcttgtggaaaagctcgcgtcggagatacgtcacgagcaggcaatgaagcttgccgagctggagacggatttcaaggacgaggcggagcgccgcgcccgcgatatcatatctctggcgatacagagatgcgcggcggatcacgttgcggagaccacggtttccgtcgttccgcttccgagcgaggacatgaagggacgcatcatcggacgcgagggacgaaacatccgcacgatagagactctcacgggagtcgatctgataatcgacgacacgcccgaggcgatcacgctttccggattcgatccggtacgccgcgaggtcgcgcgcattgcgcttgagaaactgatctccgacggacgcatccatccgacgcgcatcgaggagatggtcgagaaggcgaagcgcgaggttgacacggcgatcaagcaggcgggcgagcaggcgacattcgagaccggcgttcacgggctgtctcccgagcttatcaagctgctcggacggctcaagtaccgcacaagctacggtcagaacgtgctcaagcattcgatcgaggtatcgatgctctccggaatcattgcggatgagctcggtgtggattccacgcttgcaaagcgcgcgggacttctccacgacatcggcaaggcgctgactcaggaggtcgagggatcgcacgttcagctcggtgtggacattgcacgcaagtataaagagaaccgcgaggtcatccatgcgatcgaggcgcaccacggcgatgtggaggcgcagaccgtgacggcggtgatcgtccgtgcggcggatgccgtttcggcggcgcgccccggtgcaagacgcgagaatttggaaaattacataaagcgtctgaagaagctcgaggatatctcgaaggaattcgacggcgtcgagaacgcatacgcaatccaggcgggacgcgaggtccgcataatgatcaagccggaagtgatcggagacgaggatatgaagctcgtcgctcacgagatcgtgaagaagatcgaatcggagctggagtatcccggacagatcaaggtaaacctgatacgcgaaagccgcgccgtggactacgcaaaataaaacaaaatctccgcgagaatctcgcggagattttttgatgtgtgggagagaaccggggaaacccctttttacaaaaaggtgt

SEQ ID NO: 957 - DNA, 3042 bp, Unknown
  16S sequences of unknown bacteria
gttctcggctatgggctcgaccgcacggacgctgcggtccccgccggccatgcgctcttccacaccaggaggaacggcatcgtcgcgaaagggcgctacgacgagcgcacggggagtttcacggttctcgcaggctcgcagatcgacctctcccgtcccgttctcaagaacgttggcgccacggacgcgagacggaatgtcttcggagaagagtcggggattgccactctgcgagatgacatggtctttagcagcccaagctctgcggcggtgttcgttctcggaggaagccagaacggctggaccgaatgggtaaacgaggcgggcgagactctcgacaccgtctatagggggaagggaaaaaagacccgatgaacaagcagcagctagccgcccggatctgggcgtcggccaacgagatgcgctcgaagattgaggcgagcgaatacaaggactatatcctcggcttcatcttctacaagttcctctctgaccgcgaggagcagttcctgctcaagaacggctttgacggggagagcatggagacggtcagggaggacgaccccgagaccctctcctacgtgcagaacaacctgggatacttcatctcatacgacgatctctattcgacgtggcttgccaaaggctcagacttcgacgtctcagacgttcgagacgcgctttctgccttctcccgtctcattaagccgtcccataagaacgtgttcgacaagatcttcgacacccttgagaccgggctctcgaagctaggcgacacctccggcgcgcagaccaaggctatcggcgcgcttctgcagctcatccgcgatattccgatggacggcaaacaaggctacgacgtgctcggctacatctacgagtatttaatcagcaacttcgccgccaacgccggcaagaaggcaggcgagttctacaccccgcacgaggtctccgtcctcattgcccaaattgtggcacagaacctggcgggccgcggcgaggtcaccgtctacgacccgacctcggggtcgggctcgctgctcatcaccattggcgaagcggtcgcacggcagcagggctaccgcggctctatcaagtactatgcgcaggaactcaaggagaacacctacaacctgacacgcatgaacctcgtgatgcgcggcatcgcgccggacaacatcgcatgccgctgcggcgacacgctcgaggacgactggccgtggttcgaggagggacaccccgagtcctacgagccgctcttcgtggacgcggttgtctcgaacccgccgtactcccagcgctgggaccccgagggaaaagattctgacaggcgctttgacggctacggggtggctcccaagagcaaagcagattatgccttcctgctgcacgacctctatcatctgaaaccagacggcgtaatgtgcatcgtcctgccacatggcgtgctgtttcgtggcggcgaggaagagaaaatacgtactgcgctcgtggagaacgacaacatcgatgctatcatcgggcttcccgccaatatcttcttcggcacggggattcccacgattgtaatggtgctcaagaagcgtcggccgaccgacgatctgctcatcatcgatgcttcaaagggtttcgtgaaagacggcaagaacaacaggcttcgcgcctgcgacattcgtcgtattgttgatgcctgccgcagtcggaagagctccgaacgctattgccgcatagtctctaagcaagagattcgtgacaacggctacaacctcaacatcccacgctatgtggactcatccgagacgcctgagtcctgggacatctacgcgaccatgttcggcggaatccccatcggcgaggtcgatgcgcttagcctctactggaatgcgctgcccggtctgcgtgacgagctctttgaagaggcgggcggcgcgacgcttcgcctcaaatcaaaggacgtggaggagaccgtgaggaagagtcccgcggtgcgcgcgtaccttgactcctacgatgcgcgtttctccgacttcggccagtggctctacgacgagcttgtcgatgagccttctctcgtcaacctgcccaccgaagaggatgagctcgctcgagaggtcttcgacagactcgagggcgaggtgttggtagacccctatgacgccttccaggttctcgacgactcctggcaggacatcgaggccgacctcgaggttatccaaaccgagggttttgatgccgtagggaaagtcgaccccaatatggtgaccaagaaaaagagtgggaaagaagttgaggtgcaggatggctggcgcgggcgcgtgctgccattcggactcgtccagcacgagcttctcgccgatgacctgcgtgctctcgactctgtcggcgaccgcatgacggccatcgacggagagctctccgagattgttgaggagctcacggaggacgacaaggctgctcttggagaggcgctcaacgacgcgggcgatgcctttgtgacttccaagctgagaaagacggaaaaggagctgcgcgctgatggcgaccaggatgagcttgctgaccaagtcgagaaggctcggtccctgctcgatgagcagaagactgcgaagaaggagcagaaaagtctctcggcaaggttagaggtaagcaccaagagcaccatcgaagggctttccgaccaacgggcatgcgagcttctggatgccaagtggaatcgtcccatcaaggatggaatcgccgccctttctcgtgtcgaaattgacggcctcgttgacaggattaggagcctcacaaagaagtacgagacgacgtttgctgaagtggacgagcagattcgcacggaggagagtaatctggctcagatgctcgggcagcttacgggcaacgactctgacatggccggaattcatgagctcatggaccttctaggaggtgaggctcgatgagcggcaatgttccggctattcgcttcgccggattcactgaaccttgggaacagcgtaagttgggagacatcgccaccaaggtaacgaaaaagaactc

SEQ ID NO: 958 - DNA, 7447 bp, Unknown
  16S sequences of unknown bacteria
cctcgtcgagcaggagcaggtactgcgcgcccttcatgatgaccggcgtctggatgccgaacctgctgtgcagaaactcgcgggacttctcaccgaacggcaagaacgcctcgggcctcatccagtacagcgtgcgggtcaggcgcgccttggtgacgttttcctgaaggtggaccttgtcgaacagctcgcagaagcgcccggcggtctcggtgttggggttgtcggcgagctcgatcgcgacctttgccaaatcccagcagtcctgcgccgcctgctcggtgttgtcgaagtactgccacagctcgtggtttgccgtgggaatgccgatgaaatcggtgggcacgggcgcttcgacgttgagcgtgcgcatgatgctgcgtaccatgctgcgccggtcgacggcgatcatgccacggttgaacgcggtgaaaaacgtgaacgggtcgatggccgcgcggtcgtcggcgccggtgatgtcaacgtagagatcattgagtttttccgggttgtcctcgagctttatcacggcatccgcgatttccttgtaggcaggtatccacgaaaaacggttgtcagacacggtatccctccaaaatattccttgtcgcatatagattctaccgcgagttttctgtggtgaaactgttcgtaatgcattcgattgccagacggtgcccgggggctgctgctaagatgatcgtaaaacgaagcaatccccgagagctggaggaaccatggaactgcctcaggtcgcaagtctgcaggacaacgcacagtcggtcgttcgcgccgcccagtacgtggggagggccgcagacgagctccgcccgctcgtcgtgccggctgcgcgcactgccctcgagaaggtgcccggcgccgcgagctgcgccatcagccgcgtcaagcgcgtcacgccccagaccatccgcgagcactcgcttgcggccggcatcgtgggcggggtcctcgccgcgggtcttgcggcggcaacggtggctcatttcgtgcaccgccacaaggtcgcgcacacgtaccggctccaccgcaagcacgacgcgctggctgccgagcgccagcgcaccatcgaggcgacgctttccaaggcgacgtggcgctgcacggcagccgagttcgagcagcactttggcgaagacggcaaccccgcgctcgcgcaggtgagcggccctggctgctatgcgatcctcgccttcgaccccgagccgcaagacggcgacctcagcgcctaccgcgacgtctacgtcggcgcggcatccagcatggcgcaaggcgtgcacaagcagctctccggcgagggcaacctctacgtccacgccgacgtcgtctacgaccagccggtgtacgtgctcttcttcccgtgcgagggctaccagctctacgcgagcaaggagcgcctcatgaacgccctcggcgcggtcgagtcgtacaacaagatcgacgaagtcgctaacatcgactagccgcctgtcgcttcgttgccgcgggtgcgtctctagcgagagtcccgcatccgcaaaccacatacgcagtaccgagaaaaggatgatgatgtccagacaatctgcgcgcacgaaagaagaactgacgctgctggggaacaacggcaccgtctattcgcaagactacgatcccgacgttctcgagaccttcgagaacaagcaccaagaccacgactacatggtgacgtttcgctgccccgagttcacgacgctctgccccatcaccggtcagcctgactttgccacgctctacatcaactacgtgcccaacgtgaagatggtcgagagcaagagcctgaagctctacttgttcagcttccgcaaccacggcgatttccacgaggacgtcaccaacatcatcagagacgacctcgtcgcgctcatggaccccaagtacctggaagtccgtgggatgttctacccgcgcggcggcatctccatctaccccttcgcaaactacgcgaagccgggcagcggctacgagcagatcgcgtcgcagcgcatgttctcgcagctctccgaccttgattcgggtgacggcgcccgctagggcaggggcgtcaagatgtgcggacgcgtcaagctgctttcgtgggacgaggtcaggggcgtcgtcgagcacctcgagcacggaggcgccctggcgcctgaccccagctggcaagccagcctgtttgaccgcgccgatgcgcgccccaagtcgctgctcgccgtcgtgagcgacgaggggggcgcacttcgcgcgcggcgcatgtcgtggggctttcccgtgagctggcaggcgtctcccgtcttcaacacgcggctcgagtcggcgcttgccggcggcaacatgtgggagctcccgctgcgcgagcaccgctgcatcgttcccgtcgcggcttttttcgagaagggcagaaagggcgcgtcagactatgccttcagcaacggcggaccgctgcttttgggcggcgtgttcgaagacgggcactgctcgatcgtcacgacgcctcccaatgcggtggtcgcgcccgtccacgaccgcatgccgctggtcctttcgggcgatggcgcgcagcgctggctcgcgggggatatcgcctcgctcgccgagccctcccgcgtgccgcttgtccgcgtgcccgcttccgagctctctcagccctcgcttttctaggctgcccccctgcgcgccatgagacgagggccgttgccgtgtgccctgcgctatcccccgtggccgacttttccacaaatttgaacctgcagtcaaaaaatttcatttaaaactaaacagtcagtcaaaaaagtcatactattctcctcagtgaatgtttggagggagttgtatgtacaaatttggaaaagcggtcgtcaaactgcgcgttccaatcctcatcgtgggcattctcctgctgattccgtcgatattcgggtacctcaacacggggatcaactacgacatgctcacgtacctgcccaaggacatggacacggtagagggccaagacgtgctgctcaacgacttcggcaagggcgcgttctcgctcatcgtcaccgagggcatggacgacacccaagtcaagaacctcaccgacgagatcagagacgtcgaccacgtcgcggacgctatctcatacggagagatcgcctcggcgcagatccccgaccaggcggttccggccgagctgctggacaagctcaagaacggtgacgactcgctcatcgcggtcttcttcgacagcggcacgtccgccggctccacgatggatgccgtcgcccagattcgccagatatcggacaagaacgtgttcgtctcgggcatgagcgcccttgtgctcgacctgaaaaacctcgctgaggatgaggaggccaagtacgtcgccgtcgccgtcgcgtgcgcgctcgtcatcttgctgctgtgcaccgactcgttcctcgcgccgttcatcttccttatcagcatcgcgatggcgattctgtacaacctcggctccaacatcttcttgggcgagatttcctatatcacgaaggccctggccgcggtcctgcagcttgccgttaccatggactactcgatattcctctggaacagcttcgaggagaacctgagaaagtatcctggcgagcgcgggcgcattgccatgggctatgccatcgccgacacgctgacgtccatcttctcgtctgcgatgacggcgaccgcgggcttcttggccatgatcttcatgtcctacactctgggcgccgacctcggcatcgtcatggcgaaaggctgcatcttcggcctgatcgcgtccgtgaccatcctgccgtcgctcattctcaccttcgaaaagcccatgctcaagacgcaccataagcgcatcatccccgatgtgcccaagctcgcccatgccatcacgagcaagaaggccgtcgcggcgtttctggtcgtctttatcgtggtgctcattcccgctggctacggtttcatgaacaagccggtttactacgacttcaccaacatggtaacgggctccaacaacaacattcccgaggagaagatccagttccacacggcggaccagaagctcaagcaggtcttcaacgtctcgaccaccgagatggtcctgtgcgatgccgacatgagccaccccaaggccaaagagatgctcaagcgcatcaacgacgtcgagggcgtcgagtacgcgatcggctacgactcggtcaagggcggcctcgtgcccgaccagctgctcccgagcaagatcacgagctcgctcaagagcaacggccaccagctcatcatcatcaactcgcagtatcagccctcaaccgatgcggtcaatgcgcagtgtgacgagatccagtccatcatcaaggaatacgaccccaacgccacgctcatcggcgaggctcctgcgaccaaggacctcatcaacgtgaccgaccacgacttcgtggtggtcgacgcgatcgccgtcatcgcgatcctcgtcatcttgctgctcgtgttcagaagcgcgagcctgccgttcatcttggtcctcgtcatcgagttcgccatcatgatcaacctcggcttgccgtattacatgaacgactcgatggtgttcatcgcgccgatctgcatctcgaccatccagctcgggtcgaccgtcaactacgccatcttgctcacgacgcgctacaagcgggagcgcgcacgcggcgccgccaagcgcgagtccgtggagagggcgttcaggttctccttcccggccgttgtcacgagcggcgcgtcgttcttcgccgcgaccttcggcgtggcgatgtactccaagatgggcatcatcagctccctgtgcctgctcatggcacgcggcgcgttcgtcagcaccctgtcggttctgttcatgctgccggccatgctgatgctgttcgacaagctcatcatccacacgacctacggtttcaaggacctcaaggcaaagatgaaagaagagaagctggaacttactgctggcaaggaggcagagtaatgaagacgaagaaaaacgacgggctgaattgcgtggacgcgtattccaagcagaacgcgagccgtccgacgagggtattcaacactgcgggccttgccctggcgggtacggcgctgctcggcatgacggtcgcgttttccacggcgggcatcccggtgacgacggcctctgccgatgacgcgcagacgacgccgcaagagcaaggccagtcgacgacgagcacgctcgcgtactcgagcggcaaggccgcaacgcagaagagcgagaccgtctacgtgttccagaaggcagacggctcggtcaagaaccagaccgttagcaactcgctcaccaatggcaacggcgcccagctgctgcaggaccagaccgacctgaccgacatcgaaaacgtcgagggcgaccaggagttcacgcagtcttccgagggcacggtgtgggacgcgaaaggcagcgacatcagctaccgcggcacgaccaccaaagaggcaccagtcgacatcaaggtgagctaccagctcgatggtaaggacgtctcgcccgatgagatctcgggcaagaccgggcacgtcaagatccacatcgcctacacgaacaactccaggcagacggtcaacggccagacggtgtacacgccgttcctcgccatgacggggctcattttggacaacgacaacttcaccaacgtcacgaccgacaacgcgaaggtcatcgacgacggcgaccgccatctcatcgccggctacgcgatgcccggcctgaaggagtcgctcggcttggacgactcgatcgacctcgacatcccgagctccgtcgacatcgaggccgatgcgaccgacttcagcctggattccatgctcacgctggtctcgagcgacttctttggcgacgttgacgttgacaacctgaacgccggcaacatccaagaccagctcaaccagatgcaagacgccatgaaccagctcatcgacggcggcgccacgctcacggacgggctgcagcagctcagcacaggtgcggccagcctgaaagacggcgcgacgcaggtcgacgagggcgctgcgaccctaagtgataaattgggggacgccaaggcgggctctgccaaactcgcgggcggctcgagtcagctcgaggacggtctcaacaaggcgattgacggcgtgcagctcatcgccaacggcgacggcacgaaagacaatcccggcatcaaggggattgcgcatcagctgaagctgagcgcttctaacgatgcggcggagaagaagctggccggcgacaagcaggcggtcaacaccgctgccggcgacctccaaacggaccttgggcagctgcaaaacgacaatcagacgctcgtcgccacgctcacggagattatggacaacacgcccgacgcgaagacgaaggcatccctgcagggcgtcatctccagcctcaaggaccccacgacggcttccaacctcaagaagcatgagggtgatctgaaagacgcgctgcacaaattagacgaggataccacgaaaacgctcaccacagcgaagtctggagcgcaggatgccgccgacgggctcgaccagtatgtcgacgcgctcaccggcaccgcctccacgcagagctccgttgtaaccggactgaattccgccgtcgagggcgcacaagcgctcaatgccggcaccggccagctcgacacggggcttgctgccctgctcgctggctccaagacgctcgcgggcggtaccgcgcagctctccgatggcgcctcccagctcgccgacggcgcgcagcaggcggcagatggttccgtccaactttccgatggcctgcagcagttcaacgagcaggcggtccagaagatcgtcgacgccttctccggcaacctgggcagcttggccgacaagaccaaggccatcgtccaggccggcaagaactacaacaacttctgcggcatcacgtccggcaccgagggccatgtgaagttcatctacgagaccgacgcgatcaacaagaactagaggcggcgggctatggcactgggaacacgcggaaagaaggctgctgcgaccaagcggacgctgcttgacgccgccctcaacgtgatgtcacgcgagggctacgccgaggcgacgatcgaccagatcgccaaggaagccggtgtctcgaaagggcttgcctactaccacttcaagagcaaaggcgaaattgccaccgagatcttggaaaacggcatcaacgacctcatcgggcgcttcgtgcaggagacggagcgcgcgcaaagtggctcggacgccctcaagcgcatgctcgaggcttttgccgaggtcgtcgtcggcaactggcagtttgcccgcttctacctgtcggtcatctggcgcgaagggcgcgactggtccgacaagatccacgaggttgacacgcgcctcatcgcgatcatcgccgagcagttcg

SEQ ID NO: 959 - DNA, 2771 bp, Unknown
  16S sequences of unknown bacteria
ttttgctgggcctgccgtttcctgcgggaaaatatgtggacgagctttattatcgggcagatagtacgtcgtcttttcgtgtgaaagtgaatgaattgtacttttcgctttccggagtggaaaacaaagtgaaatcactgcgggaaatgggagaaacagaagcgaacattgcccgctttgcggtggatactgtggttggggcagtctatcgggtcacgaatgctgctaaaaaaatgtatcctggattgccggtgctctgttccggtggtgtggcgtcgaattctgtgctccgctctgtattgcaggatacggtgtttgcattgccggagtattcgcgggacaatgcgatgggcattgccgttttggcgcgccgcgtttgggaaagccgggaggcgcagcgatgagcggaagtgaaaaacacatttttggggtggctgaggtcaatcagttcatcaaaaccatgctggacggcgtgccggctctgcaggacctttatgtgcgcggcgagttgtccaattataaaatttacccttccgggcatcactattttacattgaaagatccggagggagtactgcgctgcgtcatgttccgttccagtgccgcgcatcttcgctttcggctggaaaacggtatgaaggtgatcgtgcggggacggattacggcatttgtgcgggacggacagtatcagctctactgcgatgccattacaccggaaggcgcaggcgacttggccgtggctttcgaacagctcaaggcgcggctgtatcaggaaggcctgtttgatgcgtcccataaaaaaccgctgcccccgtttccgcagcgtatcgccatcattacctctgggtccggagctgcggtacacgatatgctccggattcttcgccggcgttatccaatttgcaaagtgattgttttgccggtgcgcgtgcagggcgttgaagcggctccggagattgtaggcgcgattcgctatgccaaccgctggagggtggcggacctgattatcacaggccggggcggcggttccatggaagacttgtgggcctttaatgacgagcgggtggcccgcgccatttatgaatcggagcttccggtgatttccgctgtgggacatgaaccggatgtgaccatttccgattttgtagcggatgtgcgggcgtccacgccgtccaatgcggcggagatcgctgtgccggatgctgtggagctggcggcgcagctgtccggtgcccgtgcccacatgctccaagtgctccggcagagcctgcagctgcggcggcagaccttgcaaacgttttccgaaagccgtattctgcggaatcctgctgctgcggtgcaggataaacgcatggaactggacctgctccaccggaagcttacgggcctggcgcaggctgacctggcccgccggcgtcagcagtttgctgcgctggcagcatcgttggatgcactcagcccattgaaagttttgggaaggggctactctgtggcaaaggacacaacgggacagcttttgagaagtatagaacagacagaggtgggacaggcaatcaccgtcactttgggcgacggcagcctggactgcaccgtcgatggcatccggaagggagagaaggcataaaaatggcagaaaaaaaactgagttttgagcaatccattgagcgtttgcaggagattgtggccgttttggaaaaaggcgacgcgcccctggcggattctttgaaactgtttgaagagggaaccaggctggtatcttcctgtacagatctgctgggtaaagcggagcagaaagtggtccggctggtcaaaagcgccgacggaacgccgcgggaagagccgtttgacagcggggaggaagcataaatggcggatatgtttgctcaggaaatggaaatggcgcgagccatggtggaagcgcgcttggcagaatattttacggacagcggactggaagaggccatgcggtacagtttgatggcgggcggaaagcgcatccggccgattctgactatgaaattctgcgaagcggcgggcggaaccatggaagaggcgctggactttggatgtggtgtggaaatgctgcacacttactctttgattcacgatgatctgccctgcatggataacgacgatctgcgccggggccgtcctacttgccacaaagtttacggcgagtgcattgcgaccttggcgggcgacgcgctgcaggcagcggctttttctacggtgctttctgcgaagggaaactggagcgccggggagggagccgcgcgtgcgtacgccgcgcagatcctggcggaagcggccggggagcgcggcatgtgtctcggtcaatattttgataccattggagatggaaaaagccgcacggcggaagaactgacggagatcaacgatcacaaaaccggggcgttgctgcgtgctgcctgcataatgggcgtggcagcggccatggggcgccgggcggtggacgacagctgcatgaccgctgcccgggactatgccacatatctggggctcgcgtttcagatccgtgacgacatcctggatgtgactgccacggcagaagagcttggtaaacctatcggttcggatgcggcgaataagaaatccacttatgtggcgctgttgggccgcgatgagtgcgagcgccgtgtgctggattataccgagcgggcaaaagaggctctgaatacgggagaatggaaacaaaaaacagagtttttatgcacaatagcggataaattggccctgagacggcgctaaac

SEQ ID NO: 960 - DNA, 4285 bp, Unknown
  16S sequences of unknown bacteria
gctccattgcctactgcaccaacgagggcatcattgccggcgacggcaacggccgctttaaccccaccgacggcgtgacgggcctgcagtttgccaagatgctgctggtggctctgggctacgatccgaagatcgagggcctggtgggcaacagctgggccatcaacacctccaagctggctctgagcgacgatgccaacctgggcgacaaactggagagcgtgacgctgtcccagcccctgacccgtgaacaggctgcccagatggcgctgaatgcgtttaaggctcccctggtggagtacgagaacaagggtggcgacattgtgatcggtgacgttccgatcaacatcaacccttccaagtacaactttgtaaccacgacgctggccaagacccagaccatttccagccaaaagctgtctaactccaacgcctacaccgtggagtttgccgagcgttactgccaggatctgaagctggtcgccggcagcaccgatgcgtttgagcgtcccgcttccacctggaagtataagaacgctgaaattggcacctatgccgacgaagccgacctgacctatacggacgaaaccaagattggaaccatctacaccgatctgggtctgtctgatggtattgataacgcagatgttacgctgtatgtggatggccgcctgactgccttccccaatgatattgtgaagggcagccgcgttgaggttggcggcgagggcgttctgctggacgtttattatgacgacgaggctgacactctgactttggtcgaggtgaacacctatgtcggccaggtcgctgccgtgcgcgctgcgtccactaccacggatgcttatgtggttctggatgtgtccgacacgttcaccaatcccggcgtaaatgtcggcaactatgagaccactgactttgccaaggacgatattgtagcatatacgtattcttttaagagtggtgagaagtgcatcgagtccatggctctggcggaaaaggtcactggcacgatgagcacctacaccaccaccggttccgttaccgtgaacggcaccaagtatgaggctaataagaagtctgctgccaacattgccggctttgcttccactgtggacaagagcaaggacgtggatgtgtatctggacgcttacggctacggcctgtatgtggatgcagatacttccgtggagtatgctgtgattctggcttatgagaagggcaataccctggacaacggccgcgccaagctgctgtttaccgacggtacggcaaaggttgtcaatattgacaaaatcggtactgttgcagacaatttcgatagcctgaccggcgatcaaatcagtaagtgggatatcgtttcctacagtgtgaacagcgatgacgagtataatattcaactggcagctgatgcgaacgctggtaatcagggcggggcatttgagctgaagagcggctccaacacctacagcattgtttctggcaacaaagccaatatcagcagtgccaacaaggttactcattttgctgacggtgaaaccattctgttggtggccgataactccgatcccgataagatgacattcagcgcttacgagggcatttccgcatggcccaccatcaagcacaacggcggaaacgctggtgctgtgacggtgttcatggacagcaccagcagcggcgatcccgccacggtgatttttgtggaaaagaatgctaagatgagcatgtccagcgacaacaaggatgtcatctatgtaaagggcagcaatgtaggaaagtcctacaccaccgctctgggtgaatactatgagtatgacgctttcgtgaacggtacggagaccaccatcaagacggatacggcgcatcagttcaccaacgacgctctgatttacggcccgagatacaatgagaaagaaatcctgaccggttatgaagatatggtcgtactgagcaccactgctggtaatgacggcgacctgcgcaacgtggttggcaccggcgcggtgaagaacgaggttgtgaagctgggtggcacgccttatgcctataccagcgatgtgcaggtgtatttcgtcgacgtggacggcaacctgatcgccagtgacatcggcgccattaccgacgacgcggatgatctggtggcattcaaggtgaatgacgacggccgcctgaccgacgtttatgtgaagattgtcgacgctgctgagaatgtgaatccgggtgctggctctgtccgtatcctgaacatggtggaagacaacggcgacttcaaagtgaccgttgcgactacgaccactgtgactgcagacaagtggacactgagcatttatcagaatggcgtgaaggttggtgaaactgtcaatcagcccagcggcactttcaatgcaaacaccggctatggcctgactgctgacaacacttacggtgtgtctatttccggtacatacactgcggttctgaccatctacaacggtgctactgttgcagcaaccggtacggctgagttcacgatctgaatttttgacttacagttgcaaaaccgtatgtaagaaatcccgctccgatttttcggagcgggattttttctgctaatcagcgtttcagaccgtacagctggatattggaacctgccagaatgtgttcgctgctgctgtcaaaccagaggttcaacgtttcaatggcggaagcgctgccaaggcttgggcagcggtaacaggataccccgggcgccacattggcgatattggttgtgctcccagtctgcacaaaacagacgcagggtaattcaggcagaatgacgaattcacatactccgaaattttggcggttcgggtcgttcatcatgggcacgtttccgcaatgagaagtgttgttgcccacgctcggtgtgtagccggaagtccatccgttgatgtgaagatacacccattggtttgtatcgccctgcaaatggggatagaacagcagtttttgataacgtgtgatatcaatgctgctcaggtcaatgtcccagtgttggcacggcgctgccaacgtttcatccagcaggcgggtgtagcagcttctagccaaaatggcggtttcttccagcgctgtgtcaattttttggttgtcccggttaaaatcctcccgcagcacgcggtcggcggcgtcccattggtttaattgataattttttgtatacttcaagtcgatttctcctttatgtagtcgaattttggggcttttccgaaaaaaggccctacacttattgtgtagggcaaggcaaacgttgtatggctgcatacaacgtttggtgtttttcggaaaccatccgaaagtccgcggtgggatgcatagaagtgcggcttccagcataggatcaaacgaggtgagtgcgaacatgttgatccatacggtgctgcgcggcgaaagcctttattccatcgcccgggattatggggtgaatccggttcaaatggcggcggaaaacggattttccatggaagagccgctggtggtggggcaaacagttgtggtgcagttccccaaaaccgttcatattgtgcgggaaggagaaacgctttccgctgtggcgcagctgtatggtgttagcgtgatcacattgcagcgcaacaaccgctggctggaagggggcagccttcttcggccgggacaggttttggtgatcgagtatttcaacgagccgctgggccggtattctgtgggcggatacgcttacagcaccattgaacaagggcttctacgcagtgtgctgccttaccttaccaatgtgacgccgttcagttacggattgacagaggaaggaagtctgctggaattgtcggatgcggccatccggcagacggcggcggaatacggcgtgggcgtgctgctgcatttgtccactgtgacggagcagggaacattcagcaacgaacgctccagcagggtgttgggcgatgcggcgctgcagcggcggctggcggaagaggtgttgagaaccatccaggtgaaaggttatgccggcgtggacgtggattttgagtatcttccagcacaggagagcgaagcttatgccgcatttgtcgctttgctgcgcagtacgctgcagccttatggctatacggtgacggtggcgctctcgccaaagacttatgccgaccagccgggactgctgtatgagggccacaactatgcccttctgggagccgccgccgatttcgtgttccttatgacctatgaatgggggtatacctacggtccgccgatggcggtggcgccgctgccgaatgtacagacg

SEQ ID NO: 961 - DNA, 22345 bp, Unknown
  16S sequences of unknown bacteria
cgcccgccgattgttcggcggtggaacgggcaattttcggaggcgtcaaggtgatcgcttccgcacattttgccgagattgccgacgtcaagccgccgtttgcgggaatgttcgagcgctatgtgctgctgcaaacggaagagatcggcagaatcaagggaatttacgacgaaaatctaagggagataaatcggtgagtaacgtgctatgataaaatttattctcggcatggcaatcgtgtgttttacgagcttctgcggatatatacttgcgaaaaaatatcgccagcgaaaaaatttctttacgcaaatgaacgagtttaacgaacgttttttgagcgaaattgcatattaccgccgtcccgtgaaggattttgcggaaaaatatacctacaaaggggaatttgaagacttgctctgtgcgttcgtcgagtctttgggcggttcgggcaaagagcccgggcagcctccctccgaaaaggctctgccggcgttctcctttttgacaaaagatgaagtaggatttgtaaacgactattttctgatggtcggaaagggcgacagcgcctcgcagagcgcgtatttcacctcggtgaaaggcacgttgggcgactataagcgcaaaagcacggaggagtgcggcaaatacggcgatctgtatttgaagctcggctttttgtgcggactgatgatcctggtcatcatcatataaattatggatatttcaatactctttaaaatagccgccatcggcatcatcgtcaccgtcatctgtcagattttgaaaaaatccgaccgcgacgatattgccaccgtggtgagcatcgtgggcttgatactcgtcctgacggtcgtaatcagtatggtaggcgacctcttcggacaaatcaaacagatattcgacctaacttagccgccttgcggcaaaagaacggagatagggaaaaacaaagaaaaaggaaatacgaatatggagatctttaaaatcatcggcgtcgcctttgtcacggcgattacggcgatccttctgaaaagtacgaagcccgagctgtcctttgccgtcaccgtcacgggcgtgatcgttattctcgttttcgtagccgatatgctgcaaaatacggtgaatatcatatccacgatcgcatcgctgacggggatcgaaaacggactgatcaaaattcttttaaaaatcgtcggcgtggggtatctcaccgagttcagcgcgggaatcttaaacgacttcggcagcaatgccgtcgcggataaagtgatcctcggcggaaaactcaccattctcattctttctctgccaatcatcgaaagcgtcctcaacttgataagcggctttctggaactcatatgaccgcgcataaaaacggcttcttcggcgataaagacaatcggctgccgctgaggcgcggaaggggaaaacgcaggaaattcaaagtcgtcctcgccttcttctctttattcttttttgttctatttggtatgtcaggcatagcatttgcctatgcggaggaaagctcggacggaaaagaggaactcaaccagaatatcatagatcagatagataaactggacaccgaggaattgcagaaatacatcgattctttggggatcttctcggacgaaaacatcggagagcggcttttcgactacatacgcggggaaaaattcgattacggaagattcggggaacaaatactcggcgtattgttcgaagacgtgaagaatatgctgcccgcctttgcctgcatctgcgccgtggcgctcttgtgcgggatactttcctcggtcaagagcagctttgccgatcaatcctcggcggacatcatttttctggtggcatacgcggcggcgctcattcccgtgcttgccgtattgacggagtgcttttcccgcgcgggagaaagcatctcgtccatgcaaaagcaaatgcaaatcgtctttcctctccttttgacgctgatggcggcgagcgggggcagcgtttcggcggctatctatcagcctgcggtggcttttttgagtacgaccatcgtttccgtagtttccgccgtggtcttgccgctcacgctcaccatcatcgcgttttcggtggcgggaaatctgtcgagcgaattgaagctgaacaatttttccgcttttttcaagagtatcaataaatggatcatcggagtctgcgtttcggtgttcggcatctttttcacggtgcaggggctgacttccgcgacatacgacggcattacgcgcagggcggcgaaatacgcgatcggcacgggggtgcccatcgtcgggggctttctctcgggcgggttcgatcttgcgatcgcgggcagcgtattgatcaaaaattccctcggcagcctgagtatttttctcatggtttccgtcctgttcgagccgctggtgatgttgatcgcggcgaatctgtttcttaggctgaccgcggcagtcacccagccgctgggagaaaaccgcatttccacttttctgtccgaaacggcggataatctcaattactgtatggcgggtctgctcttcgtggcgttcttgtactttatcagcatcgtactcatcatctgttcgtcggaggtgttattttgagcgcctaccttctcgcgatcatcggcatcgtgctgctttcgagtattttgtccgtcgtcctgccgggcgggaagactgcgaaatttatcaaagggattgccaagctctgctgtcttgccgtgattctcgcccccgtgctgagcttttttcgggaaaacggggacggaaagataaattttccgtttttttcctcggaaacagtcatagaaacggacgatgccttcatagattattgcagtacgaagcggatagaaaacgcggagtcggagctgaaaaaaaagttgcgggaaaccttttccgcagaagtggaagtaactctgctttgggaatatcgctcttcgatcaccgagggcgaagacagctcccaagataagtatctgtccgtttaccaaggcaaagagatcaaaatcaccaaagcgcttttaaaagattctcaggaaaatatcggaggtgaggtaagaaagaaaatgacggaacatatcgtcaaagaatacggctgcgaggtggaattcattgaataaggaatcggcatctcggaataaaaaacacggagataaaaacggtcggatacgggatattctcctcttatcggcgctcgcgctccttctcgtcttcgccgtctggaagattttttatacgggagataccaaaaacgtgtccggcatgaccggcggcagcgaaagcgaacagcggctttgctcgcttctaaaagagatagacggcgtgggagaagtgaacgtgatgatctgcgaaagcgaagacggcgtagaaagcgtcgtggtggtctgcgaaggcgcgaacgacctcagggtgaatatgaacatccgggaagcggtcgccgcggctttgggaacggatgaaaagtccgtaaaaatctatttaatgaaagaataaaaaaggagataaaaagatgtcaaacaaaaagaaaattgttgtaatgtcggcattggtactcttgctggcggtaacggcggtgttcaatttcgtacttgcgaacaccaatgcgctcgcatccgcggagggcggcgtcacgacggcgaattattttaccacttatcgcacggaacgcacgacgacgcgcagcgaggaactcgtgcagctggacagcgtgatcgcgctctatcaggcgggggacgaaaagtacgaggaagcgaccaagatgaagatggaaatcgtttccgcgatggaaaaagagctcgttctcgaaaacatggtgaaatcgctcggcttcaccgacgccgtggtttccgtttccagcgattccgacaacatcaacgtgttcatcaattcggcggaacttacgtatgatacggcgctttccatttacaatatgctcaaaaacgaaacgggggtagtcgcgggaaacatcatcatcatgcccgtctactcggaaagttaaaaaaagcgtgagtaacctcgtcaaaacagtagaattattcggaaagatgtgctataatagaagcgaaaatgcgaaagcacgaagcggttatcggcattttcgcgcccgattcaaacattgccctataatgtctgaatcgtaacggaagcatattcaaggagatcttttcgaatgtccaatttcagatttaatccgaatgacaatcaaaacggtaaagtagtatataatgccggcatcgtaaacggcatcgtgacgctcgcggtaaacgaagtggagggcacgatgctcgtttcggggaaaaaacggggaatcagcctgttcctcgaaaaggacggcatttatgcggacgtatccgttatcgtgaaatacggctataacgttcccgagcttgcctatcgcattcagcagtcggtaaagcaaaacgtggaaaatatgacgaaatacaaggtggcgaaggtagacgtgcatattcaggacgtggtatttcccgctccgacgcctcccgaaacccaatccgaagaggaaagcggagcggaggattccgattcgaccgaggcttaaaagaaaaatccctttcgaatttcggaaagggattttcggcatttacggagaaaaatatcaaatgagaaataatgcaagggaagcggcactgaatatcatttttgcaaagcagttcaactccgaatgttcggatactttcaagaagaaagtatataagcaattcggactccaaaaggacgaagatctcctttttgcggcggatctggtcgcggcggtcgaggaacacggcgacgaactcctcgccaaaatcgaggacgccagccaccattaccgcgccaatcgcatcaatcctacggataagagcatcctgctcatcgcgatggcggagatttgctatttcgacgacattccgcccgtcgtttcggtatcggaggccgcgggactcgcgcgcaaatactcgacggaaaccagcgcggatttcgtcaacggtttgctggcgggcatcatcaataaataaaggagccgaaaggtcgcatgaaaatcatagacggaaaagcgcttgcggccaggctgcgcggcgaactcaaagagaaactcgaaaaatcgggaaaagaagtagggctggcggtcgtcatcgtcggcgacaatcccgcttcgaaaatttatgtgagaaataaagtaaaggcctgcgcggaggtcggcattcgctcctattcttacgaactgcccgcggataccgcgcaggaagacctcgaaagcttgctcgaacagctcggcggcgacgaaaaaataaacgggattttgtggcagctgccgctgccggagggattggacagcgccgcggcgctgaaaaagattccccgtgaaaaggacgtagacggtttctctgcggaaaatctgggcagactcgccctgcacgaggaaaaaatcgccgcctgcactccgctcgggatcatgaaaatattggagagcgaaggaatttctcccgcgggcaaacacgccgtcgttttgggaagaagcgcgacggtcggcaagccgatggcgctcctgcttttaaacgcggacgccaccgttaccgtctgccacagcaaaacgcggggaatccgcgagatatgccgctgtgcggatattctcatctccgcggtggggaagcctaaattcgtgacggcggatatggtaaaagagggcgccgtggtcatcgacgtggggatgaaccgcagcgaaagcgggaaactctgcggcgatgtggactatgaaaacgtaaaggataaaacttcgtatatcactcccgtgccgggcggcgtgggaccgatgacgattacgatgctgctgtataatacctgtctatctgttttcaaggagtaaagaaaaattgtatacgtttgacgatcggtacgaaaaatacctttctcagttcaatgcttacacggaagaatactgcaaaaagctgcttacccgtcccgaggttttgggcgaaagcatgaagtacagtctgcttttgggcggaaaacgcatccgtcccgtgctgatgctggcggtggcggacgctttgggcacgcccgaaaaggacgtgcttccgtatgccctcgcgctcgaaatgatccatacgtattcgttgatccacgacgatctgcccgcgatggacaacgacgactttcgacgcggcaagccttctaaccacaaggttttcggggaggcaaatgcgattttagccggcgacggtcttttgaataccgcttattccctctgtttcgatcaatgtatgaaaggagagcgcttcgtattggcgtccaaacttctcgcggagtgcgcgggcgtttacggcatgatcgcgggacagtcggcagacctctatttttcggaggaagatagggaggtttccgaggaggatctgcaatatatttacgagcacaaaacggggaaactcctgctcgcgcccgttgcgatcgccagtattttaagcggaaataaatattatttcgaattggaaaagttcggaaaatatctcggctctctctttcagatcaccgacgatattctcgacgtgacgggggatttcgcttcgctgggaaaatctctcggaaaggataaagaagaaaataagctcacctgtattcggctctacgggcttgacggcgcgaaaattcatgcggatatgtacgcgaagcgctgttatacggcgctggacgggatcgacggcaacaccgcctttttatatgatttggtcacttacgtgagggatcgccgcaaatgaaggcgggacaagcctatcgggggacggcgcgcgggaagaagcgaacggaggaaaggaagagaatatgctggaaaggttaaagccgggcgagataaagaagtgtacgaggagcgagctcaacgtactttgcgacgaactcagaaacgtgatctacgaaacggtgacgacgtgcggggggcatttagcgtccaatctgggcgccgtggaaccgaccgtcgcgctcttttacgtatttgattttcccaaggataagatcattttcgacgtgggacatcagtgctatgcttataagctgctgagcgggaggcgggataaatttccgacgctgcgcaaagagggcgggctttcagggtttcccaagcgcaaggagagcgaatacgactgttatgatacgggacacgcgggaacgtcggtgtccgcggcgctcggcatcgccaaggcgcgcgatctgcaaggagaggattataacgtcatcgcctttatcggagatggttcttttaataacggactcatctacgaggctcttaacagcctgcgtattctgaatacgaaaatcctcatcgtcctcaacgataacgggatgtcgatttctcccacggtcggagggatgcacgacattctcgtacagctcaaagcgggcaataaggaagagaacgtcagacttctcgaaaaattcggactcacctatctcggcgtccgaaacggcaacgacgcggaggaaatgatcgattcgctggcggaagcaaagaagctgttgaaaacgcagtcggtgcttttgcatatcgtcacaaaaaagggaaaaggctacgaattcagcgaggaacatccgacgaatacccacggaatcgcgcccgtcggcgcgcggaaggaaaaggagtattcggaggttttgggcactactctctgcgatctggcgagagaggacgggcgcatcaccgccgtgacggcggccatgacgggcagcctcggattgaataaattttttgccatttacccggagcgtgcgttcgacgtaggaatctgcgaggaaaacgcctccgtgctctgcgccgcgatggcgtccgcgggactcaaaccgtattacgcgatctattccacctttttgcagcgcgcgttcgacgagatcatccacgacgtctgcgcgcaggatctgcccgtcaccttctgcgtggacagatcggggatttcgggcgcggacggggaaacccatcagggcgttttcgatctgtcctacctttcgctgattcccggcttgacgatcgccgttcccaaagatacggaggagttcaaagagttcctccgtttcagcgcccgtttcgctcatccgctcgccattcgctacccccgttcgggaaaaatcgtctttcccgcgacgaatgcgccgatagaagcgggaaaatgggaatatctccataaatcgggagccgaaaacgggtcgcccgtcacggtgatcgccgcgggcgagcgctgtctgatcatcgccatgaagatctggaaaaatctcaacgaaaagggattggatttcgacgtggtgaacgcgcgtttcgtcaagcccttggatagagaactgctcgcggggatggagagcggaacaatcgtcaccgtcgaggacaacgtttccatcggcggcttaggacagaggatcgacgcggcgctgagggattgcgagcgggaaacgggaaagaaatttaccgtcaggaattttgcgtatcgcgacgaatttatcccgcagggaaacgtaggcgatttacagcgcgaatacggagtaagctgcgaagagatcgaaaattatatttcggaaagtttcagatgagggcggacaaatattttgcggaaaaattcggttcgcggacgaaagcggcggaagcgctcgaaaaggggcttgttctggtaaacggcaggacgccgaagcccaaggaagagatccgtgaaacggacgagatcgtttttatcgctccggacgaatattatgtgtctaacggaggatacaaacttgcaagggcgttaagggtattttcatacgactgcaagggaaaaatattcgccgatatcggggcgagtacgggcggattcaccgattgcctcttacagagcggtgcgaaaaaagtgtatgcggtggacgtcggagagagcttgcttcatcccgacctgcaaaatgacgataaagtcatttctttagaaaatattaacgccagatatttgacaaaagaggatttttcggataaaatagagggagtgacagcggacgtcagtttcatttccttaaagctgattttgcctgcaataagcgcggttctcgccgaaaacggcagcgcgttcgtgctggtcaaacctcagttcgaatgcgaaaagaaaaatatcgggaaaagcggaatcgtgcatccgtccgcgcatccgaaaatagtcgcaaaagtgttaaactattgccgggaggcggcgctttatccgttcggaatcgtcaacgcgcccgtgcgtaagggaaagaatctcgaatatgtcctgtatttgaaaaatacggtttctcaggctaaaaaagacggggaaatattgaaagaagtccagacgttcgtgaaacaatattcagtcggtacattaaagtaaacgtttatttttgcataatgacgcaaaagtacagagaggaaaaacgatgagagtcggggtgatgggaaacggcagcaaggtaagggaaggaaaagtcgtggaccgttttatccgttttttgcagtcggagggttacgaggcggctttttttgaaaagccggaggagatcggcggcgtggacgcgttggtcgtgctcggcggcgacggagcgatcctgcacgctgcggcgcaagccgctgaaaaaaacatcaaaattatcggcatcaattacgggacccttggatttctgaccgaatacgaaaaagaggaaacggaacaggtgaaagatctgctcgcggacgtaaaggcggaaaaatgcgcggttttaaagcgcagtatgttggagctttccttcggcggcagcgtttattacggtcttaacgaagtcgtcctgcaaagagattacggcgtcaccgacacacagatcgttaaaatgagcgtgcagataaacggacaggacagcgacaccatcatcggcgacggtatgttgatctgtacgccgacggggtccacggcatattctctgtccgcgggcggcgccatcctgtcgccgcaggtgcccgcgtttatgctgacgccgatatgcgcgttttctttaaatgcccgcccgatggtattttcggatacggacgtattttccgtaacgataaaaaaagggcaggtgatgcttctcatcgacgggaagcgaattgcatccatcaaggaaggaatggggatcatagtaaaaaaagcaccgtttacggcagattttccgatgcggggcagttcctgtttttttaaaaagataagaaccaaattaaaccaatgagaaggagaactacaatgttaaggacagcaagacatgccaaaattctggaaattatttctcagaaagagatcgaaacgcaggaggaattgtgcttagagctgaataaactcaattacgtagtcacacaggcgacgatttcgagggatatcaaggatctgcatctctttaaagtttcgggaatcgaaaagaagtatcgttacgcttacataaacgacagcgagggagagatctcccccaagatgaaaaatcttttccgcgattgtgtggtcgccgtgaaatgtgcgcagaatatggtggttatcaagactctgacgggcaacggtcccaatgcgggcaccgtggtcgataagctcaactatcccgaaatcgtaggttccgtcgcgggcgacgacacgctgctgattgtctgcgaaagcaacgaagccgccgtatccgtcatcgataaaataaacgattttatgaaataagaaaaagtcccgaaggacggaaatacatatgttatcgaaactcaccatcaaaaacgtagcgctgatagacagcgcggaaatcgagttcggaaaaggcttaaacgtgctttcgggagaaacgggcgcgggaaaatctgtcattctcgattccgtcaatttcgtattgggcgccaaagcggatagaacgatgatacgctacggcgaatcggaatgtatggtgagagcggaattttccgtccgtgaggacggcagggcggccgaagcactcagggaaatggatattgaaacggaaggcgatattctcatttcccgtaaattcaccgaagcgggaaaaaacagcatcaaaatcaacgggaataccgtgaccgcagccatgcttcggaaagtgacggacaatttggtggacgtgcacggtcagagcgagcattttttccttttgaaagagtccaaccaattgaggacgctggacggcgtcgtaggagaggagctgctgccgaaaaaggcgcagcttgtttcccttttgtcggaaatgcgccagatcaaagaacagatctctctgctcggcggcgatgagaaagagcggggcagaaggctcgatattctcaaattccagatagaagagatcgaaagcgtcggactcaaagatggcgaggaagaggtgcttatctccaagcgcaataaaataaataacctggaaaagattatctccgcggtccgcgaagccgtagaggctctttcgggcgagcgcggcgcactcgacgctctgcgcgaggccaagcgggcaatgtcttccgtttccagactggacgaggcgtattccaatgcctgcgaacggctggaaagcctctctctcgatgcggacgatgtggcgcagaccctttcggatatgggggacgaactctattttgacgaggacgaagcgcaggaaacggagaaccgtttggacgcgatcaaggcgttaaagcgcaaatacggcgcggataaaaaggagatcgactcctatttgctcaaatgccgtgaagaatacgagcttttatccgactgcgaggggcaatatgccgtcttgacgggacgggcggagaaactgagaaaggagatttatgccgcctgcaaagagatcactttgctgcggaaaaaatgcggcgatgtcttttgccgccgcgtcacggaagaattaaaaacgctgaacataaaaaacgcaaaattcgaaatcgaatttaacgaatattcggaagcggatgcggaaaaggcgggcgccaacggattggacgagatttgttttctcttttccgcaaacgcgggagagccgttgaaaccgctcggcaagatcatcagcggcggcgagatgagccgttttatgctggcggtgaaaacacagctttcggatgtgaacgagatctcgacttatctcttcgacgagatcgacgcgggaatcagcggcaagacggcgaaagtggtcggggaaaaatttgcgaggattgcaaaaaagactcaaattatcgctgtttcccacctcgcgcagatcgccgccatgagcgacaaggagtttctcatcgaaaaatcggaagaggaaggaaagacgtatacgcgcgtgcgtgcgctcgacgacggcgaaaagtcgaaagagatcgtgcgcttgctcggcggcgaagaaaatgaggaatttgccttgaaacacgccgaagaattggtcaaacaggcaaaggaatacaaacaagccataaattgacaggaatcgcgccgtgataagcggtttttcagcgaatagaatgcactctccttgcacaaattaccttctaaacgggggtaatcatgcgcagattgagtgctttatttttaggtgttttaatctcttgcggtatcgctgcgggaggttttggatattcttattccttcgtatccgcggatgcggaatgcagggaagtatatgtaggcgggatgccggcgggctttacgttgagcgccggcggcgcgcaggtcatcggtatctgcgaagtaatgagcgaaagaggcgtatgcacgccggcgtcggatgcgggaatccgcacgggcgacgtcattacgaaagcggcgggcatcaaagtggaaaccatttcggatctcaacgagatcctcagcaagagcaagggtaagagcatcgagctctgcgtgagaagaggagaaaataccctcgcgctgtctttgcagcccgtaaaggataaagtgacggggcgatataaaatcggggttttgatccgcgacagcgtgtccggcatcggtacggtaacgtatatcgacaagcagactcgccgcttcggttctctgggacattcggtggtaggcgaagatcatcaggagatgaaaatcgcgggcggtaaggtctatcagtgcagtatcgtcagcgtttccaaaggaataaggggcaaagcgggcgaactgagggggatgtttttaaatgaggaagggatcggcagtgcggaaaaactctgcgactgcgggatttacggtcaggtgtcggacagctacgacgttacgagcctgcaaaccgtccagacctccgagatcgacgaagtgaaaccgggaagcgcctatatctattcgaccgtcagcggcgtatgcccgaaaaagtatacggtggacatcgtcaaagtcgataaacataacaagagcaacaagaatttcgtcatcaaaattaccgataaggatttgataaacgaaacgggcggcatcgtacagggaatgagcggaagtcccatcctgcaagacggcaaactgatcggcgccgtcactcacgtatttctcaacgacccgacgaggggctacggtatcgacatcaatgcgatgattcgggaataaaaaataaaaaacagaataaaagagcggggagattcatatataagtatatgaatctcctttgtattttgcgcgaaatcggcgcgtcggttaaaaaacgcttcgtcgtgacggttgtttttattgctctgtttgtcataggtatattgtcaggcatagtaatagaaaagcccgcgtcgatcgagtgttactatctcaattactgcgacaattacatttatcggatattttccgaatcgtcgggcggaatttttgtggatcgcctgctcagttcggcgtttttcatcgtcttgacgatccctttggctctttcgatattctgcgttccgttgcagggaattttagtgttttataaaggattcgtcttcggcacggtgacggtgattctcttttccgtctatcgtttcagcggctttttggtctggctcgtcgtacttttgccgcaggtgctgctgttttccgcggcatacgtcgttttgtccgtcctggccttcgactgcggctgtgaaaatcggctgcgcagggattttggctgcatgagaggatttctcgtctatctgctgttggcggcgatcgccgcgctcttatgcgctctgctcgaatttcttgtcgtatgcctgatttttcgccccgtttccaaagtgttatgataatttttttcatattctttaaaacaccctttttgcgtataatccgcgcggaaagagggaaactaagagtatgaaaaaattattgggtatcatcctcggaatgtcatttcttcttccgggcgtttccacaaaagctttgacgaatatatcgggacgaaattccggattatcggcggtatcggcaaaggcggaggagagtatatcggaagcggctctcccgtcggaaagcgatccgctgcatacggataaaacggtcacggcggactccgtgaacctgcaactgaatgcgaaagcggcgtacatgatggactgggcgagcggtacggaaatctattccagcaacgccaccgaccgtctgcccattgccagtatgtgtaaaatcatgaccctgatcttatgtttcgacgcgatagaggcggggaatctttctctcgacgagatgatttctgtcagcgaacacgcggcgtccatgggcggctctcaggtttttctggaagcgaacgcgcagtatcccgcccgcgaattgatcaagagcatcatcgtctgttccgcgaacgacagctgcgtggcgatggcggagcgcatcgcgggcagcgacacgttgtttacggataagatgaacgcgagggcaaaggagttgggcgcggaaaatacgctcttcgccaattgcacgggacttcccaaggagccgcagtattcctgtgcgcacgacgtggcgaagatgctcgcggaactcgtttcgcacgaggaatacttttcgttcagtaagatttggatggataaattccaacacccgcagggacggtatacggaaatttccaataccaatcgcctcgtgagattttacgaggggtgtgacggcggcaagacgggctttaccaatcaggcaggcttctgcctcgcggcgacggcaaagcgcggagggatgcgcttgatctccgtcgtgatcggcgaagattcgagcgaccaccgtttcggcgacatccgcacgatgttcgattatgcctttgcgacgtatacgctcaaaacggtcgtcgacgaaaacaatctgttgagcgaaaccgcggaagtgagcggcggcaagacaaagagcgtcaccgttcgtcccgaacgcagttcccacattttttccaggcgcggcgacacggagaacgtgactctcgacgtacagataaagaatcgcgtcaaggctcccatccgggcgggcgacaaggtaggcgagatcatcgtctataaggataacgtggaaatcgaccgcgtgagcgtcgtggcgaacgaatccgcggaagcggcgggatttctcgaccatatccgccgcgtggcgcagggctggaatctgtaaaggcgcttttaatcattttcaatgcgtttacgcagtgcaaaaatcttatcttttcgtaaagagccgcgatacttccgccgcccgtcagcggaattgtcgttctatccgttcttccggcgctttgtattgcgaaaaggtttctcaaaattcttaaattttcgttttcgcgagcctcttttgtcaagatgtaaaaatccgctttttcggtaaaaattttccgaaagggcggattttttgcggaaagcggggtccgactcttgcattttgataaaaaatttgctaaaatatagaatgaataaataataccggacatttccaaaaggcggacaaagaggatgaacacaagagaaacgttgaaagtaaacgaaaagggacacttagaaatcggcggcgcggattgcgtggagctggcaagggaattcggcacgccgctgtacgtattcgacgaagcgtatatccgcaggatgatgcgggtctaccgcgatacgctggaaaaagaatacgcgggaaacggtttggtcctgtacgcttccaaggcgttttcctgcgaggccgtttatcgcatcgcgcggcaggagcgcatcggcgtggacgtcgtttccggcggggaactgtataccgcgctcaaagcgggatttcccgcgtctaaaatttatatgcacggcaacaataagctcgactacgaattggaagaggctctcgacgccggcgtggggtgtatcgtggcggacgcatacgcggaaatcgataagatcgaccgcgaggcgaaaaagcgcggacgcacacagaatattctcctgcgcatcaatcccggagtggaggcgcatacgcacgcctatattcagacggcgaagacggacagtaaattcggattttccatcgcggacggaaccgctgaaaagatcacagcctacgcattgacgaaaaaacacgtcgcgcttcgcggcttccattgccatatcggttcgcagatcttcgaaaggcagtcgtttgtgctcgcggcggaaaaatgtatggattttgccgcggaaatcaagcaaaagctcggattcgtcacggaagaattgaatatggggggcggattcggcatctggtatacggacgaggataaaaaaatttctcccgaagggtacggggaatatttaaaggcgctcatagacacaatcaaaagcaaggcaaaagaaaagaagttaaagcttccctatcttgtcgtcgagccgggacgctccatcgtcggagaggcgggaattacgctatatacggtcgggacgatcaaagaaattcccggggtaaagaaatacgtggcggtcgacggaggaatgttcgacaatccccgctatgcgctgtatcaggcgaaatatacgcccgttctcgcgtcgcgcgcggctgaaaaggcgaccgaggtggtgtccgtggcggggaaatgctgcgagagcggggatttaatcgccgtcaacgtcaatctacccaaggcggagtcgggagatattttagcgatactctccaccggggcttataattattcgatggcgatgaattacaaccgcaatcttatcccgccctgcatcctggtcagagagggcagggcggattatatcgtcaagccgcagacttacgaggatttgacaagaaacgacgccgttcccgattctctgaaaacggaagaataaaaaaaggaaaggactgaatttttttatgtaagattcgtttgaaaaatcctttcacacacttgctttttcagataaaaaacgttataataactttatggaatatttcatggaaagatttttaccgcttatcgcaagttttctcgcggttatggtcgtcattacgctgcacgaattttcgcacgcgttcgtcgcctataaatgcggcgacccgacggcgaagttcagcgggcgcctgacgctcaaccctgtaaagcatttcgatcttttggggatcctttccttcgcgctggtgggattcggctgggcgaagcccgttcccgtcaatccgaataactttaaaaaatacaggagcggctgtttttggacaagcgccgcgggaatcatcgccaactatatttccgcgtttttattcgctccgctgtttttgttgtcgacaaaatatttggcgggcaatacttacgggtatctttttatccgcgacctcacgtatttgttgtttgcgtattctttgagtttttgtatcttcaacctgctgcctttttatccgctggacggcttccgcatcgtggacgccctgaacaggaaacgcggcaaagtctattggtttttacgcaaatacggctattatatccttttgggactgatcggcataagctttctttcccgttatattccctttttgggatatataaatattctcggctatgtgatggaatttgccgtcaatattttcggttggcccatcgataaattctggggtctgatcattagataaagggagggaacagtggaaaaaattacggtggaatcggtcaaaaatttcgattcggaagtagattatacgacggtcttggataacttcgagggacctctcgatcttcttttatatctcatcaaagaacaggagatcgaggtcaaggacattttcgtttcgcaggtcaccgagcaattcctcatgtatatgaaaggactgccgtacatcgatatggataaagccagcgattatctgaatatcgcggcgaccatcatcgacatcaaagcccgcagcctcgtgcccccgcccgacgacggattcgacgattattacgacgaggacgacgatccgcagggagaattgatccgcgccctcgaagaatatcagatgatcaaagaggaggcggaaaagctcaaagaaatggaaacggtcggctactatttcaaggagccggataaggacgtgagcggcatacaggtaaaatataaagattttacgctcgacggcttactgaaagcgtttgccaaactcatgttgaagcgcgaaagcttgaagagcgaaacggacgcggcgcgcgaaattccccgcgaccgcttcaccgttcccgaaaagataaactacatacgggaaaccgtcagggaaaaagagcgggtacaattcgaagaattgttcgaggatagcgcgtccaaggcggagatcgtgactacttttcaggcgcttttggaactgttgaaacatcaggttttgattgtatcgcaagaagagatattctcttccattactattatgaagaatccgaacagaagcgaggacgaagaaattggagaaattgacgaatataattgaagcgattttatttgcgtcgggggacgccgtgcccgtggatatgctgcgcgacaagttttcgcttaccaaagcggaaatggatacggcggtccgccatttggagaagaaatatacgggggactgcgggattcagcttctcacctttaatcacaagctgcaactcgccaccaatcccgaatataaagaggcgatcgcgtccgttctcacccccatacgggaaaaggaatttacgcgcaccattttggaatgcgcggcgattatcgcctacaaacagccgatcacccgctccgaattggaagcggtccgcggcgtcaacagcgattatgccgtcactacgcttttaagcctcgacatgattgcgccggcggggcgcaaagacgtacccggaaaaccgatactgtacgctacgacggataactttctcaaacgcttcaagctgaaatctttggcggatctgcccgattacgacgaattgatgcagaagatcgccgagatcaacgccgctaccgaagcgagcagttacctgtacgagaaagacgtatacgatcccgataaagaccccgaactcagagaggacggcggcgcggcggaaagacccgtttcttccgacggatttgaactgcccgattttctcaaagacatcgaggacggaatcattaaaatacaataaccgttgtttttgacggaattttgacgaaaactacatactttcacagaatctgcccatattgtaggtatgggcagattctttttatttgccgccttgggacttatcttgctggcggtattgttattttttccgatatttttggaggcggacgttcattacgacatgaatcggaaaaaatttggctttgccctgtacgcatataaggtaatcaagctgataggcggatacgtcaccacatatcccggcggaatcgcgctgcatatttctccgaaaaaggcgattttaaagccttattcgggcatggattcggaaagaaaacggttttcgtttacgaaggcgtttcggatcgtttccttttcgctgacgacggaaacgggggcggaatatctcctgcccgtttcgatagcgcatacggctctgcgggcggtatttttttccgtcggcggagagaggggaaatatcgaaaataatttgtggctgacggacggggacgaactcaaaatttctatgaatctcgtcacctttttcaatctttttattttgctttgtgcctttttgaaatttttaaaggagaaaatcaagagtttatggcggaaaaaaacaaaaaaatcaacaacttaatcgattcttcggtcctcacattgaacgacattgccgacgtggatacggtcatcgggaaaccgatcgtcaccgcgagcggctttcaggtgattcccttttccaaggtgacgatgggctgtctgtcgggcggtggggaatacggggacgtcaaggtagtcaaagaaacggattctatgccttttgcgggcggcagcggttcggtggtgagcatgaagccgatgggctttatcatcgacgacggaaagacctgccgcatgatccgcatcacggacgaacccatcgacaatctgatcgaaaaggcgagtgaaatcgtacagaatatcaccgccaagggctgagcatgagcacggcggaataccttgcggaagcggaaaaaagaccgcggcgcttccgttttttgtgcggttttttatccgcggcttattgcgtttgtctgttgagtcccgcgggttatgcatgggcgaaggcggaaaataaaaagacttccgttccgcccgcgcaggcggaatgcgtcatggaggctaattcccgccgtattctctacgagagcaacggcgcggcgcagcttcctatggcgagcaccactaagattttaacggcgatcaccgtcctcgaaaacagcgccgatataaaggaaaaattcgagattccttccgccgcggtaggcgtcgaggggtcgagcgtctatctgaaaacgggggatacgtacagcgtcgaggatttgctgtacggactgatgctccgctccggaaacgactgcgccgaggcgcttgccctccatacgtgcggcagcatcggcgagtttgccatcagaatgaacgaaacagcccaaaaagcgggcgcgctcgacagcagctttaaaaatccgcacgggcttccttgcgaagggcattacacgaccgcgcacgatttgaatctcatcgcttgttacgccatgcaaagcgcggaatttcggcagatcgtttcgacgaggtattacgagccctgtcattgggcgaataagaacaaaatgctgaaaaactacaacggcgcgatcggcgtcaaaacgggatacacgaaacaggcggggcgatgtcttgtgagcgcggcggaacggaacggcatgacgctcgtctgtacggtcctcaattgtccgatgatgtacgagcgttcggagcaactgctggacgacgcgttcaaggcgtacgaacagacgcgaatcctcggcggcgatactcccgtgcagataaagaagggaaataagaccttgacgggatatacgaaggaagatctctattatccgctgctgcccgaagagaagctcctgctcaaaatggaaacggaaattcgggaagattttgacgggaaagaaaaaaacggtgaaattatcggacaaatcaaaatctatctcttaaatcgattgcttttttcgcggaatttatataaactataaagaaaggttagaattaaaatccacgaagaaggaatacgaatgagaataaataaatttttggccgaaaacgggatcgccagcagacgtcacgcggacgagatggtcgcggcgggcagggtaaaaatcaacggcgaaacggcttcgctcggcgcggatgtcgacgaggaggacgagcttgtgatagacggtcagcctttggtacgggcagagaaaaagctcgaatactatctgatgaataaacccaaaggagttctcagcacggtttcggacgatcgcggacgcaagacggtgatgagccttctgcccgccgacgcggggcgtgtttttcccgtgggcaggctggattactccacggaagggcttttgctgctcactaacgacggcgacctttcctatcgcctcactcatccaaagagcgaaattcccaagacctatcttgcccgagtcgagggaacgatgacggaaaaggacctcaatcgcatccgctcgggaatcgaactcgacggtatactgactaaaaaatgccgcgcgcatatcgtcgaaacaaataagtcgtatacgaaagtgcacgtcacgattacggaaggcaaaaacaggcaggtgcgccgtatgttcgaggcgatcggcaaaaatgtggattttttgaagagaatccgcatcggcaatttgacgatttcgggactcgaccggggcgaggtgagaaaactcaccgatgaggaaatcgtctatctcaaaaatttataaggttctttcgaaaagacataaggaaaatcccacccgattttgaaaatcgggggggatttgatttctattttatgtaaaaactccgtacttggcgcgaatggttttt

SEQ ID NO: 962 - DNA, 32759 bp, Unknown
  16S sequences of unknown bacteria
cagcgattgccgatacgccatgtcttgtgttatactcttgctcatgagggatatggtctcctttcgccgagttgtgatgtggtaactcaactttagcatatgagaccctatctctctttccttttttgtgtttgtccaagatgtattgtagtcctacatgaaacttttcgaagcatatcaaaacataagtttattttcgtgttaattatgttacaatgagtatttagtatgatattcagatgggagcattgagcaaccaattccctgggggaagaaatttgtcaagggtatatttatccagtgtcaaaataaaagcaggcttcctgtaaaacacaggaggcttcagatcatcaacaaacctccaacctgcgtggctggaggtttgttgatgatctgagcacagccgaagctgtgcatactgtaatgatagtggttggggacaacttttttcgtaaagggaaagcattcaaagtggtcaaagaatctgaaccaaacgagaatggctttctttattcctgggctgaagggaaatgatcgcaacaaacagcagctaccgtactggacggcgcatggcacactctacctcgcatccattgacctatgtggcccaaatgggatttacttcatcgtcatttcatcatgtgcgggtagttcgaagggcacgctggcagggtgatccagataccagtaggcggtggaggtgtaatcatcatagcgaggccctgtccaaccaagattgtccatcgccatgcggaagctttggttaaaccagatttcatccttcacatggaaacggtagagcatgaaacgcttctgcgcgttgtattgtgcccgcggatcgccaagaatggcatacagtccggcgtagggtgcactgtaggtctgatattgcttgatggcgatgtcgttgccgaagccgtaggagccgcagaaataatcctccgtgccggtgtagttcatggaggggcggctttcgccatcgatgtacatcttcgcctcgccctctacccagcaggtgttgtggccgttgacgcccactgccagggtcatgcccaggaagcggccgcggccttctacaccgtccagcacgacataggaacggcccttctgtactgggtgctcctgccggtaagctgcatggaaatagccgatgtcctccggcagcgcgcccttccagccggagatcatgtagaacaaatcgcagggatgatcacagcggttttccatggtgatgcggcagtgggaacggaagggcatctcgaagtagctgttgaagccgcgtccgggcgcaaccagcagcagcgcggagttcaggacgggatagcggccatccatgtcctccatgttttcatcgtatgcacagccaaagaaggcggacagcggcgcctccacggagggcgcttccatgccgtcccagtagatgcgcaggataaagccatggccgatgtagccggtgaaccacatgtgggtgatcataccggggccatccacatcgcacagggtgatggtttcgccggacttgatgctgatgcaggggcggagtttctcgcaatccttgccgggagtgccgccgttgcgtgcgccggtgggattctcggcggaaaaaccaaaggtcgtccggtgatgcaggtgatacataggttcctccttgaacgtagcagcgttgaattagttatatgatagcagacgatgtgcgcaaatgtcaatctgtataaacagaaaaaacaaacacaaaaaggtgcaaatgcacatcaaagaaagtatgcaatcatgaatgaaatgttgtaaatgaaaataattaaaccaaattgataaaaatattgaaaaatactttgaaaaaggtgcaaatgcacactatattatgttgacaaaagcttctgtaaagcttacaatatacgtagttacaacgtttcggaggtgtccccatgaaacacatccgcaaaatagccgcagtcctgatagccattgcgctgctatttgccgtacttgtttgtttgggaaacaacggtgtccgtgaagtggcatggactgtccgtgagattgaaaatctgccacgcaccgcagcggaagatgctttgcgtgccgcagatatcatggcggacagcagcggctgcgaggtgctgccggcttatgaaggccgtgagaaggtcgtgcgcctcgatacggacgggcagctttccctgaagctgaacgcgcctgcagcaggtgattaccgcctgcaggtgggctatcatacgctggaaggcaagggcattgacatggagttcaccctggcggtgaacggcaagccctatggcgatggcaagactgtcacgtccctgaaccgcgtgtgggtggacgaaggcgcgcctgagcgcaccagcacgggcaacgacctgcgtcccaagcagatggagcgctttgtctggactgaggcgctgctggcggacagcaatgacgcctccggtgaggcgtcggtcttcctgaatgagggcgaacacaccatcacgctgaccaatctgcgggacgcgctggtaattgactatgtgtgccttctgggcaaggaaacgctgccgaactatcaggaatacagcacggcccacgccggtgtgaagacggagcccatgcaggtactgctgcaggcggagaacacgctgtgcaagtctgcttctgcgatttatcccacctatgatcgcacctcctcctatacccagccctaccaccccacccagatgcggctgaacaccatcggcggcagtggctggaagcaggtgggcgaatgggtcgagtgggagctggaggttcccgcggacggcctgtaccagatcggcctgcgctatcatcagaatcaggtgaagggctactatgtgacccgccgggtgatgatcgacggaaaggtgccctttgctgagctggatgcggtgaagttctcctaccacgccgattgggattacatgacctttggcgaggatgagaagaatccctacctgttctacctgaccgaaggtaagcacaccctgcgcatgcaggcaaccctgggcgatatggcgcccctgctggaggaaatgcaggatacggtctacgacctgaatgagctgtatcgccagatcatcatgatcaccggtacggagccggacttctaccgtgattactatctggagaaggtcatccccaacctgacggagcgcctgaccggcctggcagacacgctggacggctatcaggatgacatggatgctctcctgggctcccacagcacagcgggtcagaccattcaggtgctgtcctaccagatgcgggaattcgccaaggaaccctacaccattcagaagcgtctgacaactttctcttccaatatatctgcctttgcggagtggacgctgtctgtccgcgagcagccgctggagattgactacttcatcctcagcgatgcctccggcagctacaaggcaaagaatgacaacctctttgattccgtcaagcgtgaggtgagcgccttcctgggctccttcacccaggattacaatgcctttggcggcggcgaggaaaatgtccgtcaggagcccatcacggtgtggctgtccaccggccgtgaccaggcgacggtcatcaaccgcctgatcgaggagggcttcacgaccaagaccggcattcccgtcaacctgcagctggtatccggcgcgctgctgaaggcgaccatcgccggtcagggtccggacgtcaatctattcaccggccgcggcgaggtgatgaacctggccttccgcggtgcgctggctgacctgagcggcctggaggggtatgccgacactgtgtccgccctgcgggacggcgcacagattccctacaccttcggtgagggtgtgtacggcctggcggagggtcaggacttcctggtgatgttcgtgcgcgacgacgtgctggaagacctgcagctggaggtccccaacacctggactgagctgatgaacatcgctcccatcctgcagagcaacaacctgggcattggcctgccctacgcccagctggacggcaacaccgtgctgagcaacggtgtgggtctgaccaacattttcccctctctgctgctgcagcggggcggaagcatctataccgaggatcatcgttccacgctcctgcatgagccggtggccaacgcggccttccgcatgtggacggatttctacacccagtacgattacgagctgtacaaggatgacttcacccgcttccgcacgggcgagatgccggtgatcatcacctcctacggcatgtacacccgcctggagggtacggctcctgagatcgccggcaagtggagcatgcatctgctgcctggcaccgaacaggaggacggcaccgtgaatcacaccagtgcggccaacggctctgcggcggtcatgctggcggactgtgagaaccctgaggcttgctggcagttcctcaaatggtgggtcagcgcggaaacccaggcactctacgcccgcgacatcgaggcggatctgggtgtgctgggccgtcacaccacggccaacaaggaagccttcagcgtgtccaactggtccatccacgatcagcgcatgctggaggagcagtggaagtgggtctacgagctgccggagatcccgggcggctactatgtgtcccgcaacctggacaatgcattccgcgcggtggtgctctccaatgaggatccccgcgagagcctgttctactggacaagctccaccaatgaagagatcctgcgcaaacgcgaagaaatgggtctggagtaaaggaggcgcctgagaatgatgaaatcgcaaacggtcaagcacggcacagtgcttcagcggatcaagcgccaccgtgagagctatctgctgatgctgccctatcttctgttcttcaccgtgttcaccctggcgcccgtggtggtggcattcgtgctctccttcacggagtacaacatgctccagcctccgcgcttcgtgttcatggccaactacatccgcatgttcctggaggacaatgtcttcctgacggcggtgagcaacacgctgaaaatcgcggtcgtcatcggcccggtcagctacatgctgtgtttcttcattgcctgggtcatcaatgacctgaagcccgctgcccgtgccttcctgacggcgctgttctacatccccacggtggtgggcggcgcagcctgggcggtgtggcgcctgcttctcagcggcgaccagtacggcctgctgaacaacatcctcatgtctgtgggcatcatctacgagcccatggcctggctgaccgaggaaaccaccatcctgccggtgctgatcatcgtgcagctgtggatgagcatgggcatcagcttcctgtccttcatcgccggtatgcagacggtggacgtctccctctacgaagccggtatgatggacggtatcaagaaccgcttccaggaactgtggtacatcaccctcccggcaatggtgccccagttgctcttcggtgcgatcatgcagatcatctccgcgttcactgtggcggacgtctccgtacagctggcgggtcttccctccaccaactacgcaggcgaaaccatcgtcacccacatcatggactacggcagcatccgctatgaattcggctatgcctgcgccatgagtgtcgtgctggtgctgctgatgcagggcgtgcgcgcgctggtgaccaagatgctgagcaaggttggcacatgatgcgccggaaaggagtcaagatgaaacaagtagccaagcgtgggttctttcaccgcaaggggcgggttggcatgaagaagcgccgctccaagacgggcagtgttctgctgttcctgctcatcttcctgctggcggccttcatggcgttcccactgtattacacggtcattcagtccctgaagcccattgaggagatcttccgtttcccgcccacgctctatgtgagccgtccggtgatggacaactacggcgagatgttccgcatcctggcgaacatgtgggtgccgctgtcccgttatctgttcaacacgctgttcatcgcggtgctgggtacgggattgcatgtgctggtagccggcatggctgcctacccgctggccaagcataactttcccggccggaacctgattttcggcgtgattatgctgggtctgctcttcgtcaaccaggtgaccttcgtgccctccttcgtcatcatcgccaagctggacatccttaacacctatctggcatacctgctgcccagcatcggcgtgtccctgggtctgttcctgatgcgccagtttatctcccagctgcccgacagcatgctggaggctgcgaagatcgacggtgccaacgagcatcgggtgttcttcagcatcgtgttccccagcatcaagccggcggtcatcacggtcatcatcttccagttcatcaacctgtggaacggcctgccctccgatgtcgtgtacaacgaggagttcaagtccctgacccaggcgatgtcccagatcactgcggccaacgcctacgcgcgctacggcccgtccatggcggcgtcggtgatcatgatgatcccccccattgtgatttttgtgtccctgcagagcaaggtaatcgaaaccatgaccagtgccggcatcaagggttaaccggaggaggcgagaaaaatgcgaaaactgataaaggtcgtcattctctccctgctgctggtcagctttgcagctgcggcgctggcggatgttccctatgcgtcctattcctatgatgaatgggatcgctccgtatctgcgcctgtgggctatacggtggaaaagaccgtctacggcgcaatgacatcctccggcgcctggaaggaagctcaggatctgatcaccacggcggacggccgcatcctggtggcggataccggcaacaaccgtatcctggaatacgatgcgtccttcaatctcctgcggacgatcaccgaattccagcggaatggtcagcccatggcagtcaccggccccaccggtttgcatgtggatgcggacggcaagctctatgtggccatgtccagcgccgcccaggccgtgatcgcagacctgcagaccctggaaaccacgctggtgatcgagaacctggagcatgccctgctgggcagcgacttcaagtttgtgcccgccaagatcggcgcggacaacgccggccgcatctacatcctcagcaccggctgcttctccggcctgcttcagttctccccacagggcgagttcatgggctactacggcagcaacaaggtggctgtgacggcggaggtcatcttccagtattactggaagtccatcatgaccgacgagcagcgtgccaacatgaccagcattctgccggtggagtattccaacctccactgcgcgcctgacggtttcgtgtacgcgtccactgtcggtacggaaacacccgtcaatcagatcaaacgcttgaatcccctgggcaacaacacctacttcgcacggggcggcaaggaagtcaactttggtgacgaagagctggcctctgtgaaaaacgtttccaccatggtgacactgctgcccacctttgtggacgtggttaccacagaggactgcgagttcatctacgcggtggaccgtgcctacggccgcatctttgagcgcgaccgcaacggcaacctgatttccgtcttcggcgcattgggcaaccaggagggcaccttcaagcagccttccgccatcgcgctgctgaacggcgatgtgctggtgctggacaccggcaagagcagtgtgaccgtctttgagcccagcgagtacgcagccctggtgcacgaggctgtgcaacagtacaatgctggtgaatacgctgcctcccgtgatgtgtggctggaggtgctgcgccgcaacaccaatgccacccaggcttacgccggcgtgggccgcgcactgctgaaagaaaaccgctatgatgaagccatggagtacttcaaactcggcgacagccgcgaggagtattcccaggcataccgcatcgtccgcctgaacgtcatccgtgacaacgccccctgggtggtgtgcgcggtggtcgtcgcggtgatcctcttcaagctcctgggcttgctgctgcgcaagctcggctggaagaaggggatgatcgccgatttcggcggcatgctgctggataaggtgcatctgtcccggaacaccgtgttccccaaggtgctcttccatccctttgacggcttcaaccagatccgctttggcggctccgtagccctgtggccctcggtgatcatcctggttctgtatgtcattgcgacgatctaccagtttgtcggcacgggctatctgttcaaccagaacaacattgcggatatcaacctttggctactgctggccaagtccctgggcgtggtagcgctgttcatcgtggcacagtggtccatggccatcctgaccaatggcagcggccgcttcaaggatatcatcgttaccgcctgctattcgctggcgccctacaccgtgggtctgctggtgggcacctggctaagcaatttcataatcatggacgaaatgtacgccgagtacatcatcctgatcggtctggcctggagtgcgatgctgctcttcatcggcacgatggtgattcatgagctaccctttgcaagggctctgggcttcctggcgctgacggtagcggccatggcggtaatcctgtttgtcctggttctgttctacacgttgctgatgcaactgcgcacatttggttacacgctctatgttgagctcgtgttccgcatgtaaaggaggcgcgttgatgatgaaaaagttcctgattcttcttctgctgtgcctcctgcccgtcatggcatgcgctgaagtgatcctggtggctgaaaatgaccgcctggagctgcactacgacacggtggaaagccagatcatcctcaaggacaagctgacccaggaggaatggcgctccacccccgacgatattgcacaggacaagcgcgctaccggcgtgaacaaaatcaaccgccagagcgacctgatcgtgcagtatcacaacacctcctatgtgaccgaccaggtcaacagctataccggcgcgatcaaaaagggtgacttcacctgggagctgatcgaaaacggcgtggcgatccgttactacttccccaagcagggcttcgtgatcccggtgcagtacgtgctggaggaggattgcctggctgcttccatcatctctgaagggattgaggaggaggtctgggaggatcccgataccgacccggaaaagaagcagtccgtcatgaatgtggcgcttctgcccttcatgggcgctgcgggcagcgatgacgagggctacctgatcatccccgacggcagcggtgcgctgatccacttcaacaacggccgcaccggcgctgcgatctaccagcaggacgtctacggccgtgacgatgcgctgaccatccgcaaggccgccaccactacctacgatgtgaatatgccgctcttcggcatcgtccgcaatggccgtgccctgatggcagtcgtggaaaacggcgactatcaggcgcagctcaacgcgatggtgaacggccagctgaccggctacagcaatgcctactttgcggtccagtacatccacatggaagccaacaccatcatgcccggctccgagcacagtacggacgtgatgctgcccaccaataccttccgcgacatgggcaacttcaccgtgcgctactatcccctggcggcggagaacgccacctacgcggatgtggctgcggcctaccgtgctcagctggggctaaaggaatccattgcggatgcggctacgcagcagctggaaatggttgcatcgattccttccattgataccttcctgggcgtgccctatgagagcgtccgagtgctgaccagctatgagcaggctgcacagacgctccgtgactttgctgccgagggcttgaatgatctgacgctgcgctatacgggctggtccaagcagagtgtacgcggcaagatggtcactggtcttgatctggacaatcgtctgggcggaaagaaggccttcgatggtctccgtcaggcggtgaaggaaaccggtgcggaaatggtccttgctgtcgacctgattgacatctacgaggacggcaatggctactggtccctcttcgcggcgacgaacagcgtcaacagcaccgccaagcaggtgccggagttcctccagagcaccggctatcaggatcccgaaggcaagccttggtacctgctcagccctgacaaggtgcctgaggcggctcgcaagctggcggagaacctctccggccaggtggacggtgtttctctgagcatgctgggcaacacggtctactccagctttggcaagacgggcatttcccgcacatccgccggtatgtactggcagcaggcgctggaaaccctgtccggcaagattcagaccctgtctgcaaagacagcctctgcctacgctttcccctacattgagcaggtggatgcgacgccctgtgcttccagccgctttgaggtgacggacatggagatccccttctaccagatggtgacccacggtgccatggtcctctataccgagccagcgaatgaggatggcaatgtccgtaaggcactgctgcgggccatcgaatgtggcatgtatccctcctggcgggtgatcgccggggatacggcactgctctccggtacggattatgcctcctggcatgctgcgtcgctggatgcatggcgcgaggaaatcaagaataccgcggcctggatggcgccgctgggcgtctatgcaggcatgcagatgaccgggcatgagcaggtgacggcaaccctttccgtcacaacctatgccaacggtgatatggtgctggtgaactacggcagcgaggatgcagagcatctgggcgtcacggttccggcactgggctacgcgatcaaggaggtgagcgaatgaagcgcatgggctatgagactaagagaaagtggtatggcttttccttcatccttccctggctgatcggctgtacgctgttcttcatcctgcccctgatccagaccttcggctacgcattccagtccctgcaggcaagccccacgggtttcactgccaccgatgtgggctggctgaattttgaaaacctcttcttcaaggacgctgacttcctgcccgccttggtcacttctctgggcgagctggtgcaggtgccgctgatcctggtgtacagcctcttcttcgcggtgctgatcaaggacaagttcccaggccgtaccttcatgcgtgcggtggccttcatgccggtcatcattggctccggcgtgctgatgcagattctgaaggaggacgtgttctcctccggcgtgcgcggaggctcggcgaatacctacctcttcaatgcaggcagcatcgcagaagtcatggcggccatgggtctgggccagggcatcatcaatttcgtcaacgatatcatcaaccgggtgtttgacctgacctggcgctccggcgttcagatcatgctgttcctggccggcctgcacagcgtgcccggctacctctacgaggcctcctccctggagggcgcgggttccttcgcccagttctggaaggtcacgctgcccatgctgaccccgatgatattgctgaataccatctactcggtggtggacatgatgaatgattacagcaatgcgatcattcagcgaatgtattccaccatgtttgaactggtcaagttcggctatgccagcgcgatgtccgtggtgtactttctggtcatcatggcggtgctgggcgtggtggcgctgttcatcagccggttcgtgatttaccaggaatgaggaaaaggaggaatgacatgaaggctggtcaaaagaagctggacgccaaggtgcgcatgcagcgtaccggcaagctgctgggcaggatcgtgttctacgtggtctgcctctgtctggcgtatcagctgctctacccggttttatacatgatctccatgtccatccgtgagccttcggacatgaacgatccttccatcatctgggtggcaaagcattttacactggataatttcgccgatgcaatcaagtctatgaacttctggaacgccttccgggtcagtctgacgttgtgcatcgtatgcggtgtgctggatgtgttctcctgcgcgattgcgggctacggctttgcccgctttgacttctggggcaagaaggcgctgttcgtcctggtgatcttcaccatggtcgtgcctacgcagacgctggtgctgcccttgtacatgcgctggcgctatgcggatttcggcggtattgtcgggctgttcaacgagcagggctttgtgaatctgatcggtacgctctggccgctgattatccccgcagcactggcgatgggcgtgcgcagcggtctgtacatcttcatctaccggcaatttttcatcaatctgcctgtggcactggaggatgccgcctacatcgacggcgcaggcccctaccgcaccttcttcagcatcatgctgcccaacattaagaacgccatcatcacggtgttcctcttctccttcgtatggaactggggcgagtactacctgtccaagcagttcctgggttccacggaccggtcgatcatggtggcgctgtccgccatccgccgcgacctggcgagcttgtcctccctggcgggcacgcagatcggctccaaccccgagaaggtcgccacccgtgtcatggccggctgtctgctgacggctgcgcccatgctgatcatgttcatcttcacccagcgctttctggcggacagcattgagcatatcggcatcaagtaatcccgtgttcctgtgaatttagggcggaaagccttaaagaataaaaaaggaggtatccccatgaagaagttcctgtccctgttcctggccctggtcatgatggccgcactggttcccgctgcgatggcggaggagaccatcaccatcatctggcacaccaccaaggaagtctacgagaataatctggctaccaaccccgacaccacctttgatgctgtttggagcgttgtgcccgccttcgaagagaagtacggcgtgaaggttgacgtccgtgcggttgcctggggcgacatgctgtccaccgctgtgagcatggtcaacaacggcgagtccgtcgacctggtgcaggcgaacgaccagtccttcccggtctatcccgcccgcaacatgctgctgcccatctccgattacgttgacgtgaacgatcctgtcttcaccgccagcgccaccaacgccttcaccttcggcggcaagccctacgctgtgggcgctgtggcgactcccgttgtcctctactacaacgttgatctgttcgagagcaacggcatcgacctgccccgcgacctgtacgaggccggcgagtgggattgggaagccttccgcaaggctgccatggccctgacctttgactccgacaacaacggcgagaacgacgtgttcggctttggtttctgggatactgactatgtacacttcctggcttccaacggcacctccaacctgatctacaatgcggacggcaccatctccaccggctacctgaccgaggctggcatcgagaccatgaccttcctgcagaacgcctacaccgtggacaagtacatgtacgtttccgcttctggcgatgacttcgtggctggcttcaaaaacggcaagctgggcatgaccttggaatacggcttcgcttacatgagcaaggccctgaacggtgacttcgacttcgaggttgactgggttcccatgccccgcggccccaagatggacgtcaacaccggcatgtgcgctctgaccggctggggcatcggcatcacctccgccaaccccaccgcggctgccaacttcatcaagatgtcctgcgagagggaagctgagttcgccaacaagaacaacaccgccctgtacggcgcggaggctgttgctgagatgaacgagctggctgcccgcagcgtgttcgtgccgatcggcatcgacaagtactgggacaacaaccacaccgtgttcaccggcctgcgctccaacgagcccgttgtgaacttcctgaccatcgctgaggagcaggtgaagtccggcttcgaaagcaccatgagcaactaattccaaaaaaaccgccagccggctcggagcaattcgggccggctggcatacgaaaagaatgtaaattcaggaggatgtgccatgttcatgaaggaaagaatcattgccttctgtgctgcactgctgatgatgctccagtgctgtattgctggcgcatctgaattgaagaaggagccggatatgcttctgaccaatgagcgtacctgggatatccgcaacgcgcagtataccatctttgccaagcctccggtgggctgggtcggagatgtgatgcccatggtcggtgatgaggattccggtgagctgcgtctgttctatctgcaggactggcgtgacggaaagcccacctatcacccgttccattcctttaccaccagcgatttcgtgcattacacctacaatggcgaggatatccccgtcacaaacatcagccattacgacatggcactgggtaccggctcggtgacgaaggtgggagatacctaccatgccttctacaccggcaacaatccgcatttctacaatcagggcaagccccgcgagtacatccgccatgccatcagcacggatggattgcagtccttcgtcaagatggagaaggagaccttcaccatggatcaggatgatggctacaaccgccatgatttccgagacccctacctgttctggaatgaggaggggcaggagtggtggctgctgatcactgctgtcaaggacaatcggggcgtggttgcccgctatcgctcccaggacctgaatcattgggagaagatggagccgctgtgcgacatccgcggcggcatcatggagtgccccgacctgttcaaatggggcgattactggtatcttgtgtattccaccgactggacaacccgctacctgcgggctgaatccctcgaaggaccctgggtgcatccgccgatgactgcctttgacagccacggcttctatgccgcaaagaccggcgtgcttaacggcaagcgctacctgtgcggctggatcggtacccgcggcggttactccggcgaattcaaggacacctccgaatgggattgggccggcaatctggcggtgtttgaacttgtgcaggatgaggagggctggctgaaggtcaagctgcccgaaaccatccgcacggcctttggcgagccggttccgatgacctacaaggtaatcgacggcactgcagaggctcaggaaaatgacattaccatcatcggcgacaaaaatggcggcggcgtgaccttcgggaatctcccggacgggccggtgctgatcagcacgacggtggtgatctcaaaggatgcgcgtgcggcgggcttcttcttcggcggcgacaattttatgaaggcgctggcggtggagctgaacatgaagcacgagcagctccgctatgacaacagcctggttgcccgtatgcgctatgtggcagaggcctcatatatcagccgggatatcaataccagcgagcgcacctatcagctggatattctgatcgacaacgatattgcggtcttcttcctggatggccgtgaggcgctgtctacccgcatatataagatgccgcagatgccctgggggttctatgtggcggatggcacagccgttttccagaatatcaccatgcgcatgctcaagggataaggaacgaaggacggaaaaggacatgacgatgctcgaacgggcaaacgcttttattgctgccaacaaggatcaggtaaatcctcgttatcgcccccgttttcatgcgattcagcccattggctggatcaacgaccccaatggattccactttgacggcgaatactatcacctgttttatcagtattacccctacgctgcccattgggacagcatgcactggggtcactggcgcagcagggatctggtgcactgggaggacctgccggtcgcgatggcgccggatcagccctatgacgcagcgggctgcttctccggtacggccaagccggacggcaagggcggcgcttacattctgtacaccggtgtgtccaaggatgagactgaaaaggatattcagcagcagtgccttgcatattttgacggcacaaggattgaaaagtgtagcctgaacccggtcattccctttgaaatgctgccggaaggctatgtgcgccatgacttccgcgacccttgcctgatcaaggtggcagacggctggcgggccatcatggcggcggggcacaaggatggtacccgcctggtgtgctgttcctccagggatctggaaaactggacgtatgacggcgcgtttatgcccacagtcagcctgatgccggaatgccctgatgtgattgagttggacggtaagacggttgtatggtactcttgcgtggaatacgagggagaattgacggacaatacccgtcccgtggtgtacagcgtgggtgatatgaaggacaacagcacgcgctttgagggctccccgctggctgtgctggatcatggtacggactgttatgccacccagagctgtgcaggccatgacggacagcagatctccatcagctggatggcctcctggaacagtaagttccccacggcgaagctgggacatggctggtccggcatgatgacgctgccccgcgtgctgcatctgtgcggcgaccgtctggtgcagcagcctgcaccggcgctggaaggagcccgtcacaacgaggtcaaggcggtgcagacggtggatgcggcccatcctgcagtgctggatgtgtgcgccaagcatgcggagatccaactggaagcggaggtgtctgctgccaggacgctcaccctggagctgatgcgcacctgcgatgaagccgtccgcctcacctgggagaacgatatgctgaccctggatcgtacgacgctttccctgtgcagcgacagcgagatgaccaagacgatgtccatgccgctggtagcaaaggatggccgcatcagcctgcgggtctatgtggacgcctgtgcggtggaggtctttgcagagggagaaacgatgaccgcgctggctttcccggtgggagaggattacggcgtggccgtcaaggcggaaggcaaggcggatgtgacgctgacctgctgggagatcgcctgagagatcggaagggagtgttatgtatggccgatgtggttgcgctgggtgaactgctggttgactttgtgtgcaaggaaacggatgagatcggatatccgacgctggtaggcaagcctggcggcgcgcccggcaattatctggcagcggtgaagaagtacggcggctcctgcgcgatgatcggcaaggtcggcgaggacgcctttggccgtctgctgtgccagacccttgcggacgccggcatcgacctgagcggcgtcatccgcgcggaggactgcttcacgacaatggctttcgtcaccctggatgaaacgggcaaccgccatttcagttttgcgcgtaagcccggtgcggatatctgcctgcggtcggatgaggtcaatgaagctctgatccgggattgcagggtgttccatttcggcaccctgtccatgacggacgatccggcccgggaagctacccggtatgcgatccgcttggcaaaggcgcagggcaaggtgatttcactggatcccaacctgcgcaagccgctgtggcccagtgaggctgcggcgaaggaagcgatcgaatggagcctgcatcaggcagatgtggtgaagatcagtgatgaggagatcgacttcctgtggggcatttccccggaggagggcgcgcagaagctgcttcgcgaatacggtgtgtccctggtatatgcgacgcagggcccaaagggctgccatgcagcgaacaagttgggctgcgtcaccgtggaaacgcccaagggcatccatgcggtggataccaccggtgcgggcgatatcttcggcggcagcgccatgagccagttgctgaagaacggcaagcatcctggtgagctgatcgcggaggagctgaaggacattgtccggtttgcctgctgtgctgcgagcctatccacccagaagcagggcggcatttccagcgtaccggaggaagcggaagtgcgtgctctggtgaatacaatggcataatcgcagaagccccaaccgggaacctgcatgtatggggctcatccgcaaggacgggtcccttttgcatatcaatcagtaaaggagcgttggcatatgagcaagcaggaaattttctacacatcccccaatggtgcgggcggcgatatcattcccttttatgataatggggagtaccggctgttcttcctgggcaagggctggacctgcgtcagcacaaaggatcatctgcactttcacgatgaatacaaaaccggtatctatggcggtacgggctccgtgctgaaggtggacggcgtgtaccacatgttctactgcaagtttaccttccacccctacatgcgccagtatgtctgccatgccaccagcgaggatatggtcaattgggtggagcatcctgcggagaccttccagccggatgatgtgatctacgaaatgagcgactggcgcgatccccacgtcatctggaacgaagaggagcagtgctggtggatgctgctggcggcccaggccaagggcaagacgatgcgcaaaggctgtgtgggtctgtgtacctccagggacttgacacactgggagatccagcagccgctctatgcaccgcaaaccaaccagagcgccagcgaatgcccggacatcttccggtggggagattggtggtatctgacctactcagtgtacactgatcggtttgtgacgctctaccgcaaggctcgctctccccgcgggccctggatcaccccggatgtggataccttcgacacccgctgcttctatgccgccaagcacgccactgatggtgcggaacatctgatgtacggctggaatcccacgcgcgaaaagaacctgtgggatttcaatccccagaagtaccccgggcaggattacaacacctgggactggggcggaacgatgattgcccataagctgatccaacaggaaaacggcgacctgtccgttactgtgcctgaagcagtggatgcagccttcaccgagcctgtcgggctgaaaatgactcccttgaacggcagttggcagctgggtgcagacgaagccgaggtggattccccttatggctatgccagcctgctaatgaaccgggtgccggagtgctgcaagctggaaatgacggtccgctttgataaagcgccccgggaattcggtgtggcgctgcaggtggatcaggactttgcaatgggttactatctgaacttcgagcctaagcggaaccgcgtgcagtataagactggcctgagaatgtacgaggacggcggcaaaatgttcccctacgaagtggagcaggagcggcctatcaaatgggaagcaggccgtgattataaggtccgtatctttgtgcaggggtcgatcctgctgctgtatgtggacgatcagattgccttgggcacccgtatgctggacaggagcggcaagcaattcggcctgtttgtgtccgacggcagcgcatcctttaagcagatccgtctgtgggaatgatcaggagggaatatcatggcacagatgcattgtaattttttctcctactctctgggctacccggtagatattgaggtgacgctgccgtctttcacgtcctgcaacctgcatttgccccacacccacgcgctgccgggaaaattcccggtgctgtatctgctgcatgggcatagcaatgactatcaggcatggctgcgctacaccagcgcagagcgctatgcggaggaataccgcatggctgtggtgaccttctcctgccacaacaaggcctaccagaacgctcctctgggggagaatttctatgacttcctcaacgaggagctgccggagtttgtggaaaactacttccccgtttccgacaaatctgaggagcgctacattgcgggcctgtctatgggtggatacggcgcgctgctgcacgggctgaccaatcccggcaaatatcgtgccatcggcgcattttctcccggtatcccggcagaaaatgcagatcctgatctgaacaggatcgcccggttcaatctgtttgatgtaacctgcaaggcgctggcttccggggaaaaactgccggatctgttcatgtgcatcggcgatggggatttcctctacgagcgggtgacaagctaccgcaaggccttcctggacgggtggacggcatcccgctgccggtatgatgacgttcccggctatgaacatgaatttgccttctgggataaggaactggtggaattcctggagtggatccgccgggaggatgcgtacagcaaaatgggcaagaacaaggtgtaaggcaataccgaacaaatgagttggtgcggtggcgaatgcatttttcgtcagatgcaattgcagattttgaaggtttactggcggtaaatcgagaagtctgcaagcagcagatggcggaaaaggcatcgcctacgctgccaacgaattgtgcggtattgccgtaaaaatatgaaccgctgcttatgcctcagcggcacaggcagcggttcttacgatacggttcagaagacttcaatgcgggagttaagcttgatggttcgtttggttgcgtcaggattctgcatacggtcaaacagcagcatacacagggaggatgcgatctgcttgcggctaacgttgaacgctacgagcattttttcgttaataaccagatcatgggtggtctcaaacactacaagcccggagttttccggcagcgtgatttgctcatcccggacggcattcatcagctgaatggcgatcatggcattggcacagacgaacacctcgggaatatccagcgaacgaagtgcacgtcggtaggagtccggctgatgcatcaatttgtccgaagtgaggatggagtgcttttcatggctgcccagtcggaaatcggccagtgcaaggcggaaatagtcatatcggttgcggaaaccggcacagtggtcaggatctccaacaaagccaaaccgggtatatcctttctggtagagcgtttcaatagcaacatacagccctcgctccccctgcaggacaatatcaaaggggatttcgatgtcatcggtgtcaatggcgcagtcaaagaatacacagggcttgccgcattccacgatcctccggacatagtcgtgatccagcagctccagaccgattacgccgtctgccgactgcagcagggaaggaattacaccacgccggatttcctcgggggacatatactgcatggtgatcgtggcgccccgggctctggcaagatgctgcagctgtaggttcagcggcccgaagaaggggctgatcagctggtgatccttgcagatcagaaggatggtggagggttccgtgggctgcagccgcgtcacatgggagcccatcatcttataattcattcggacggcctgatccagcacgcgctggcgggtttcattgctaatgccggcactgccgttcagggctttggataccgtattgcgggacaagcctaaagcattggcgatgtcggcaatgctgactctgttggacatcgtgaaagcaaccgcctttcttctcattggaaggaaaaagaaaaactggaagagcatatcaagtataccatttgcaacgattgattgtcaaatgtaacgcggatgcaatattattgagtacatttgccccatgtacagtgcagaaagaaagccatggaggggatatggcggaacagtggcggccaatcaaacagaagtttgatgaaatatatgaaaggttcattgaacatattgagcagcggggtgttgagatcccggacagtgggattctggctggtccggtttgccccgtcaggccgatgatcgaggctggtcagatccgttggcgggacatggggtgggacaacgcccatttcccgttggattatcgtctgttgatgcagaagggcattcctgggatcatcgcatgtgccagcgaaccgcaccaggacttgacacccacgcagcagatgtaccgggcgctgattgccgattgctggatcagaattcgggaatatgtccgccagcatggggaggctgcgctgtccagggcggcagagaggcctgcggaggctgatcgattgaagcgaatggccttcaactgcctggagctgaccagccatgccccggaaacctttgagcaggggttgcagctgttctggttcatctggaggctgagaagcaactttacctcctgtatcgggcgcatggatgtgcatctgcaatcgttgtatgagcgggatgtgccgcaacggatcagccgggaagaagcgttggcgctgctgtgcgagctgtgggagaagctcaatgcggtgtacgcaggcgatacgctgatgaatctgatgcttggtggtgtggatgcagaaggaaaggatgtgtccagcgacctgtcggtgctgatcatggaagcgacgatgcgggttgcccggccggaaccacatatcaacgtgcgcatccatgcaaacagccgggcggacttcctggatgcagcagcccggctgatcgccatgggccaggggcagggtgtgctttattatgacgagaacatcatcccaaacctggttgccagaggggtgccgctggaatatgcccggcagtatgccaatgacggctgcacggaaatcacctttgacggcctcagcggcatctggttctggcagatggagtctgtcaagagccttgaactggcgctgttccgcggccaggagaaccccagtacgcccttcaacccctatacgaaatgggcacatttccagaaaccaagcgtgtaccgcacacgcctgacgctcggccatgacagcggcgattttgcccggatgaccagctttgacgaggtatatgcagctttcctggatcaatacggttatcagatcgaccgctatatggatgtactggcccgggaagttctgaagaatgcggcggaggatgtgtttcacacatctcccatcgtggcgggcttaaatgagataacccttgataccggcgtggatcccatgcggggcggctgggcggtagagaattatcagctgctgtcaggctccattcctacgctggcggatgctctgtatgctattcgagagggcgtttttgaacgcggtctgtgcacgatgaaagaactgatccatgcgctgagcgtggattttgaggggtttgaagaccttcgccttgctttgaagaagctgccaaagttcggcaatgatgtcgatgcggtggatcagctggcagcagacctagcagctttcttctgcgaccgtgtggaaaactatcctacgccgctgggcgtcaagcctctgccgggcatctacaacattgatttcaacactttcgcagggtctgtcggcgctacgccggacggccgcaagggcggagatctgatttgcgaacactattcacctacgccgggcaatgcgaaaaacgggccgactgctgtcattcagtcggccgcgaaggcagatctgaagcggggttgtgcgtcctcacccttgtatctggtgcttccccggggccttggtgcggtggacgccaaactgatccggcagatgatgaagggctgcggtgaagccggtttgccggtggtcagcatctccatctatgacaaaagcgcgctggaggacgccctgcttcacccggataagcatgaagacctggtcgtaagggtgtggggcttcaatgcgcgcttcattgatctggatgaaggcctgaaacgtcatgtaatgagccgcatcctgtaaggaggaagatatcatgggccttgtaatggatgttcagcgtttttcgctgcacgacgggcctggcatccgggcaactgcctttctgatgggctgcaacctgcgctgccggtggtgtcataatccggaaagctggctcatgacccagaggatgctattctacgggaatcgatgcagacaatgcggaaactgtgtgccattgtgccccaagggggcgcattgctttgatgctcagggacatcatatcaacctgcagctctgcataggctgcgaaaagctggagcagtgtgcatcgtgctgtcccgtggaagccatgatggtatgcgggcgtgaatatacgccggaggagcttgtcagcctgctggccagggatcgcatcttctacggagaggatggcggtgtaaccttttccggcggtgaagcgatgctgcaggaggaatttctgctgcattgcctgatgctctgtaaggcgcaaggattgcacatctgcgtggatacagctgcaaatgtttcccaggacagcatccggcgcattgctgcgttatgcgatcttttcctgattgacctgaaggcgatggacgaagcgcgtcatcagcggctgtgtggtacggacaaccggcagattctgaagaatattcgacttttgggggaaatggggaaaccaatctggatacggattccgctggtgcaaagtgaaaacacgcagccagaggaactgcattcaatggtggatttcctcatggagatacccactgtccagcaggtggatctgtttcctgtcatgaatcatgcgcaggataagtatcgggcgctcaacctcgaagatgaacgcttcaacgaaggaaccgatgggcatctgttggttgaaaatgcacggctgacactgcagcaaagaagcgacagaagactgaatgtgcgcagcttgctataatcagggagagccggcccgagctgtgttatatcatgcatatcagcaccgcctagttgatctttggaatcatgctgatcagggaagcaaagacctaaaaatctttcgacgcgtaatatcataggcttgatactgttcccgctttgcggtcatcaattcgcggatataatcttccatgaattgaaaatcaggttccccatcatcagtcacaggaagcatgactcgcatctttttaatacggatgtcgtttatttcgcggttgaaattgaaatttgagccttgctgctccaaaactgtaatcaggaacaagtaaatatactcatttgcttctttacattcaagactcgtaatatggtcgctcgccacaaacgcaaatggctcatagaacgcggtaccaacacttccgctattggcaaggctgatgcaattcttaaacactcgcgttccctcagttgcttctatgtaatcatcgacaccattattattggcagtggaggacacatagggcactatacccggaatgtggtctgcattttttaatcgttttcctcgctggatattctgaaatatttcagggacagcaaaatccttccagtctcgttcatcaagcttcaccatttgcggcaccccctgtgaacaggtattcccggttttgcatgatcatggagaattcaaagcttagataatccccaatcgctttctcaaaatctgcttcagttggaatctcatcgttaaagtagtagaagctgtgcaaccattcatcatcggcctgcgccgttgattccacacaaaacttgctcggtgcctttgtgcgaccaaaccacacatccaaaagatgctgctttttatctttggcggaatcaccttcaacaaggccaatgtgtgctctgacctcgtacccatcattcctgaaatcaataaacttacatattttatcagtcggatggggctcatgagcagtaaataccgcaataaccggatttgtgccgactccgtaaaatgtatctgtgttgcaggtaatcacaccttcaagcgtgtgatgcatcatgatgctctctttgaagtgttgctcatcttttgtctttcctgtcatggaagactgtgggacaatgaccgccgctttggctcctttcacaagagaatcaagaagatgctccacaaaggagagttcgtattggcttgggtcggcttttgttccctgcgaatacggaggattcatcatgccgattgtcgcacccttttgctgcaccagcgccggattctgctttagaaagtcctggcattgaatattgctgttgccgtcttctctgaggatcatatttgtacaggcaatggcaaacatattgctttgtaattcaaagccgtgaagctgctttttgcgaatgttttttcttacagtctggtcgtcacccgcagcatagtccattctgtgcatagcagcgacaagaaatccagccgttccacagcaggggtcaagcacgatatccgtcggctgaacatcaagcaggtcgcagaagagttcgcagatgtgtgccggtgttaaaataatacccaacgactgcccatcaccaccgctatagctcataaattcgccatagaagcggccaatgaagtcttccgcagaggatttgtatttgatactatcgaagacccgttccttcaagaactccgtgtaaaacttcaatggcgtcttcccgagcttttcgtctttttcgttcagccgtgcacttgtgcggatgatagcaaattcgctcataagcttatcacgttttgcgtccggtccgacattggaggatttcaggcggcgctgtattgcctcgcagatcaactggccgtctgtcgtaattccgtcgcctttgaggttgtcaacagaaaagaattggtcgtccaatgcgagaagtataccagagaccacgaggggcttgtcctgatccttcagcgatccgtatgtacgtagatattcatgtagctccgcagcatccttgaggatttcttctgtcgtcttttcaacgtctgttttctcctccaggacgttccgaacatagtattcttgaatgttctgctcagtaaacatggcaaaggactcaacgtcagggaggtgtctgtagctttccctatcgtcgacatacagcggggttattttgtgatgtctggaatcgccggaaacccctatcgcaaacacctttctgaatgaacttttctgcgcaatgtgctttgcatagaaatatgcaccattcactgcgaagtcagttactgctttcgtagaggtatcaagtatcccggaatcagtgagcttgatatgctgtcccagatcagctttgtcctcaatgacaataacaaagtcgtttacaacagcaacatactccggaaacccagtctttccggtccctcttttggaggcagaagaaagggcctcgccaatctccttaacatcgcttccctgtggcgtgtattgaatgccgcatttatcgagttgaccggctacccataaatcggtctttacttctctctttgacatgttaatcaccaatccttatccgtacatctcaatcgaatatcggtcatctacagaatgttagttgcagactccgccgcccccaagaacatcacatcataaatcggcaaatacgtgatctttccatttgtcgtaatctcgcgggcattcgacagaacaaaagcctttttcacatgataatcatcatttttcacaaagttattcagcgcgctgtgaacggtgtaatccttgccggacttcacctcaatgggaacggcggagaggctgtcataatcatcaatcagataatcaacctcgcctttgctgcggttatcgtaatagtacaggttgaagccatgggcgatcagttcgctggcaacaacgctttcatagaccgatccaaggttgatgctccgctcatcttccagaatcgcacggatattgttgccgtacaggatagcggtcaaaattccgacatcgttcagatacagcttcagcaggtttttaccggaggattcaatcagagggaaggtcggtgttgagatggcttgcacgtttaacgcaatgcctgcgctgatcaaatactcgaattcatcctcatagttggcgaaggtgctgccctttttgccttcgatccgctgcgcgaccacgcgcttctttttgttttccaagttggagggaatttgatcgtagatccgacggattttcagcttgttctcctcatcgtacttggaagcgtcagccgcatagtaatcgtgaatctcgcgctggatttcccgcacggcctggatattcttcgtgtccagataagcattaaccgcagccggaagcccacccaccagaaggtaacgcttgaaggtgtccatgatcttcgcatgcatggcctcatccagcgattcctgcgcctcaaacttcttgcgcagcgcgtcaatcgcaaacgcattcatgccgttggcataaaggaattcctcaaagtccaatgggaacatacgcaccttgcgaatactcccaataggaatggaagtggtttgcgcaagcgttacgcccagcaaagagccgctggcgatataggtaaaccgattgtcgtcccgaaggaacttcagcatcgtaagcaaatgaggataagcctgaatctcatcaatgaaaatcagggtatcttttgcttcgcccatcagttcacccttgattgcgctgacacgaaggtagaaatcatctatcgtttttgcgttctcaaacagcctgtcgccgatggaatcttccagcatgttgatctcaatgaaattgggaaacagcctctttccaacatggcggataatatatgtttttccgacctgacgcgcaccgtcaatcaataaaatgcgctcagagtccgatcgcagatgctcttcaatcagctctgcgatttttcgtttgagcacgattaatcacctcgcgagaatttttcaatgctattataacctcaaatagtcaacttttcaatatgtattttgctttctaaatcaaacttttcaaactaaacggtattagacagaccgacagccgacagtcggaaggagctagtcatgataacgctttattgaattcaaaagtgcctgagccgaattcgccaaggaaagctttcaattagtgtttccactttgctttgatttttgcataaaggtacagcagacaatatatagccgacggcaggaggtgatgctggcatgattcgcgggctgattgatggctgtcgatactcgtgaaaaggtatttcaaaaaaatttccgccagagatttccaaaaagcacgattttggacattaaacagtgcggggagaaaacgacgacgatccgcgttctgaaaaaatttctggaggtggtgtcacttgcccggaattatacataggagggtgaggggtatcattaacagccaggaaaggagaaagcctcacggggatccaaagcgaaaaaattccacttaccggtgtcactttgcccgaatttttacatataaggatgcgggggataaatagcgggctggaatggaggcagtcttgcggagtcccaaacaaattttcagacaccggtgtcactttgccccaattttcccatataggggtggcggggattacgccagagagaagaaaggacgggaaatcatgatgaacacgagacgaaacgcagatgcaatccggcagctcatgaaaagcccggtatgggctgacgatggagcagtgaagctgtatctctactgcctggccatggcaagccataatcagtattgttggcgcgggctgcagctccagccgggcgatatgcccctgtcagagcgaaaaacggcaaaagcgctctgctggtccagggacaagctgcgccgcaggatgcggatgctggaagcgcagggcatggtgacgatccaatcgatccccaacgtgggaacaatgctgcacgtggtgaactggcctgttgctgacactgccgtgttgaaaaatggaccagtttggctccatgatggagccatcacagaggtgtgggatgttcaggattgtaccggttacccgtgggttgcccagcaggcatggtatcaggatgataccagttaccaagcaaccggtatcgccgtgagaccaacagatgctcaagatcagaccagctccgcccaaaccggtacattggtaagacctaacccatataaaaagaatatatatacttcttctttagggtatgggatgaagactgaaccagatcgcttttcggagatatggtttgcctatccgcagaacaggcggataaaccgtgaggctgcagcagagctggtggagaaggcactgaatgacggcgcgacagtggatagcatcctcgcagcgctggaagcagagaagcaaaccgtggattggtcgacagcgaatggtcagtatgttcccggtattgtgaagtggctagagcgagagccctggcggagctatgcggatgctaacgtagctccccaagttccgaataatgaagaacaatgggaatcatggtgaaccattagccaagacaaaaaagctgagccgtttcattcatttgtcgctggcatcgtcagcgaagcgcatcttgacaatcagggccacgtttccagatctgtccaaaccgcgaatatcttcctcttcggaagggagcgccgaaaggaccggcagtgagccaaacaaggtttcttgccagaggcagcagtgaaataagcccgagccaaactaaaacattgaaacaatatacctgaattcattggattaagaaagaagaaaggaagataaacatgagtgaaatgcaaaaccacactgttcacttcagtttcgataccacgccggaacaagctgctatcattcagcaaaaaatgaaaaacgccggcgtcaaaaacaaatcaggattctttcgcgcgatggtgttgaatggttatcttttgcggcttgacctgcctgagcttcgggaagcctctcgccagatgagtattctttcaaacaacgtaaatcagattgctaagcgaatgaacgaacatggaagcatctatgaaacagaaatcgatgagatcctggaaaaacaggaggagattactcaattgataagacaaatctatgaacggttggaggtactttatgagtgataacatctttccttatacgcaatcttgctccgatccagcggaagcaatcgcgttatttcgtgaaatctaggacggaacaatacgcagggaacatgcacaaccacagcgcttgcgctggcagaaccggggcttgggggcaaagcctaccaacaagctttttgcacaatctagcagatttgcattgcttgctactattctccggggctgttttcaggagagcatgaagacgaccttctgaaaaaataaatttcatttcgtgaaaacttttggcccgggaaccccagtaaaatcgtcattacaagaaatcggaaaggcgcaaaaacgccacggaagccttatgccgcaacgctttccgaagttttccaaacgtgaaaacgattttggaagccatgtgatatggtgtcagagaaagccgaaatcatgggaattacctctatgacttcccgtacaggaaaagctatcctgtgcgttcagataaacattgctctgcgtcatgtcgccgcgagacatgatccgaacgcagagcagcacaacttttcctgactgtgtgatcggacgcacagcaggatcacagattacgataatcagacgaaattaaacgaggagagagcaaatgaacaatatgctgatccggaagatcaggaccctggcacacaaggaatgctgcaattacatcgatggaaaatgtatcgaagatggagattgtgccgtcatcaatccgcggtatccgacgattcatgatggagctatcgactgcgattattttctggaatgtgtgctgcccatcaatccggatttgaatcggatcctctgggcagagctgcttcgggaagaagatgtgattcgtccgaatgagagaacctgcgcctggtgcggcggagctttcgtccccaacagcggccgacagcaatactgcctgcactgcaaaccacttcatgagctgctccgtaaccgggacaaacagcgcagctactatcggcgaaagcagatgaaaagcacgtgatttgttaccggttagcacgtcagaaagccttgcatagcagggctttccgtggctggttcaagcatgggatgaagaatgaatcgtccccgtcaaaaattggattctaaccggtaacaaaacggcaggtgcagtcaaacagaagaaagtttacaactttttatcgctttaaagcgtgaaagaatattgaaaatgatgagaaacaggctttatactaaagatgaggttattcaggtcgttgaggcagcgctcaacgctctgaataatcaaagcgctcccgctcgggagccggagcaccttgacaacagcacatctcagcaatcatcgccgggcacgaaaatgacattgtccgtccgggaagccgccgagctgatcgggatcagcaagccgaagatgtacgagctcattcacagcaatgagatcccgtccatccacgtcggaaagaagattgtgatcgcccgacaggcgctcatggactggctgtcggaaggagatacgaatggcaagaaagcgtgctaacggcgaaggaaccatcagaaaacgggctgacggaagctgggaagcccgatactgtgccgatggaaagcggcattcggtctatggcagaacccaggcggaagtccggaagaaactgaccgaagtctccgtcaccatcgaccatggtgatttcagagaggacagcggcctgaccctcggccaatggctgaccatgtggcaccgcgactacttggggaatgtgaagctcggcactgccgatacctacgaaatgcagatccgggtgcacatcatccccgcgctcggagacgtcaaactgtcg

SEQ ID NO: 963 - DNA, 21009 bp, Unknown
  16S sequences of unknown bacteria
atcatgcaagcatgaacggctttttgaccttttgaccctggcatcatcatcttatacctcaaacagcagatcgccataggacggcatcggccacatctctttgtccacgatcatctccagcttgtcaaccggatcacgcaactctgccatcgctaccgttacaacatcatggaagtatcttgcctgctcctcgccctctgcctttgtagcagcggtctcagtcacatcgctcagctttgcaagtgctacctttgtgtcggagagcagtgcgctcgtctcattcagcagctcgacctgtacagatgtctctgcacctgcagccgtcactgcattgattgtgtctgcaagcgtctttgtatacttgatgactgccgggatgatctgcttgcttgccacatcgatcatcgtgcgtgcttcaatattgattgccttagcatagttttcatatttgacctctgcacgggactccagctctgcctttgtgaatacgccaaatttgccgaacagtgcgattgatttctcggtcacaagtgccgggatcgcatcgaccatggacttgatgttcggaagtcctctgcgctctgcttctgctacccattcgtcggaatagccgttgccgttgaagatgattctctgatgctcacccacgtactgcttgatcagatcatgtacggctgtatcaaagtcctctgccttctccagaatatcacatgcctcacaaaatgcctctgccacgatcgtgttcagcacgatgttcggagaagctacggaatcgcgggagcctaccatacggaactcaaacttattgccggtaaatgcaaacggtgaagtacggttccggtcggttgcatccttcgtcagatccggcagtgtcttaacgccggtctccagcacgccgcccttcagggaatgagttgccataccggtactgatcagctgagatacgacatcctgcagctgctcaccaaggaatacagaaataatagccggcggtgcctcgtttgccccaagtctgtgatcgttaccaggatcagcggctgattcacgaagcagatccgcatgcttatcaactgcctttaagatgcaggccagcacgagcaggaactgcacattctcgtgcggggtcttgcccggctcgagaagattgatgccgtcatcggtcgccagagaccagttgtcatgtttaccggagccattgacacctgcgaacggcttctcatgcagcaggcacttcaggccatgctcacaagccacacgctttaaggtctgcatcacgatctggttgtggtcaactgctacatttgcctcagagtaaatggtcgccagctcgtgctgtgccggagcgacctcgttgtgctgtgtcttcgcggtaacgccaagcttccagagattctcgttgacatccttcatataagaagcgattctctgacggatcgttccgaagtaatgatcgtccagctcctgccccttcggcggcatagcgccaaacaaagtacgtccggtaaagatcaggtcctttctctttaaaaacttctccgcatctacaaggaaatattcctgctccggtccaacggacggcgttacttttttcgaagtcgtgttgccgaacaggcgcagaacacggagtgcctgctgattgatcgcttccattgaacgaagcagaggggtcttctgatccagtgcctcaccggtataagaacaaaaagcagtcggaatacagagcgttgctcctgcagcgtcatggcgtacgaaagccggtgacgtgcagtcccatgctgtatatcctctcgcctcgaaggtcgctctcagtccgcctgacgggaaagaagaggcatccggctcacctttaatcagctcttttccggaaaactccatcaaaacagaaccatccggatttggagatgtgataaaggaatcgtgcttctcagcagtcacgccggtcagcggctgaaaccagtgtgtataatgagtcgcacccttctcaatcgcccagtccttcatagcagctgcaatgacatcggctgtcgcaaggtcgagctcttttccttcctcaatggtctttttcagtgccttatacacttttttcggaaggcgctcctgcataactttgtctgtaaatacatcttcaccgaagatgtctgctacattaaaatattcgctcatgtcctctcctctttccatataaaatttatctgtggcggatcccaccacttgatatagtaaaatagggcgttccacaaacctctatttatggaacacccttgttctgtgtattaaaatactctattttctgcaaaaaagcaagcagatttttacttttcggtattttcttccaaaaatggatcggaaggctcatgttttttcagcacacgctccagaaattcagaaaacaaaaacgcgaccggtcccggaataaaaaagatcaggatcggaatccgataagcaaacgcccccatacataccagcacaagcgcaagcgcaagcgtcgtcagaaaatagcgcaccaccatgtataaagacagcttcaaaagccagcccgggctcatatcaaatcgggacaacgccggaaagagataacaggctgccattccgatataaattgcagctgccgcatacaggcagataaaaaacagcccgacatacccgcttgtcttcgccatcaaaatcccgatattcagacgcaggatgacagatactgccagtatgatcagccacaacactatacccggcaccagattctgccggaaggaacgaaaaaattcctgtactgcatagccgttccgattcttcacactcttgacggtcgcgtaatacagcgccgctgaggatgccccgatcgtaatgatcggcaggctgcagaggatccacagaaatccgagtatcatcagatcaaaaatccggctacaggcagcggtgaagccgccttcaaatccaaatatctccttcatacctgctcctttctgtacataatccctcccgggcaatccgttttatttttcttcatttccgcagcaagatacgttcatgcaatgcatggcatattcctatctgcgttcaaataccggcagctgatccagcggtgctgccacagtgaccgttgttccgccttcgtacacctctccggtaaagagatgcttccagcttcccttcggaaggtagagcgtcctttctctctcatctgcatataaaatcggtgctacgagaatatcactgccaaacatatactgatcttcgatctcccatgttttcggatcatccgggaagtcatagaacagtggacgcatgaccggcgtacccttttcatgtgcttccttcatcagaccgcgcacatacggacgaagcgtctcgcgaagctccatatattttttgcaaatctcatagacttcctcaccatagctccatacttcattttctgccccgctgttcatctttccgcctccggtcgtaccaagcggctgcttgaacggctcacggaagccatgcagacgcatgaccggacagaacgtaccaaactcaaaccagcgcacgagtatctcgtggaacttcggatcatggatgtttccaccgtggaatccaccgatatcggtcgtccaccacggaatcccggccagtcccatattcagtcctgctgtcagctgattacgaagggagcggaacgaagaatcgatgtctccggaccatacgagcgcaccatatctctgactgcccgcccatgcgcaccgaagcagattgacgatattctgctgcccttccgcttccattccttcgtatgccatccgcgcatattccttcgggtaaatattgcctacctcaagatccgcaccacgcaggtagcgatactgttcatactcatatccggtaaattccggctccgcctcatccagccagaagatgtggattccattctcataataattcttcttaatcttgtcccatacatatgcacgtccgcccggattcgtcacatctatgatgcacgcatctccgagctgaccgagccgttttccgaactctgaacgggtcagatagcccagctctgccatctcttcataattctcgcttccggcatctacggtcggccagatggataccatcagctccatacccatttccttgagttcccgcaccatcgctgccggatccggccagtagtccttgtcaaatttccagtctccctctgccggccagtggaaaaagtccgccacaatgacatcaaccttcagtccacggcgatgatattcccgtgccacctcaagcagctcctcctgcgtctgatagcgcagcttacactgccagaagccaagtccgtactccggcatcatcggcacttttccggtcgcatttgcataggcctcctcgatctctgccggggtatctcccgctgtgatccagtagtccatctgcttcgtggatttggaaatccactcggtcacatttttgccaaaggtcacgctgccgatcgccggattgttccacaaaaatccataaccgttgctggaaagtgcaaacgggacacttgcctgcgaattgcggtgtgccagctccagtgtacagcccttgacatccagatacggctgctgatactggcccattccgtagagcttctcaccctcgattgactcaaagcgaaccgtcaggcgataattgtctgtcccgatgtgcggctcaaatgtgcgcggcacaatctccagtgcgctgttgaattcctttctgccctcttcggacatgccgcggatccgctcatactcctcgagcagcagcctgccatcctgattcagaaagcggagcttgccggtacgtgtcagttcacagcgaagcttgccattttcgatgactgtatccgtgccgctctcataaatttttacttcacaatcatcctgcagaagcagtgcggaggtctcatcctccttcaaaaattcataccgctgtgttgcacgtacccggaagctgttcttcccccacggctcgatacacagcagttctttatcaagcctgcggtacaatttatttccttcctgtctgatcatatatttcccccatatcatgtgctaatgcgattcaacctcacacttcgagtgtatatccttccctcgtaaacagtggaatctgatcaagcggtgtcgctacggtcacagtctgtccaccttcaaaagcttccttcgtccatacgttggtccaccttgtacctgccggaaggtaaacctccttcgtcttctcaccgcgctccataaccggcgctaccaggatattcggaccatacatgtattccttttcattctcccagcatacggtatcctccgggaaatcatagaacagcgggcgcattaccggtgttcccttctcatgggcctcacgcatcagttctcttgtatacggacgcatcgtctcacgaatcgagatgtactttttgcagatctcgtatacctgatcgccgtatgaccatatctcattcggtgcaccggatacgcactctgcgccaccggtcgtgccaaactgtggctgatacggcatacggtagccgtgcagtctcataaccggacagaacgcgccgtactcaaaccagcggacaaatacctcatgataggactcatcataaatattcgctccgaagaatccgccgatatccgttgtccaccacggaattcccgcaattcccatattcagtcctgccgcaaactgattctggagactctcaaatgtggaatgaatgtctccggaccatacgagtgcgccatacttctggctgccggcccatgcgcagcgcagaaggttcacgatattctcctgaccctctttcttcataccgtcgaagaacgcctgcgcgtacatcaccggatacacatttccgacctgtacattcggtcccaggtgataacgatagttttcaaaatcatacaccgtgtactccggctccgcctcatccagccagaaaatcttaacacccttgtcgtagtaatttttcttgatcttctcccatacgtactcacgtgcctccggattggtcgagtcaaactggatcgtgttgcccatataggtgttgtcgatccgcacacccttttccacgcgggtcagcagtccctttgccttcatctcgtcaaagttctcgctcttgtagtctaccatcggccataccgataccatcagctcaatgcccatctccttgagctctgcaatcattgcatccggatccggccagtaggtcggatcaaatctccagtcgccctgcttcggccaatggaagaaatcgaccacgatcacatcgatcggaataccacgacgatgatattctcttgccacctcaagcagctcctcctgcgtctgatagcgcagcttgcactgccagaagccaagtccgtactccggcatcatcggcaccttaccggtcgcatccgcataagcctcttcgatctctgccggtgtatcgcctgcggtgatccagtaatccagtttcttcgtggactgtacctgccaggtcgtgatgttcttattgaagctgactcttccgatcgccggattgttccagaggaagccgtagccaagcgaggaaagtgcgaacggcacacttgcctgtgaattacgatgtgccagctccagctctgcacccttgatattcaggaaatcctgctgatactgtcccataccgtacagcttctccttcggattggaaacaaagcgcatagtcagctcatagtctccgccgatgatcggcttgaactctcttgcttcaacctccagtgagcttgtcgtatctgcgaacatatcctcacggttacgtacatactcctctaaaagcagctcacccttctggttgtagaagaagagctttccgatgttattgatcaccgcacggatctttccgtttgtgatttccgcggaatattcatgaattgtcaccttcgaatcggtcttcttcggattaccctcgagcgcccacagctcctgcggcatttccggcattttcgatgcgcggacacgcaggctgttctcgccccacggctctacaatgacgcgctctgcatcataacggtaatacagtgcaccgtccttctcttcaaaatatccaagcaggaaatggttatccgaacgaaaatccccggactccgctccttcttttttaatgatatctgtcatacaaataccctccctgttttttatatatttttgacactgatttatctattttactctttaactgctcctgccgtcaatcctcctacgatatacttctgaaggaatacaaacagaagaataaccggcagtaccagaatggttccataagccatgatacagttccacttggttccccatttactctggaatttataaatgttcgcggtcagcggacgcatctccggctttacgttgaaggtcatggaatatgccagatcgttccatccgttcaggaatgaaatgacaacaacggtaatgataccggtcttgatcgccgggatcataatcttgaagaaagatcgcagaacaccgcagccatcgatccgtgccgcgtcatccagcgcagtcggcacactcttgaaatacgggcgaagtgtcacgacgataaacggtaccgaaccggaagaaattgcgagtgccggtccaagataagtgccaagcagatgcagcttgttgaaaatcagatacatcggtgtcagcatcagggaagccggaagcatctgggtgacaaggaaggtcagcagaaagcccttgctgcccggcacccgataacggcccataccatatgcagccggtacaccgaatgtcatcgagagcaccatggaaagcagtgcgataatcatactgttcttcagggacttcaaaaactctgcatcggtaaagttctgaatccagggatccagtgtaaagctatgcggataataagtgacaatctttccgaacgattctgcatctgatttaaaggacatcgctaccagccagtagatcgggaaaagaaacaaaattgcgatgatgactgcaagaatgcagttcacaagatttttccggcgtcctttggagttaaacaccgtttcttttactgttttcttcgtatttacagttttttccatactactcatcctccttcgaaatcaggcgcagatagaacagtccgatgacaaacagacagcagaacagtaccatcgcggtagccgaaccaagtgaaaattcatactgcttgaaggaaagcgtataggaataagttccgagcacgtcggtcgcattcagaggacctccgctcgtcataacgaacatcaggtcgaatgccttaaacgtatagataaatccgagcatcagcacggagagaatcgccggtttcatcagcggcaatgtgatgtagcggaagcgttgtccccattttgcgccgtctacactggcactctcgtaaagctcctgggaaataccggtaagtcctgatgtcaaaagcagcatattgaacggaataccgacccagcaattgacagcaatgaccgcagccatcgcagtcgaaccgttcagcagccactcaaccggcgaagaagccagtccgatcttcatcagcaggtcgttgatgacgccactcgatacatcaaacatattctttccaagcagagccgtaacagacatcggcatcatatatccgaccagcaccatgccgcggatcggaccggacaacgtaaatttctgagagaaaaataacgcaaaaataaatccgatcgtaaactggaaaatcagacaccagatcgtaaatacaaaggtgttcttcataacaagcagaaaagtgtcattatgaaacagatcaatgtagttctgcattccgacaaacaccgaggtaccggaagcaaacgttttaacatttacatttttaaagctgagaataatattgtaaaccaaaggatatccgagaatgatcagcatgtacagaaaacccggcaggatgaacagatatccctctcttcttctttttgcagcaatcgtagatttcacaggcccacgtcctttctttattcataaacataagggccaccgcacggaaccatgcggcagcccctgttactcactgctagttttgtctgttactgtgccgcaatcggtttttcctcaagaatcggatcaatcactgctgctgctgctgccagcgcctcctccggtgtcttctcaccgaggattgcagactgctctgcggtgtaaatagcctcagaaatggtcggccatgactcgtgaggtcctcttgcaactgcaaaatccatggaatcgttaaataccttatatcttgcatctgcagtccagaaatccttcagttctactgcatcgccacgaaccggaagctttcctgcgatctcacaccagtctgcgttgttctctgcggacatcatggacttcaggaagtctgtacattctgctacgtgctcactgcctgcacatacgccaaagttctcaccgccgataacggttgcctggttgtctccatgcttcggcatcggaacgtactgatactcaaatgtcaccttatccttatcctgaccgtccagagtggaaatctgccatgtaccggactcaagaatcgctgccttgcctgcaaggaatgcattgtaagcatcgccctgtccccagttcactacttccttactcatcagaccgtcttttacaagatcgctcaggaaggtaagtgcctctacaccggcctcgtcatcgacatcagccacgctggagcctgcgccgtacatccacggaatgtactggaaggttccctcttcgttggagatcgcacacattgccagtccgtatacgccatcatccggattagtggtcttctcacatacctctcttaactcttcccaagttgtcggcggattctcaacgcctgctgcctttaagatgtccatgttgcaaagaagtgcaagacagttggagttgttcggaagtccgtaaattcttccgtctgcatcctttgcacttgccatcggacccggatagaactgctccagatccggccagtcgcttaagtaatctgtgatgtcctcaaatacgccaagtgaaatgtaggaagccatatccggagaatctaccattccgatatccggcagctcaccggatacggcaccgattgtatactgcttcatcagctcttcacgggatacgaacgtcggaacgatataaatatcgctctgggactcattgtactgctttaccatcttgttgagggcatctgcctcgtgctcaaaatagtgccacagggtgacttctgcgccgccgttcggctctccgatgtcggatgagctctcttctgcgtaagcaccaaagcctgccatcatggacattgccattgctccggtgagaaccagtgcgagctgttttcttgtacgtttctgcataattgaaacctcccttttccttcagagccccccttttgccgtttcacatccggctttcacgcattcaggcgctctgcatttatttgatatgctcattatagtctttttgcataaaaaagatacctccatttttaagatggaggtaaaaatattagggtataattttaagatacggagaaaattttaatattttttatatacattgtttatttcttgtctgttttatgtatgctttgcacaaattatccattttccactcaggcggttctttgtaatctgcttcgccacctgcacatagccgaaataaacgagcctgcgccggctgctacatcccccgcacatactcggccacgctcactcccgcaacctcccggaacactctgccaaaatatttggcatctgagaatccgacctgatacgccacctcatccttggttgtacgcccactcgcaagcaggcgttttgctgtctcgatccggtactttttgacaaattttacaaatggctccccgacatccttattaaacagatagcacagatattcctgtgaaataccgagcatctgagcgagctccttctgattcagcttcgaggcatagctctcctcaatgatgtgcagcgttttgcggaccagcggatgcgcctccggatattgatcgcgaagagacatctccgccatatgctcctgcgtcccgcctagctttgtcgaaagccgctccagtacacgcattacatcctcgattgtgatcggcttcacgagataatcgaatacgccaaggccgattgcctcccgcgccacctcaaactcctcataggctgtgacgagtacaaactctgccgtagattccagcgcatgcgcggttcggatcagagccattccatccatatacggcattttcagatcggtaaacacgacctccggcttttgctgctgcagcatttccagtgcctgccgcccatccgccgcctctgctaccacctgataatccggtgaaatcgatgtgatcagatttttcaatccgcgcattgcccgcggctcatcctctgcgattaaaattctcaaagtatttcccccattttctgcttccgactgctgtgttccgtacggtgcgctttgtcaaacggatatccggttacctgccggatccggctgcccgtgcagctccgtcggcggcagcggcagcgtgaatataaaccgtgtcccttttccttcttctgtccacagctccgcctgaaaatcttccccataatacattttcatgcgcatgatgacattccggattccgattcccatatcacacttcttttcgcttcccgggttccgcagaacctcgcggatcagatcccgctgtccctggttcattccgcagccattatcctcgatcgtaatacgcagaagctcacggtatccttcgccgcagatccggatatgtccgccttccttccagccttcaaagccatgcagaatcgaattttccacaaacggctgcagcatcagcttccggcacggccagctgtcatagtccggatcaaaatcgatctcataatcaaacacgctctccagccgctcccgctgcagatacaggtactgctcgatccagacaatctcctgacgcatatagacgttctggtgcttctgatcaaaggtatagcgcaaggtattggaaagctttttcagcagggttgagaccttatagttgccgctctcaattgcctcataattaatcgcgttgatcgtattgcagataaaatgagcattgatctgcgattccaatgcctcccgctcagcccgctgcttcattttcatattatcaagcgcctgtgcatgctgccatgcaaccgccttctctgcctgtgtgatagtatgcagcatctgattgtaggagtctgccaactgccatatctcattacagccctgtatcgggatatcctccctactctgtccattctgcaccttcgcgatggattctccgatcagatgaatcggctgtaacgtatgacggcaggcccagaacaaaagtcccagaatcagcagcaacacgataaaatacatcagcagcaccgggcggtagcttgcatttaccttctccaggatctgtctttcatcaatcgccgtgtgcagctcccagccgtattttccaaccggaacactcagatccgtcagctttttctggcctctccagccggctgcggaacgcccgatgtattcttctccggcggtatgaagcagaattcttccattctccccttcaatatagccctgcacatagtcttcctgccctatggtaagctgtcgtaagatttcctctgccggatccatctgaaaagaaagcagaagaatatacggaatatcctgataagaataaccgcgccggaatggaaaggccagatgcaccagcccgcgcgtctccatattcggatgcacatgcggctccgtcacgatctgataccgtggaatcgaccgcccctggttcagctcatgcatatccgcaaaaatctcccgcacagcttcctggtcgctccagagatttattttggtaggcgcggaaatctcatacttgtcatattgatacaaaataccgtctgcatccgcgaccgccacaccgacaatccgatttgaaatatttcctacaatctttaacgcacttttcatccgctgtttatccccggctccgcgcgggctggcgatgtattcctcaattgatttctgaaaatccgtatcatgcagcagctcaccgtccacacaaattccggccccggtccccacatagctatccagcagcctttccaggttttcctctacggtatccagcagagcctcctgcgtcgaataggtcgtccgaagcaaaaaggaatagtattgtccccgcatgtaaaacagcagcacgagaagcagcagcaaaaccgcggccccgatcacggccgcaaaggtacaccacatatgagattttacatattgtctggccttactgataccgcttcctttcgtcttcatgagcaagattccctttcattctgactctttttatccaattctgtacatgaacactatgatctattatatctggttttctggttttcgtcaattataccaaaaaaagagcagagacctattctgattctctgctcttttttcacgaacccggaaaatcccgttctcttactgcacagaaaaacggtagctggtcgtcgagctgtaatgctccccggcctttaaaatcggacttgcaaaattttcctggttgatcgcattcgggtaaaactgtgcttccaggcagaagccgtcccgctcgctgtatgaagccccatcttttcccttctgcggagtaatagaattacccgcatagagctgtacgccacagcaggtcgtaaacgcctcaagcgtgatacctgttttatcactgtgcgcctcggccatcttcatgcgctcacccggagcttcccttaaagcataattgtggtcatagccacccacgtacttcatctgttggaaatccgcctcgatatctctgccgatcggctttgcagtcgtgaaatccatcggagttccagctaccaaagcgatctcgccggtcggaatcgcctgatggtcatgtacaaccgtgaatccctttgccgcgagccaaagcgtctgatccagaatctttccgctgtcatgtccggcaaggttgaaatatgtatgattcgtcggattcataaccgtatctgcatcggtgtctgcctcataatgcagaatgatctcattgtcctcgctcagtgtataggtcacgcaaagggtggcgttccccggaaagccctgatcaccgtccggactgttcagagaaaaggtaatgctgttcttctcctcatccacggcttttacgtcccatttccggttgtcatagccgtccgggccgctgtgcagattgttgtcgttgtcattgatgcccagctgataggtctttccattgatcttaaaacgtccgttggcaatccggttgccgctgcgtccgatgacggttccaaaatagcaggtgttgtcgatgtactcctgcggtgtatcgtaaccgagtacgacatcctttacgcttccgtcctttgccggaacaagcagctttaccagggtcgctccaaggtcgctcagcaccatcgtcatgttgtttttgtttgtgaaggaatataaagtatactctacacccttgttgtcttttccgaagctggtctgattcataacttctcctttcagaaaaggctgccgcaccccggcggcagccacttcatccgcagtccgtctgtaaacctcctgcgattttctgttttacttatgcaaacggattctccgtgcggtacggtacgcttgccggatggttgtatccgatctcatccgggcatacgccgatgagcttgaatacctcgaacagagccttgccgtgatgtccgaatgcaacggcgccgtgatgcgggtaattgccctcaatcagtacgtgacgatagaagcgtcccatctccttgattgcaaatacaccgataccaccgaaggacttggtcgctaccggaaggatctcgccctctgccacatatgcacgaaggatgttatctgcggtgctctgcaggcgatagaaggtgatatctccaggaacgatgtctccctcaagagttccgttggtaacctctaccggaaggcttcttgccataatcttctgatacttcatgctgaagctggaaagcttggaagagcaggtatttccgcaatggaagcccatgaaggtatccttatgcgtataatcgaatttgcccttgatagactcctcgtacatatcgtccggaacagagttgttgatatccaaaagcgtaactgcgtcgttgctgacgcaggttccgatgaactcacttaatgtaccgtagatatctacctcacaggataccgggattcctcttccggtcagacggctgttaacatagcacggaacgaagccgaactgtgtctggaatgccggccagcatttgctcgtcagagcaacgtattttctgtagcctctgtgtgcctctacccagtcaagcagcgtcagctcgtactgtgcaagctttgcaagaacctccggcttcttgttgccttcaccaagctcctgctccatatcctttaccacatccggaatacgcggatcgcctgcatgcttgttgaaggactcgaacagatccagctcagagttctcttcaatctccacgccaaggttgtacagctgcttgatcggtgcattacatgccaggaagttcagcggacgcgggccaaagctgatgatcttcagatccttcagaccaacgacagcgcgtgcaatcggaacgaactcatgaatcatatctgcacactctgcagcggttcctaccggatactccggaatatatgcatggatattgcgcagcttcaggttgtagcttgcgttcagcataccgcagtaagcatcgccacggccatcgcttaagtcgttctggctttcctcagcagctgcaacaaacatagccggtccgtcaaaatgctttgcaagcagtgtctcggagatctccggaccgaagtttccaagataaacaaccagtgcattacagccggctgccttgacatcctctaaagcctgtaccatgtgaatctcactctctacgatacagaccggacactcataaatatcctctgcgtcatattttgccttgtatgcatctaccagtgcttttcttctgttcacggaaagagactccgggaagcagtcgcggcttactgccacaataccaatttttacttttggaatgttgttcattgctttttcctcctgatttgttctcttcataaaatgatgttgaatcttgtattcagaacttcgccgaagagacggatgtctcttcgggaagctgttacctgttaaagcagacatctgctatcaatctctgcctgcgatgaacgcccatgaaacccggcgcacgattctgatctgcgtcatcggatatccttagtcaagcgtaatattctcaccgatcagtccaagcggagagccctccggaagccctccttccgggtgaccgatcagccatttattcttcgcggtcagatgcccatcctcaccgccttcatgtgctgcatcaagcggaaggtttgtatcgcgcggaagcacgatgactacgcgaaagcccgcattgcctgtgctgcacggtgcatagtgcagggtcgtcgcatacagctccacgccaacgcccttcggaagcagaaatgcttcgatctttgcggtctcataagtataatcctctgtgacatccggctgccagccgagcagcagaatcgcatcggatgctgcgatgtccagctcagaagaacggtgatactcgaccgcattcagctttttattgtagccgttgcagtagccgacctgaatcggcaactcgccgtagcagactctctgcagctctccatataccggaagtgcttcaagctctgcgattgacggttcataaatcacgttgtccggacacggcgtcttctgcatctcttctacgagccccgtaaaatcgatccctgttagtattttcccatatttgcgaaatgcaggatctgtgatcttcttgatctccattgtaaattccccctttttctatccagaatattttatatatacttttatatttacagaatcttcggaaacagctctttgcaggtcggatagatctgacggaactgctgataacgtgcttcgtacttttctaccagctccggatccggctctacggtatcgacgatcttcaccagcttctgtgccgcatcttctacggaagcaaactcgccgcatgcaactgccgctaaaatcgcgccgccaagcgccgggccttcctcactctcaatcacatctaccttcagattcatgacattcgcgatgatctttttccacaatgggctctttgcaccaccgccgcagatcttcgtgcgctcgatatggatgccgagtgcccgcgctacttccagagaatcacgcaatgcaaacgccacgccttcaagcacagcctgcgtcatatccgctcttgtcgtatccatcgtcataccgataaaggtcgcacgtgcattcgggtcattgtgcggagaacgctcacccatcagatacggaaggaaatatacatggttctcaccaagcttttcaatctgcttctgctctgctgcgtaatccttcgtgccgatgatctcgtccatccaccatttgttgcaggatgccgcgctcagcatacagcccataagatgataatgcccgtccgcatgggcaaacgcatgcagtgcattaaatttgtccacgccaaacttctcggaagaaataaaaatcgtgccgctcgtgccaagagaaatattgcagcgtccgtctccgacggtgccggtgccgaccgccgcagctgcattatctccggctcccgctacgaccttgacatcggtcgatacaccaagctctgcagccacttccggcagaagcgtacctactgcctcatagctctcgtaaatcttcgccatcatctcttctttgacgccgcagatgtcaagcatttccttcgaccaacagcgattttttacatcaaacagcagcataccggatgcatccgatacatctgtacagtgtacgccggacagacgatatgccagatagtccttcggcagcataatcttcgcgatccgtgcaaaattctccggctcattttcctttacccacagaatcttcggagccgtaaagccggtaaatgcaatgtttgcagtatatttggaaagtgtctcttttccaatcacctcgttcaggtacgcggtctccttcgtcgtccggccatcgttccagaggatcgccgggcgaatcacctgatcctggtcatccagaataaccagtccatgcatctgtcctccaaagctgatacctgccagctcgctcttatcggaatctgcaagcagctccttcagcccatcaatggtcatcgcataccagtcttccggcttctgctctgaccagcccggatgcgggaaatataatggatattcccttgaaacaatttttctgatcttcccctctccgtccatcaaaagcagcttgactgctgatgtaccgagatccactcctgcgtataacatatccttctcctttcctaaaccgaacggtctgcaacagccatttgcgtctcagataacgtccggatgttccccctgattttgttttattgacccgcaaagcaccgaaaagcagccatttttcgtagaaaaatgagcaaatttccaatctctatgccagcggcatttcatgtacggccggctcatcgcctgcctctgtcatgatctctagcacctgctgcaggttcgtcagctcgacctgcgtatgctctccgccattttccccgtcacgcgtccatgcgaccggctcctctgaacggatcagcatatgctttgtcttaaaccgcacaacgaccttgctgttctcatcgtgggtcagtacagcggtaatcgcttcctgccactccagcagattcttcggcgtatgtacgagcatgacctcgaatacaccgtcattcagctcgatatttttccccggaatgcctttaaagccaccgacagaattggaatttgtaatcataccgaacacaaattcgccatcctcggaaaattcttcgctgtcaatgcgaagatgacagctcttccaggagcccatccgcttcataccctcgagcacataagcgacatgacccagcgcatttttcagatcctgcggtgtctgataggatacatcggtaagcagtccaaatgctgccacatagacaaaatagctgtcattaaaccgtccgatatcgcatgcaaacggctcgccctccacgaccagcttcgcagcctgctccatcggcttcgggataccaatgctgttcgcaaaatcattcgtactgccagccgggatatagccgaccggcttcttttccccgctgttcatcagaccggtcacgacctcatctaaagtgccgtccccgccgctgcagacgatcatatcaaactctgccgcacggctctgtaccgtatcacaggcatccctctcacattttgtcggatagatcgtcacatcatagccacccgccgaaaatgtctctacaatcgaagacaaactgttccgaatcagtccttttccggaccgtggattataaacgaataaaagctttttcattccaactactccattctgttctttcgtatccttatcgggatcccccggtatttttacgtaagaatagacaaaaacctgattccgtccatctcgccttttgtctattttactacgtcatccactgaatcacaagcaaattattgcgaaaatgaaacattctcctcaaatctgcctgcttttctctttctaagcgatctgtacgccatcttttacaacggccacaagcttcagatcctcatccaaaagcacaacattagctttcttgcctgccgtcagggagccctgctgatcataaatgccaagacttctcgccggattctccgtcgcagccgctactgccgtctccagcggcagtcccattttctgcaccaccgtgcgcatgcaatccggaagtgttgtgacggaacctgccagtgcaccgtcactgactagggtcgcacggttgccctttacatcgacatccagtccgcccagagtataccgcccgttcggcatcccggctgcacgcatgctgtcgctgatcagaatcatccgctctttaccgagcattgcgaaggtcgcacgcacgacggatggatggatatgtacgccatcgcaaatcatctctgccatgacatgcggattgtctgcgaccgctccgaccaccccaggtgcacggtgtgtaaatggcggcatcgcattataaagatgcaccgcatggttcgccccatgtgaaaatgcttccatcgcgtgctcatagtctgaattcgtatgggccagcgatacactcacctcatcctttaccgcatcgacaaacgggatcgctcccggctcctccggcgcgatgccgatgaattttacgagtccgtccgccgcgcgctggaagcggtaaaacagctccacgtcacacgggatgatattacgctcgtcctgtgcccccttcttcgccttactaatgaacggcccttccatattaataccgaccagctctgcctcgtatgccgcatccgctgctcctgccatcttttttttataagaagcagcattttccagtacatgtaccagctcgtccccagagagcgtcattgtcgccggtgaaatcgccgtgacaccgatcgatgcctcatattttgctatcgtatgcagtgcctcctctgtggcatcacagacatcgctgcccatacagccatggaaatgcaggtcgatcatgcccggaatcgcataacagccgcggccgtcgatgacctgctcgccctcctgcggaatcggctccgccccgtccagctcagactccggctggatatgctcgatcattccatcctgcaggtaaatgacacctgcatggaatgcatgatcttcctgaaaaattttaacgttttttataatcatgaggatgcctccttaacgcttttgttttctccctgatatgagataatgatgccaggggcaaaaggtcaaaaagccgttcatgcttgcatgataaggcttttgaacttgggacc

SEQ ID NO: 964 - DNA, 2813 bp, Unknown
  16S sequences of unknown bacteria
tacctcttctttcccatgcgaactccaaactgtctcattctgagtccgcacatccgtgggtatcgtgtcatttttgagcaagggcatcgctcagctctgccggcgcgatgactatgacgagtagtcggcggtgatgcgcttgaaggcggtgagccacttctgaccatgggtgggggtgcctttggcgtcttcgggcatctcctcgttcgagtactgcgttgccgcttcgacggtgtactcggtgatgccgcgttcttcgcaccatttgaaccagccgtcggcgccaaagttgtaaccctggacgaccagctgaatcttgtcggcgtcggtggggccgattccgccgaggtacgaatcccatgtctcgaggttctgcttgaactcgagcacgcccgcgtagatggaagcttcgggcgtgttcgcgcgcaccccatattccttcgatccgtcggtgaggatgtagccgtaggctccctcggccgcctgcatgatgtcgccctttgcgccggtgacgctcttcacgccggtgtcgccgccggactcgacgtacatcgccgcgagcagggcattggtccaatcgacgtccaagtcgcacgccttacaggcagcgaccatcgtgctacgccatttctcgcacgaggcgtacttggactcgccggactggttgacggctaccgcgacgccgatagcggcaaacacggccacgagtatgaccgcgacgatgatgcgcgacctgctggaagggccgtacgctttctgacgctccttggcgtgctgcctgcggaccgcagtcgataccgaggcgcgctgggctgccggtgctgtgcgatgcgctgccgtgttcgggcgcgcgttgccggtgcgaggagccgcaggacgttgctgccgcgcctggccaccccgcgcctgccgacgagcctgctggtgtgcacgactcgtctgcccactgggccttgagctgcgtctgcgctgttgggcgtgcctttgggcatgggtgttgcgcgagctggtgcgactgttggtttggtgcgccggccttctgtgttgtgcgtttctgttcgtgtttactgagttcggcatagctcagtagaatacgcgatttcgacccttcagattttatcaatcgaacatttctcaaaacatttttcggaggccaaaaggcggtgtggaccggaggtgaaaatgcttgcatcgatgcttctttcgaacctataatcctcgccgaaaatctactcatatgtattgaagcgaacggctccggcgcatgtcggcaagctgtgcaaagaaagggatgatgacaatccagttatggacggacaggcaaagaggacgaggtcgcaggtcgtgtttcgctgggtgttctacgtgtgcgggatgatcatcctgtcgatgggcgtcgtactcaacaccaagtcgctgatgggggtatcgccgattatctcggttccctacgtcatctcgattatcggcgggttcaacttcggcgatgcggcgatggtcgcctacgtcgtcatcgcgctgatcgagtacgtgctcaaggggcgttcgttcaggcccgtcgaccttctgcagattccgctgtcgtttgcgatcactcgcttcttcaacgtgtttggcgcgctgctgcccgacgcgaccgagctttggcagcaggcgctgtgcctgcttttcggcatcgcgctcacgggcatgggcgcagcgatgaacctgaacgagcggctcgtgcccaacccgggcgatggcgtcgtgcaggcggtttccgatcgcgtgggaaagcccgtcggcatctgcaagaacgtcatcgactgcggctgcgtcatcttctgcgttgtgctcggggtcgtcacgacggggcatatcgtgggcgtcggcgtggggacaatactcgccgtcgttggtgtggggcggttcatggctctgtacaactacctgttcgcggagccgacgatgcggctcgcgggcatgccgaccaacgcctgacgcacgcagcgacccgcgcgtttggcgcgggatgtgtggcagtgccacggatttgctgcggtgttggccccgcagacgccggaagtgtggcagtgccacggatttgctgcgggatgcgtgggaagtgtggcagtgccacgtttctcgcgcgttggtgtacgcgaagcctttccggagcaaacagaaggcctgcccccgatgaggggagcaggcctttgtgcttatccgtgccgagaacgtgcgggctagtcggtgaagtagccgacgccgccttcgatgagcggctggaacgtgtagtcggggatgttcgcgtagacgcccgcgctcgtgcgctcgctgtgccccatcttgccgagcacgcgcccgtcggggctcgtgatgccctcgatggcatgcgaggagccggacgggttgacatcccagcccatcgacggccggccgtccgcgtccacgtactgcgtcgcaatctgcccgttggctttgagctgctcgaacagctcgtcgctcacgacgaagcggccttcgccgttgctgattggcaccgtgtggatgtcgccgacattcgtgcgcgagagccatggcgacaggttggacgctacgcgcgtgcggacgatgcggctctggtgacggccgatgctgttgaaggtgagcgtcgggcagctggcatccatcgggcggatgtcgccgtaggggacgagcccaagtttgacgagcgcctggaagccattgcagatgccgaggatcaggccgtcgcggtcgttgagcagacggcggaccgcctcggtgacctcgggcgcgcggaagcacgccgtgatgaacttggcggaaccgtc

SEQ ID NO: 965 - DNA, 21542 bp, Unknown
  16S sequences of unknown bacteria
gaaaaatacattcccgccccgattgctggccgtcgaagcccgcgaagcggtgcgtagacaagcaatcgggaaatctcgcccgcaaaccgcaggtttgtgggcgatcagagccgcggatgggcatgtgtaacgcttattcgcggctctttttgttctttacgccaggcgggccagctgctccagcgtcacttcatagagcaaaggctcgcccttcttatagcgcgcaaattcgtccaggcacaattcgcccatcagcatcacctcgcgcccgatggagccggcaatgtgcggcgtgaggaacacgttgggcaatgtatacagcggcgaacccgcgacgggcggttcgggccaggttacgtccagcagggcgcacacatcgccgcgctcggacaggaagcggatcatatccggctcgttcacggtggcgccgcgcccggtgttgataaacgtcgcgcccttttgcatgcgcgagaacagatcgtatgtcagcatgccgacggtttccgggatgttgggcgcgtggttggaaacgatttcgcacgaagcgaaaatttcctccagcgtggccttttgcacgcccagcgcctgcgcgccgtcctcggtgaggtagggatcgtacaccatgatctttgcgcggtggcgcgaaagcaaatcgatcaccatgcggccgatgtgccccgcgccaatcaggccgatgcgcgaatcgtaattgccaaagggcggaatctgcgcgtttatccggcgcttttccatgccgtccgccacgcgaaccgtgcggaaatagcccttttgcgccagcagaatctgtgcgagcgtgtattccgccacaaacacgccgttggcgtgcgcggcgctcaccacgcggatgccgcgctctagtagcggctgcgcgaacgccttcacggtgcctgcgccatagaacaaaattttccaattgggcagggcatcgagttgcgcgtcggtcaattggggaaatccccaggtggaaaacgcggcctccatgcctttgatctgcggcagatgctcctcgatgttgctctcgccaatgaccgtgggatacattccttcgatgggtttgtcgccatacacgcgccggatcgtatccgggttgttgcagaagaatgcggtttgcatgttccacgcctcccagttttttccttatcataacatatgttcccggcaattgcaatccccaagtttgataaggcgcgaaatatccctctccaaccgcccaaaatacaaccggggctgcctttttgcgggcagtcccggtttgcgtcgctagcggttttcttccagccgttcgagtttgcgcatcataaattcgttcatggagcggttgaccgtggaattttgcacaatttccgcaaaagagcgcagcgcgatgtataccgcgatggtcgcgaacacgcatgcgcacaccaggccgatatcgggcagcatagcgatgagttggtcgaacacgccgtcgaacgccagcgtgttttcggtgaacagcacggccttggccaccgtatagctccagtataggcccgccagcagggcgacggcggcgacaaagcgaatgaatttcgcctttgcgctcgtgggttcataccagtattccttgaagaacgcgcgcggcttttcgggcttgggctgggcatccggcagcagcatttcgccgcagttttcgcaccagttggcgcaggcaggattcttgctgaggcatttggggcagatattcatggttgagacctccacttctcttggattcgaacttagcattgcccgcccggtggcaaatcataacgggaaaagaagatttttcattgccgggcgaaatagccctggggatgttcgcaaacggggcaaatttccggcggccgcgcaccttcgtgtatatagccgcaattcgcgcacacccacttgaccggctgcgcggactggaattcttccccgctggcgagctgttgcgccatgcggcgaaattttccctcgtgatccgcctcgatggcggccacttggcggaacagcttttccgccgctagttcgccctcgtcgcgcgcctcatcggcccattgcgcgtacatctcgctccattcgtggtgttcgccgcccgccgccgcgagcagcgcctcctgggtgtccatttcctggttgaggcgcttgtaccaaattttggcgtgcgcccattcgttgcgcgccacctggtcgaatagcgtgcccaccgcgtggtgcccggccttgcgggcgcggtcggcccagagcgtgtatttgaaatatacgcccgtttccgcatgaaacgcgctcttcaggttttgcgaagtcttgggagccataggcatgtttcttccctccttttgtcccttagctttcccaaaagagggaaggttaaccgcgccgcgcggcgcataaaaaagcgcccgttgctttcgcaatggacgcttttgcatcaataccccgggtatagattggggtcgttataataaggcggataatagtagcccgtacactggtcgcaggtgggaatggacggttcctcgcgcgagttggtagcataggtgaaatagcgatgcaccgtggaggcggattccgccatgcgcagcggatgcccctcgggcgcgtacacaatgccataaatttccgtggcatagcaattggggccgggcagcatgtgcgattgcgaacacagcgtgaccgcgcggtgcatgttgcactgcgtcgtgggctccgtgccagcgaggaaataatccgtggtggtgccatagccgtcgatatcgttgcggcaggcgtccgtggccagcatgccggaaaccgagcatacggtgcagcgcaccagccccacttcctccgcggatttggttacgatgggcctatcctccgtgtagcccgcgctggtatgggccgcctccatggccgccgcccacagcggcgcggcgaaggagccgccggtcgcgtccgaggcgagcgggcggtaattgtcgtgcccgatccacagcgcgcaggaatagtagccggtcatgccggcgaagaacacgccgcgcgcgtccgagttggtgccggttttgcccgccaccgtcatgttgccaaagcgggcgcggctgcccgtgccgctgctgctcacgcaatcctccagcatatccaccagcagccaggcggtggactccttaaaggcctgtcgcgagatttgcaaatccgtggcgcgcaggtacacggtctggttatcggcatagcgcacttccgtgaaggcgtagggctccagatacacgcccgaattggccaccgcgccaaaggcggccgccatttccagcggcgtaacgcccgaagagcccagcgccaggccggaaccggtggcgtcgatgcgctcgtcgctcacgcccagccgcttgaggtaggccacggaattgtcgatggtcacgtattcaaacaaggcctgcgccgtggcgtagttgtgcgatttggtcatggcgcggcgcatgctttctacgcccgtccaaccgccgccgccatagttgttgggatagccccgctcgctcacccaaccgtcgatgggaatgggcaggttgagcaccggcgtggcgggcgaatagcccaaatcgatcgccgggccatacaccgaaaggggttttaaggaagaacccaccggcatatccatctgataggcgcggttgagctcccacttttgcgtgggttcatcccggccgccgacgatggctaccagcgcgcccgtgcgccaatccgtaatggcgacggccgcctgcggttgcgccacttctttgtattcgccgccgcccagggaggcctggtaggacgcgtcggcttcatagcgcgtttccggatatttgtcccagttggaaagcgtatcctgcacggcctgctgcacggcggggtcgagcgttgtgtagatgtgatagccgccggtgcgcagccggttttccatggcgttgcggttggtggcgttgtcctccaggttttcctggcgcagcattttggtcaccacgtcgtaaatcgcgtattccacaaaataagcgtggtcgtacatttcgccggtggaactggtgggcatcacggtcagccgctcgctcatggcctggtcgtattccgcctgggtgatgtagccctgctccaacatcaattcgagcacataatccgcgccgtcctcgcacttttcgggcgtgttgagcgtgtagtaacagcggcgggggttgtaattgttggggctgcggatcatccgcgccagcatggcgcattcgcgcagggaaagctccaccagatccttgccgaaataatccagtgcggcagccttcacgccatataccgagccgcccatgaagatggtgttgaggtattcctgcaaaatctgctctttactcacctgctcttccagttgcagcgccagataggcttcctgcaatttgcgcttataggtctgctcgctggaaagcatggttagtttaatcaactgctgggtgatggtggaaccgccctgcatggaattgttgagcaggttctgcacaaatgcgcccacaatgcgcttcacatccacgccgttgtgctcgtaaaagcgcgcgtcctccacggcgatcaccgcgtcgatcaaattttgcggcacttcatccagcgtcacgttgatgcggttttccgtgccggaaaattccgtgaccagtgtgccgtatttgtcgtagataaacgaggtttgcgcctgcgaattgaacacgcttagatccagctccggcgcggtttcgatccacgccttggccacgcccaatagcaggccgcccccggaaaccatgagcagcagcaccacaaacaggagcatttttgccgccgtcatgcccacggccagcacaaaattgttgtcgttgtgccggggcttaaaaaagcttttggccatctctgcctccttatatccaaagtgtcaccatttccattataccacatacgcgcgaattttgggggctattttggaagaattttgtggcggatttttttgccggaatcccggcgtttcttggacgcgcatatagccccattgggttcccggcatagagccttttcacaaaaacggcgcataaaacaggccgccaactgtttgacggcctatgggatttgcgcgttactgcgccgctaggcgcacatatccggcggcctcgatgaggtcgcggccttcttccgtttgcaaatagtcaaagagaatgcgcgccggggaatcctccggctcgtccgcgcggatcaccgcgtacacatcctggcaataggggtattcgcccgaggcgatggtttcgttggaaggctgcacgccgtcgatggcgagcaggcggacgccgtcctgcgcgtacatgttgtgcgcgtagtaatacaccgaatagccgatggcgttggccgtgtttttataggaggcgacgcggtcgatcagctcgcccatttcgccgggccgcagctcggtgggcgcgtccaccatttccacatccttcatcacctgcgcgcgcatcatcacctggctgcccgaagcctccacgcgctggtaggccacgatgggccggtcctcgccgcccacttcgctccaattggtgattttgccggaatagatgcccacggcttcctcctgcgagagggaagttacggggttatccgcgttgacgaggaacaccagcgcgtcgcgcgtgatgggctgcatcaaaagttccacgcccctgtcctcggcgtattccaaagcgctcgcttccggcgcgtacacgagcagcagatccgccgctccgtccgccagggcatagaaggattccgtggttttggtgtgcgtgatggagattttcgcctcttcctcgctcacgccgcacacctgctgcatcagcgcgtagctcagcggcagcgtggccgtggaaccgtccacgcggggatagtcttccggggaataatggggcgcttcggccagcgcgcagccaaagagcagcagcgcgctcacaaaaatggcgcagcatcgtttgatcatggatttgttcctcctcaatccattagctcggtataggcgctctggcgataataccagtggccggtctcgtcgatgagtccccattcgtccacgcgcttgacccagtagcggtctggcgcgagggccgtcatggattcgtattccatggccagcagcggattgcctgcctcgtcgattagggcgttgcgcatgctgccgggcacgtagctttcgtaaccatccatgggcacggtatcgtagtccacgacaatatagcgcccctgcccattttgccaactcacaaaggaaatctggcgatacgcctcttcgcttacgcggtttaactgcgcgtccaccaggtagcaggtggactctcccgcgccgtcatattgatacaggctgaatacggtctcgcctccgtcgctaaacgtagcgccgccatacagggaagcgttttcgggcagcgtgccgatgaaattcccttgataatcgtatacttgctccggcccgtccggatcgtacgccaccagccggttccctcccggcacggaaatccagccgttttccttgaggggaataaagccggtgttttccagcgtaaccacgtcgaagagggccgcgccgcccgccgcttccgccacgatgggcgcgccgggaacgccctcataaagggcaatgctggaatacaccatgggcaaagcttcctggccattccggtcgagcaggcccacgggggaaaagaaggcgtcgccctggccgtacaccacaaaataggggcccgccgcgtagctcacattttgcccttctgccagctgcgcgacggtcgtgccgcgctcatccaaaatgcgggtgacgccatccgcgtccgtgacgcaggcgcggtcgccgctgacgaagaatccttcgcaggcgatgccggtatccgtttcgttgcccgctcggtcgatggccacgagcgcgccgcctttcatggcgagaaagctgtcgccaatgtcctccaattgctcgtaggggccggcaaacagctcgttgccctgcgcgtccagcgcgcccatcaacccatcgcgcgcaaagatcacgctatccgatccggggcaatagctccacagcgaatagcgcatatccgtgagcacgttgccctgcgcgtccgccagcgcttccagcgcgctttcccagccgtattcatccgtcacggtatgttttccatcgctcacggcgaagagttgcgtaccctcgtccccatagagcaaatcatagatggatgtgaattgcccgctgggatagatcagttctccatcgcgccccacgaccatgggcatgccgtcgtccgtgctgaccacataggcttcccgttccgtctccgcccgcgcgcccaggcaggcgagcgccagcaggagaaggcaaaccgccgccaccttccgcacaccgattcccccctcgtcttttgctgccagttagacgcccataagcaggaaaaagttgcaaaattggcgcgaattccgcgggcggatctattgcatatcgggcgcgcggcgtctataattacagataagacatcacaaaatcataaaggagcaaagatatgaaccgcattcaaatcacaggcatcctgccggcgctcgtctctcccgtgaatgaggacggtagcattcgggaagcggccctgcgcaagttggtgcgcgatctggcgcgcacgggaatttcgggcttttacctttgcggcgcgacgggcgaaggcatcgccatggcgccggaacgccgcatggagctggtggaaatcgtgaaagatgaagcgcccagcggcatgaagctcatcaaccacatcggcgcagccgacctagcgacggtacgccgcctggcgcggcacagccgccagatcgggctggacgcgatctcttccgtgccgccgttctttttctcgtatgacgaaaagggcgttttggactattaccgcgccatggcggaggcgagtgaaggcctgcctctattggtatatgcctgcccgctttccggcacgccgctgccggtttccaccatcgaaaagatgctggacattcccggcttcctcggcatgaaatataccaacccggactactacaaaatgagccgctataagaagattgacggcggcaacatcaacatcttaaacgggccggatgaaacctgcgccctggggctgctcatgggcgcggacggcgcgattggctccacgtacaatgtgatgccgcgcctgttcgtgaagctgttcgccgccgtaaaggagggccgcgcggacgaggccctgcggctgcaaatgcgggcggacgaggtgatcgaatgcatgctgcgctacgatgtgatttcctgcgtgaagctcctgctgagcgacatgggctatgatgtgggcgagcccaacgcgccgcttaagcgcctgagcgaggaggaaaagaccgccttccgcgccagcatccgggtgctggatctgccggaaacgctgggaatatgacgcggtgcatgcgaagttttcacacgccgccatattgacaattaacgcgccaggcgggtatactttttatagatagaaagaggcgctgtgggcaaggggttccgcggcgcctttatgcaaaaaccagcgcgatccacaaacgattaggaggatgggcatgaaccacgtaacggaaattttcggcagcatggtgtttgacgacgcgacgatgaaggaaaaacttccgcgcgacgtttacaaggcgctgaaaaagaccatcgagatcggaaaatcgctcgatccgggcgtcgccaacacggtcgccaacgcgatgaaggactgggcgatcgaaaaaggcgccacgcactttacccactggttccagcccatgaccggcatcacggctgaaaagcacgacagcttcatttcccccacgggcgatggccgcgtgatcatggaattttcgggcaaggagctgatcaagggcgagccggacgcttccagcttcccctctggcgggctgcgcgccacctttgaggcgcggggctacacggcctgggatcccacgtcttacgccttcattaaagatggcacgctgtgcatccccacggccttttgctcctacaccggcgaagtgctggacaaaaagaccccgctattgcgctccatggaggccatcgaccggcacgcgctgcgcatcctgcgcctgtttggcgacacggccaccagccgcgtggccaccaccgtgggcgcggagcaggaatatttcctggtggacaaggcgctgtacgagcagcgcaaggatctcaaaacctgcggccgcacgctctttggcgccaagccgcccaagggacaggaaatggaggaccactatttcggcgcgatcaaaccccgcgtgcatgcctttatgcaggagttaaacgaggaattgtggaagctgggcgtgctcgccaagacggagcacaacgaggcggcccccgcgcagcacgagctggcgcccatctttgaaaccaccaacatcgccaccgatcacaaccagctcaccatggaagtgatgcgcaaggtggcgccgcggcacggcctggtgtgccttttgagcgagaagcccttcgacggcgtgaatggcagcggcaagcacaacaactggtcgctttgcacagacacgggcaaaaacttgctcgatccgggcaaatcgccctatgaaaacctgcaatttctgctcttcctggccgctgtgatccgcgcggtggatgaataccaggatctgctccgcgtgagcgtggccacggcggggaacgacaaccgcctgggcggctacgaagcgccgccagccatcgtgagcatgttcattggctcagaactggaaggcatcctggaggccatcgagaccggcgcggcttacgaccccaaaaagcgcgtggaaatggaagtgggcgtgcacgtgctgccgcacttcgccaaggataccacggaccgcaaccgcacttcgcccttcgccttcacggggaacaaatttgagttccgcatggttggttcctccgcgtctatcgcggaggcgaacatcgtgctcaacacgatcgtggccgacgagctcaagcaattcgccgacgagctggaaggcgcggagaatttccgccacgctgtgatggaactgatccggcgcacggtgcgggagcacaagcgcattctcttcaatggcaacaattattccgaagaatggcggcgcgaggcgcagcggcgcggattgctgaatttggcctccacggctgaggcaatcccgcatttcctggatcccaagaacatcgccttgtttgcgcggcacggcattttttcggaaaccgagatgcgctcgcgctgcgaaattctgctggagaactatcacaaaaccgtgttcatcgaggcgctgaccatgctcgatatggcccggcacgatgtgacgcccgccgtggtggaatatacatcccgcctggcggacggcatcctcaaaaagcgcgcggtgggcgcgcacatcgcctgcgagttggaagaaaacctgctcgagcgcttgtcgtcgctcgcttccgcgctgaacacgaagattcgcgcgctggacgcggcgatgtatggcgcgcgggaagtgcatggcaacgaggcgctggcgctctattgccgcgagcgcgtcctttccgccatgcgcgaactgcgcggcgtggtggacgcgctggaagtcgaggtcgccgcggacgcgtggccgtatcccacgtacgaagagctgctctttagcgaataaccgggcaggcgttgctttcccagaaaggtggctgacggcatgaagatcctcatcatccggcacggcgagccggactattccatcgattctctcacggaaaagggctggcgagaggcggaattgctctcgcgccggctcgcaccgctgggcatccgagatttttacgtttctcccctgggccgcgcgcaggacaccgcgcgccccacgctggaaaaaaccggtaaacaggccgaaaccttgccctggctgatggagtttcgcggccaggtgtgggatcccttcgggcgcatggagcaaaagaagcacattccctggaacctgatgccccagtactggacgaaatgccccgacctgttcgacaaaaacgcctggcttacgcatccgctgctttcctccaccggcgaagtgcgggaagtgtacgaggagattggcgcggggctggaagaattgctcttgcgctatggttacgcgcgcgagggcatgctcttccgctgcgagcgcaattcccgcgataccatcgccttgttctgccactttggcgcggggctggccatcctttcgcacttgctgggcgtggcgctgcccgtgctgtggggcggctttttcctgcccacatcttcggtgacgacgctcattaccgaggagcgcgtgcagggcgaggtgttctttaagtgcatgcaagtgggcgatacttcgcacctgtacgcgggcggcgagccggtttcttcttccggcctgttcccggaaatttacggggaatgaggtgaagccatggcacgcatttggatgaaaaccatcaaaaaccacaaaatcgtggaaaaccgcaccgcgccgtgcgaattcgaaaccgcgccccaggtgctgggcgagatgctgcgcgaggcggatatcgcccgccccctgtggctggataagcacctgaaagagtgggcgcgcttccagcgcaccgcgtttttgccggaacactttgtggaggacgtgcgcttcgaccggctggaaatcgaattcttgcccgacgacggcaaggtacgcaagagccaggatccgcgcaacgcgttttgagaaaagcacgggccgcacggatgtttgtgcggcccgtgtcgaatgcgctttcataaatatcttacacaaaaatgtttatatagtgagagaaaactcacaatttttccgaacgaattcagtacgtgcggcatcgccgtaaaaccggcataaaatccgcgcgcggcgccaaaacggggttgattctttcataaatccgcgctataatctggattgcatgcgcggggcttcctatttagagccctgtacagagggaaaacgcatcctgcgcggtactttgcgcaaagcggcaggtgcagggagggatgttatttgagcaaaaagaggcgaattgccgtgctgtgcgtggcaattgcgctggtcgccgtgttggccgtgggcgccattctcacaaacgacggcggcgaaggagaacccatcaaagagctcatgcgcgacgctgtgttgcacgagagcaacaaagtggcctttttcggcatggaggtcaacccagggctgatttccgctttcacggtgactggcattttgttggtggccgcggcgcttttgcgcgtgtttgcggtgccccggttccgcttggtgccgggcaagctgcaactggtgctggaaacggccgtgggcatgttcgacaatttggcaaagtccaacagtccgcaccgcaaccgcttcctgggcgcttacgtatttggcgcgggcgcgtacatcttcgtgagcaccatttttgagctctccggcgcgcaggcgatcaccacggcgggccataccgtcgccctgcccgctccgctttcggacatcaacggcgcgatcgccatgggctgcctgtcgtacctggcgatcctctcgggcggcattttcagcaatgggctgcgcggcgtgggccgcacgctcaaggaattctcgctgccgatttccatgagcttccgtctgttcggcgcgatgctcagcggcctgctcgtcaccgagctggtgtacgcgtatcttcagctcagtttcgcgctgccggtattcgtcgccgtggtcttcacgctgctgcacgcggtgatccagacctacgtgctcaccatgctcaccgcgctgttctacggagaagtgagcgaacccagcgaaaaacacgccaaaaaacccgcgaaaccaattgcacagaaaggatagatccgccatgaaaaccatgatttcccgcattgccgccgccctgttgatcgcgctgctcgccaccggccttctcgtcttcgccctggccgaatcggacgccaacgaacccgcgccggaaaccggaattgccacggttgccacgcaagaaacggaagctgccgaaagcgcggattccaccggctccaaggccattgccgccgccattgccatcggcgcggcgggcgcggcgggcgccatcgccatgggtatcgccatcgccaagtcctccgagggcatttcccgccagccggaagcggcggaaaagatccgcaccagtctgatgctgggcttggtgttcatcgagacggctatcatttacgcgttgatcgtcgccatcctgatcatcttcgtgctgtaagcaaaggagagaccgcaagatgaatgtgcccctgaatatcgactggcagcagatccttctgcacgcgctcaacctggtgattttgattgccgggctgtatctgctgctgttcaagccggtgaagcggtttatggatgaacgcacgcagaaataccagagcatggcggacgacgcggcggaaaaaacccgccaggcgcaggccctgtatgccgattatcagaaccggctcaaaggcgcggacgcggaaatccagcaaaagcacgccgagggcatgcagaaggctgaggccgacgcccgcgaagtgctggaagacgcccgctcccaggccaagcgcatgctggtgcaggccaaggaaaacgcgggccacgagcgcgaccgcattctggaaagcgcccgcaacgaaatcgcgcagatgtccataaacgccgcccacaagctgctggacggatccatgtcgcaaacgctggatcagttccttgacgaggcggaaggaaggaagagcgatgaacaaccataacgacctgaaggcggtgcttttaagcgcgcaacggcccaatgacgcgcagtgggcgcgcatggaagcctttttgcgcgggcgctatggcgcggccgtggaactcacctggcaggaagataagagcacgcgcaacggtttccgcctgaaaatcggcccggatgaatacgactggacgcccgaaggccgcctaaagcagctggaaatgcgcatccgcatggcggccaacggcggcatgggcgaggacgtgatcccgctgatccgccacgccgtggaggatttcgcgccgcaggtcatcccgcaaaccaccggcaccgtgctcaccgtggaagacggcatcgccacggtttccggcttgccgagcgcgttctatggcgaaattttgctgttcgccgacggcattcgcggcatggtgcaaaacctggatcgcgacgaaatcggctgcatcctctttggcgacgacgcgattgtggaagagggtagcctggtgtatggcacgggccgcgtggcgggcgtgcccgtgggcgaaaatttcctgggccgcgtggtggacgcgctgggtagccccatcgacgggcaaggccccatcgaggccagccattaccgccccatcgaatcccccgcgccggacatcatctcccgccagccggtcaaccagcccatggaaaccggcctgctggccatcgacagcatgttccccatcggccgcggccagcgcgaactgatcattggcgaccggcaaaccggcaaaaccgccgtggcgctggacaccatcctcaatcagaagggcaaggacgtcgtctgcatctatgtggcgatcggccagaaggccagctccgtggcgcaattggtgaacaccttgcgcaagaacgacgcgctttcctacaccatcgtggtgaacgcctccgcgagcgacgccgcgccgctgcaatacatcgcgccctacgcgggctgcgccatgggcgaatattttatggaggcgggcaaggacgtgctgatcgtgtacgacgatctttccaagcacgccgtggcctaccgcgcgctgagcctgctattgggccgttccccgggccgcgaggcctatccgggcgacgtattctacctgcactcgcgcctgcttgagcgcgccgcacatctttcggatgagcggggcggcggcagcatgaccgcgctgcccatcgtggaaacccaggcgggcgacgtttccgcctacattcccaccaacatcatttccatcacggatggtcagatcttcctggaaagcgacctgttcttcgcaggccagcgcccggccgtgaacatcggtctttccgtttcccgcgtgggcggcgatgcgcaaaccccggccatgaagcgcgccaccggttccattcgcctggatttggcccagtaccgcgagatggaagtgttcacgcagttctccagcgacctggacgaggggacccgccagcaattgcgctatggcgaagggctgatgtatttgttgcggcaaaagcaataccatccccgcaaacagcatgagcaggtgctattgttgctcgcggcgcaggcacatctgtttgtgaatgtgccgttggaggcaattgccgaggtttcgcaaaagatgctgcgctatgtggagcaggcggacgcgggcctgtgccagaagattgaccaggcgggcgtcttgcagcccgaagagctcaagcgcctgcgggatgcgtgcgccgcgttctttgcggaagaaggcgcgcggcaagaggcggggcggtgatctgccatgcccaacgcccgcgacattcgcgcccgcatcaatagcatccgggaaacccgcaaaatcaccaacgccatgtatttgatctcttccaccaaaatgcgcaaggccaagcgggaatgggatcagacgcgcccctatttcacggcgctgcaggcagaggtgaagcgcattttccgcacggcggagaatgtggaaagccgctatttctatccgccggaaggtgaaccgccgctcaacggcacctatggctgcctggtgatcaccgcggataagggccttgccggcgcgtataaccaaaacgtgctgaaggaagcgcagcacatgctcgatacccatccggacaccaagctgtttgtggtgggcgaatatgggcggcaatattttatgcggcacaacattcccatcgagcgcagcttcctctacacggcgcagaaccccaccatgcagcgcgcgcgtgaaatcactgccgtgctgctggaacggttcgaaagcggcgaactgcaaaagatctacgtgatctatacggatatcaagaacagcctggccgaaaacgtgcattccgcgcgcatgctgcccttccaccgctcggtgttcaccgcgcccgcgggtgaaaagaaggtgcaggatccctttgaattctatccctcggtaacgggcgtgctggacaacatcgtgcacagctacgtttccggctatatctacagcgcgctgatcgatagcttttgcagcgagcaaaacgcgcgcatgagcgccatgagcacggccaacgaaaacgcagaaaaaatgctctccagcctaggactggaatacaaccgcatccgccaggcggcgatcacgcaggaaatcaccgaagtggccgctggcgcgcgcgcgcagcggctgcgcaaagccgccaacaccaaaaagcgaggggatacaccatgaatgcaggcaaaatcgtggccatcgcgggccctgtggtcgacgtggaattccgcgattgcgcgcttcccaaaatccgcgaagccctcaccgtggaggttcgcgggcatacctacgtgatggaagtggcgcagcaaatcggcgacggcaccgtgcgctgcatcatgctcgcccagagcgaatacctcgcgcgcggcatgaaggtcgtggccaccggatttggcatccgcgtgcccgtgggcgagaaaaccctgggccgcatgttcaacgcgctgggcgaacccatcgacggcggcgaacccttcccggaggacgcgcagcgctgggaaatccaccgcaaggcgcccgccttttctgagcagcgccccaccgtggacatcctggagaccggcatcaaggtcgtggatttgttggagccctatcccaagggcggcaaaatcggcctgttcggcggcgcgggcgtgggcaaaaccgtgctgatccaggagctgatccacaacgtggccatggagcacggcggttattccgtgttcaccggcgtgggcgagcgcagccgcgagggcaacgacctgtggcgcgaaatggcgcacagcggcgtggcggacaagaccgcgctggtgtttggccagatgaacgaggccccgggcgtgcgcatgcgcgtggcgctttccggcctgaccatggccgagtacttccgcgaccaggcgcacaaggacgtgctgctgttcatcgataacatcttccgctttgtgcaggcgggcagcgaggtttccacgctgctgggccgcatgccttccgccgtgggctaccagcccaccctggccacggacatgggtacgctgcaggagcgcatcgcttccacctctagcggttccgtcacctccgtgcaggcggtgtacgtgcccgcggacgacctgaccgacccggccccggccaccaccttcacgcacctggacgccaccaccgtgctcagccgcaaaattgccgagcagggcatttatcccgcggtggatccgctggaatccacctcccgcattctggaagcggatatcgtgggcgaggagcactaccgggttgcgcgcagcgtgcaggagaccctgcaaaagtacaacgaactgcaggacatcatcgccatcctcggcatggacgaactcagcgacgaggacaaaaaagtcgttttgcgcgcgcgccgcgtgcagcgcttcctctcgcagcccttccacgtggcggaaaagttttccggcgtgccgggccgctacgtgccccgcgaggagaccatccgtggtttccgcgaaatcgtggacggcaagatggacgattatcccgaggcggcgttcttcaacgtgggcggtatagacgaagtgcgcgaaaaggccgaaaagctcaaggaggaataatccatgcgcacgtttcaactgcacatcctggcggcggaccgcgtgttcttcgagggcgagtgcgaatccgtggtagcccccaccgccagcgggcaatatggcgtgcaggcgcaccatagcaacatgatcgccgccatctcgcccggcgagctcaccttccgcacggcccagggcgaaacgcgctacgccgcggtttcggcgggaatgatcaaggtggagcacaacgacgtgctcatcctggtggactccgcggagcgccccgaggatatcgacgtggtgcgcgcccagcgcgaggcggacgaggcgcgcgaagccattttgcaaaagaacagcatccgcgaataccgctcggcccaggccgcgctggcccgctccatcaaccgcctgcgcgtgaaacagcacaccggcagcatgatgggaaaataaaacaaaacaccaaaccaacataaatggcgttggcggcaaatatgtcgccagcgccatttttcattcaccacatgtctcaaaaagtttgatgctaggctgtagaatgcgcgatccattcgtgctatattgcatggtgcgggctctgtgcgcccgcaaacccaaattgacgtattattgtgaaaagaagggacttgtatgaatcaaactgtatcgcgcattttgtgggccatcgccggaatcctattgattgcatgtggcattatgtgcctggcggatccaggtttggcgctggcttctatgagcctgtatctggctcttgccatgctggtttccggtatcatcgatatcgtgattttcgccaggggcaatggcaatatgatcggcgccgggtggtttctggccgacggcatcctcacggtactactttctctgtttctcttgttccatcaggcgttcaccttgctttctttgcccttcatcgtgggcatgtggctgctattctctggcattagcaagtttgtgaattcctttgagcttaagcggtttggcgtgcggggatggggctggtttacggcttggggcattctgttggcgctggttggcttcttctcgttcttaaaccccattgcgaatctgtttgtcctcagcgccttggtgggcatcctgctcattttgcagggcatcacgtccattgtgcgcgcctgtttttcacatcgcctttggaggtaaaccgcgcgaatcgattcttgcgcgcccattataggccatcccgccaccgctatgcggcaggcgggtttttcgcgcctttttcgcgataagtccaaggcgtaatgtataaaatgttttgtgcttatattgcttttagaaaaaaatatggtatactgatggtgagactgttgtgcgcgaaatgtgaccggccctcccgtttgctcggcttaggcaaggcgatgtccctgtcgcaaggagaaatccatcggaataggaggcgaaatccatgaaacgtctttttccactgctcttgtgcctgctgctcgcactgtttcccgcgccgcgcgcgcaaggcgaaagcgcggcgctgctgcaaagcgatatgcccaacatccgcgccgcgttcctgtgggagggcgtgccctacgcgttcgccgggaacgaactgcgcgcgctggacggctccggcgaaatcctgcccatcgagctggaggcagatttcgggctggaccccctgtggtatgaatttctcctgccggtgcaggtggatggccaggtttgcctgctcgcccgcgtgggcagcgaagaggacggcataagctacgtcgagtacggggccctgctgacgctttcccgggaaggcggcgcggcgaaggcccgccttgcgcaggtgctggactggtcgcccattgaaatcgaagcgaaccccgcgctttctttttcctgcgcctttgcgcagggggaaacgctttatctgctcgtgcgcgcaggcgatggacaggcgcaaatcgcggccttcgattgcgcggacggcagcgccgccctgctggccatggaaggcgtttccgccatcgcgccctacacggagcaggccatgctggcggtgcgcgagagcggggaactgggcacgattgcctacgatggcctggcttacgcgccgcttggcgctttcccgggcgacgcggcgggcctgtattatgatggcgcggcaaacgccctgtactacgtttccggcggcaacctgtgcgccctggcggatatgcgcctggatgatgcgcaaatccttgccgcctttccgccagccgggcccttcccatccctgcccgcagtggcgcagggcgcgtatatcctggccgacgcgcgcatggtttatcaggcgccgctggcggccgcggagcaagaggcgcgccaattgcgcctggaagggcggctggaggcgtggatggatcgcgcgtattacgattttctggcggagcatcccggcgtgcaggtcgcccgcatcgatggggcgaatgccgatatcctcggcgacatgctgcgccagtccccggacacggacatttacctcttggatgggaacgactcgggttacagcgctctgttcgagcgcggctacatggcccctctggcggatgaggaattggccgggcagatcgcgcaaatgtatcccatgctgcagcgttatttggtgcgcgatggcgtgcccgtggccgtgccgctggactttgcggatacgtatctgcccgcctttgacgcgcaggcctttgcgctcctgggcatcgaggcgtatcccgaaacgtgggtagaattctttgatttgctctctcgcgccccggaactgctggcgggatatgaggaggagatcggtttttcttcctgggaggcggagcacctgcgcaccgtgttgctacaatacatggtgccggactacatccgccaatgcgaggcgcacggccggcccctgcggctggatacgccgcagtttcgcgcggcgctttcggcctgggaagccatcgactggcaggcgctggaggagagcggcgcgctaggcggcgcaactccttacgaagcggataagatgtggctatttcacatgccgggcttcagcgttagccccagcgcgctggagccggaaaacaggattcccgcgctgcttgcctaccatgaggacgaggagcccatgattctcgtatccttcacggccgccttcgtgaatccctattccgatgagcaggcgctggccacggaatatgtggcggcgctgtttgcggaggcggtgaacacgaatgatatgcttctgccgaaggtcatcgccgggtgggacgagcccatcgaggattccatgtacgagcagatgatgcggcagtacgaggataccattgccgaatacacgcgtcaactggaaaacgatcccgcgcccatgatggccgcccggctggaagagcagctgcgcgcagtcaccgaagaacgcgacgcctacgctgcgcaggggcgctatcgcgtcagcccggaaagcttgcgcgcgtatcagcaagccaccgagcacatgtacatcgccaccacgcccattggcgatgagatctatgcgctgctttcgcaatatctcgatggcgcgatcgatggcgaagcgctcatccgcaccatcgatgaacggctgtatatgatggaggcggagggataagcttccgccttttagcttgtcaaaaaagtctttttgacaagctggtggacgggggggcaagctccccc

SEQ ID NO: 966 - DNA, 19558 bp, Unknown
  16S sequences of unknown bacteria
cgccgactttgagcgagccgcaggcgccagggtatgcgccaggatcaagccggtccagttcgatgagcaggtacgctgtctgtcgacggtgaacatggcggcagatatcctcgagcagctgatcggcgaacgagacgaaacagcagcgctcatgtaaaagagacccggatccggatctcttttttcctgttatgatatgtccgaagcataccgcacttaaatgtaaaggaatcgcctcgttatgttcagatacagtttcatctgtcacatcacctgccttctgcactcaccatctgtctacactatagcacatcatgacaagcagaccagcgcatagggcaaaaacggtatggataacggaagagtcggtcagctgctgatctgccgcagcagctgcgtgatcctgcgaaaggctttgcgctgttccggactcagggagcgataccagagcagccatctccattcttctgaggaaacccatctcagcagcttcattccatcacctcagtaaccattatacgacgaaatcgcgccatccctcgaaaaaaagcgccgattttgcgaaattatgtgaatgattcaaatcacgtgcataatccgcgctttccggtataattaagagcatgacaagcagaaaaaggggtgtgatcgtgtgtatctgatttatctgctgctgatcatgctggtcctgcaaagcgtcctgttctatgttcccggactgctgctgatcggcgtcgtcctctatgccgcctattcttttgtgcaatacagacgtacgcggaaagcctacagcggcgttggtcaggagccacatgacagcggagcgcagacatctggcagcggaaacagcagaaaagatgtcatcgacgtcgaatatacagaacatgaattgtaaaaagcaggcgatgcctgctttttacatgcttattctgtgcgcagcgcttcgaccgggtctttgcgggaagcgatgcgggaagggatcaagccggcaatggtcgtcagcagcagtgagatgatgaccaggatcacgccgccggcggcaggcagctgcgcgatgccggccacgctggccagatgctcgacgatcgccgagatcgggatattcagcagcagcgtcaccccgatgccgatcaacccggaaatcagaccgatgatgaaggcctccgcattgaacacatgcgagatgtccttcttgctggcgccgatggcacgcaggatgccgatctccttgatgcgctccagcacggagatataagtgatgatcccgatcatgatgctggagacgatcagagatacgctgacaaaggccatcagcacatagctgatcatatcgatgatggacgtcaccgattccatcatcgtgcccaccacatcattgtaggtgatcacatcggcttcattgcccgcatcctgctgagcttcattgtaatcatcgatcaacgcggagatggcttccttgtcttcaaagctgttcgcatagatgctgatggtgctgggccgttccagatcgaccgcccccatcttctccaggttggattcataggtggcattcatgttctcgctgtaatcgctcatgaactgcgccagctcctgctcgctcatggccgcgaactgcatgcgctgttcggtagtcagtgaagacatgtccaatgattcatcagagccaaactgtgtgccggtgaacacgttggtgtccggatccgctttctgatcctgtacgatctgtgactgctccgcctgttcgatcacctgcttctgcatggccgaggtatagtagataccgcctaattcccggcccgagctggtgccttcgttgggctggatgatgccgaccacccggatcgtctctccctgcgccgcggcctctgccacgaaatcctcatcctcgctcatgtcgatccacagatcgccgctcttctgatacagatcgctgttgaacacgagcttgaactccatgcccagcagttcctgaggcgtgtattcccgcgcttcgacctcgctcacttcgctgccgtcctgcagagcctggaaattgtcaatgacctcctgctgatccatcagtcccagcgaatacaacgcgaagtcggtgatctccatgttctcatcgaccgcgagcacgacctcgttccattcgtccggccattcgccttcgaccagccggtattcttcattgcgcaatgtctcatcatcaggcagacggttccacacctcattctgcgatgaagcctgcgcccccatgaatgattcgctcatctcgttcatggtgccgaatccaagctcatccatcagctgattagggctcacctgcaccagtccgccctcgccgttttcgttatagacattgagggtcagcggatagtcgtattcgatcgccttggcatgatcctgaaactgtgattcatcgctctgcagataagcgcggaacgcttccaggttgttggaatccatcgtctccgacatcgtttccaggatgtcgttgatcatcgcctgggagtggatcttcccatcattcgtcttttcttcatcatcactgatgcccatcatcgcttccatcatggcgctcatgtccatcgaactgtcctcgatggtgatcggataggaagagagcgtatcgcgttccacgctgtcgatatatgcctggacgccgttggacagcgacaggatcagcgcgatgccgatgatgccgatgctgccggcaaacgcggtcaaaaaggtgcgcgccttcttggtcatcaggttgttgaggctcagcgaaagcgccgtcaacagggacatggatgtgccgcgcccgggctccttcttgtgctgttcagtctcagccgcgccgtcaaatggatcgctgtcatccacgacctcgccgtcaagcaaacggatgatgcgtgtggaatactccgcagccagatccggattatgcgtgaccatgatgaccagccggtctttcgcgatctccttgagcaggtccatgatctgcacgctggtggcgctgtccagcgcgccggtcggttcatccgcaagcaggatctgcggatcattcaccagcgcacgggcaatggctacacgctgcatctgcccgccgctcatctggttgggctttttgtagatctgatcttttagtcccaccttttccagcgcctcgatggcacggcggcggcgctcttccctggatacgccggaaagcgtcagggccagctccacattggaaagcacgttctgatgcgggatcagattgtagctctggaagacgaaaccgatggaatggttgcggtaattatcccagtctttatctttgaaatctttggtggatcggccatcgatgaccagatcaccgctggtatactgatccagcccgccgatgatgttgagcaaggtcgtcttgccgcatccgctctgtcccaggatggagacaaattcacttttgcgaaatgaaagcgtgatgccgcgcagcgcgtgcacggtctcgttgccgcttacataatcttttacgatctgtttcagttcaagcatgattggctcctctcttcaagtgttgaacagagacatagtagcactctgcatgcggaaatacaactcacatccagctgaaattgtccgatgcggatcaaagaaaaaaacgggatagcacccgttttctcagtcatatggccgatattccacactttctttctcaaagtcaaggaagagctgaaaagcattgcgatcctcatcttcgtcccagatctctacaaatttcggtgtcacctcgatgaggatctcactgtcttcatgggaatatgcgttgtagctctgccacaaatattctttatatttttgttcgaacacgcgaccttcttcctcaatgaccaagcctttgttttcagcgataccttccacctgaacgccgttgaagcacattgcgacacgaggattgacaaacagctgctgcgtctttctgaaatttttgtcggtcttgaaatagatcttgtcgttgtagaagatgcagctgacgttgcgcaccatcggataatcatccgcgcagctcgccagcgccatgatcttccattctcccagcttctggtccatgatggcctttgccgcagcaaaatcaatgtttttcatattgtattcctccttaaatgatgccctggaatcccaggatgaagcagatgacggacgcacagatgaacaagccgatcagcacggtccccttggtgatcgcatgatctccgccgctggtgtgctccaccagcgaagtgcggcggaaaatgccgacgatcggtttatacaggaacaaggtcagcccgctgttcagcccgcatttgagcaggttgaacggcaggatgccgggaaccaggatgctgacgaccgcctctctgggcatgccgaaatagatcggcgtgacgatataattccacagcagcatgctgaggacgcagcatacgataccagcgcccaatccgatgaatgcgccctcgcgcgtatggtcacgcttatagatccacgcggccacgcaggcaaaagtgcaggtcgagatcacgttcatgagcacatcgagcagattgccgccgcgatacatgatctccagcaaagaagtgatgacgctcatgatgaacgcggagccgggaccgtagataaagccgccgatgacgatgatgacatccttcgcgtcatagctcagaaactccacagatgggatcagcggaaagtgaatgagcaggttgacgatgactgccagggcgcaaagcatgcccagcgtcgtgattttctttgtagtcatgttcataagaccgcacctcctgatcaacaaagaaaaacgtgcctaaaataaagcttccagacacgttcatgatgcggttttccaatatgaaaagcacagaaaaacgattcatcaaacttcttccatccagactttaactgttgctaccggaatcgcaccggttcggcccgtaggttcgcggagtttaccgccagtcgagaatttcactctgccctgaagttttattttatgcgttatcagtatacaacgatgctttgcgtttgtaaagctccttgtgaaaaagggacaccaaagcggtgtccctgttcatgtcaatcgaccttgacggatcaagcgttcgtctggtcttttctgcgcttcagcatccatgctgcgcctgcgcccagaacgagcagagctgctgctgtgccagccgccgcattcgctgcggtgccagcgccgcctgcagatacagaaggcttttcggtaacctgcgcgtctgcgcttggttcctgcgttgctggtgcttcgaccagcgcttgcgctgcggtgttcagtgcttccactgctgcgtcaacatctttctgtgtcgcttccgcatcggcatagactgctgccgcatcctgatatgccgcatagaatgctgtccaggtagccggagtgaagtcattttcactgtagccgctgtacaggctcagcgcttcatccagcgcgctcttgtccgccagcgttctcgcgttcagacgcgcttcacgcagcgtgctcactgccgcatccactgcttcctgatcagcgtttgcgtcatcatatactgtctgtgcagctgccagcttgtcggccagtccctctaccgtagaaggcacgtagttatccaggttggcgatcatctctgtgacgagctcgatttcatattcgagcgcgctcttgttcacgcctgcttcattctccagccctgcgatcgcattggccagattcgtaatagcgtcagtgacctcgctcgtcgttgcgtcatcattgatcgctacggcctgtgcattcgtgatcgcatcctgcaggatcgcgatgctttctgcggtgtagtcaccgtcaaggtaaccatttgcagattcgatcagtgcttccagctctgccttcgtcacgatctcccacagctcctgggctgccttggtcaatgcttcattggcagctttcaactgatcggcggttgctccttcatcatccagcacgctctgtgctgcctgaatggcattggtaagtgcctgcagcttgcccggacggatgttgcccgcattggtcaggatgttctctttgatgaactggatggatgcctcaaggtcagcccgcagggcattgacgctttcaccggcattcgcggcctgcatcgcttcgctcagatcgagcagtgcggtcacgacctcagtggaggtcggcgcgtccttatccaggacagcctgagcagcagtgatcgctgcattcaacgctgcgtcatcagagccaagggcattggctttgtcgaccatgtttcgcaatgcctggatcgctgcgtcactggctggatcgtctggctcgctgactttctcgagtgcttcgatcgccgcgttcagcgcttcggcagctgcgtcgatcgtctgctgatctgcatcggccgcaacattcttggcatcgttcagcgcctcctgcaaagcagcccagctagcgcttgtataatccgcttcattcagtgcttcagctttggcgatcgctgcgttcaaggcggaacgatcagtttctgtaccagcattctcctcgaggccttcaaacgcgctcaccagtgccgcgtatgcctgatcgaccgcatcctgagaagctgaatcatcagccaggatcgctgcggctgtgtcatatgcgctcttgaatgccgcaaaagacgtttccgtgtagctgctttcgttggtcaaggcgctctgtaccgcctcactgttcagatatgcgttcagtgcctccttatccacagcttcagattcgacattgaacttaacgttggtcgtattcaaggtgttgccatcctcagaacgaacgaggatctttacggtattgtcatatgccggcagcacctgtaccgccgcattgtcagctcctgtcgcattgactgtcggcagcgcgccatcgacattgaccgtatatgtgcgtgatgcttcatcatagcccgcgtagccaggatattccgtgatattcgttccatccagcgtaatgctgctcagctccgcgctcgtgttcgctgtcactgcttcgtgatagtcgaacacctgtacttcggtcagaccgatgcaagtgccggttcgcggcgctttcagccagatgcgcagcgcggaagtcgttaccggacggatcaggccataagaagtcgatccggaagtatacggaacctgcgtgatatgcgtagactcaacttctacccaatcgccgttttcatcctgatattcgaaacgcacattgctgtcgcccggaagcacgcttgccgcgctatccgtgaagtgccacagataaatgttagagatggtatacgtaccttcccagtcaagctgcacataagtatctactggttctgcctcattgcgcagggcccagtttgtccatcttgcgttagtatcttcagaatcattggtgatgccatcattgagctgcagcagtgaatcggagatcgctgtcgtgctcggatcactggccgcgccattacgtaatgtaccattgctgaacaccggtgcgtcatctctgcttgcggaagcgatatccacgctctcggccactgcctcttccacgcgaacgcttgcctgcgtctcataggtctgtcccaggatctctaccgatccgttgatgaccacggtgcccggctgtgcaaaatctgcttcgctcatgtcccagctgaccgcaaatggctcactgtaagaaccgtccgcatagatgccgcgcagcgtgcttggcagatctggcatcacaccggcattggtcgctgcggaccagttttccactgccacgatctcaccgatcacatggacggtcacggtcgcggtcacatccagtccttccagctgcccgctgatcgtaaaggtgcccggctgtgccagctgtccgcggtcataatccgcccagttcacattgacttcatcagtcgatccatcgctgtaagtcactgtcacgctctgcgggagctgcggctcttcatcgatgtcgacataatagtttcgagaaatacgatagctttccagataagtctctccgctgttttccggctcgctcgtcgtcacgctcgtgctagctgacgtcaatcctgaagcagaggcgctcagcgtaaaggaaccagcttcttcagtagactggacgatgaccagcgctttgccatggaaggccttgcgcgaagtgcccttatagctgtcagtatcggtcgggtcgccattgtccacgccgacgatcgtgccgtttccttcgatgctgaacgtgatgcgatcatccgcaccagctacgatctcatcattgctgtccatgacatcgacctcgatgtagcacaggctgcttccatctgcctggatctctgtcttttccggcgtcaggcgcagataagacgcgtccgtattggtcgtgacagactgattgccttcgatcacatcttcggagatcacctgatcattttcatcataagcgaccgccctgagcgttccggaacgccagttcacatagaacgtcggatagaattcaccattcgagaaagtctgatacgtatatccggcatccgttctgtgcgtcgtcgccgtatcggtgccgacgagctcatcgttcagatagagttcgatcttatgcgcgttggtatatacatcgacctgcacctggccgttgaccttgacgatctcatcattattccagttggtcatcagatgcacgacattgctgtcctcatcccacaggctcttatacagataatagatatccttttcaaagccggccgtatccacgatgccgaaataagacgatttcggctttgcgccctgaccgcttaccgatccgactccagtgccgttccacggggtcggctcgccgatgtaatcaaatccggtccagacaaactcaccggcattgtaatcgttctggatgaccagttcccaggcatcgctggcggagaggccccagccgaccttcgtgctgtcgttgttatactcggacagctgcagacggttgttatcctgtgtcatcgtcgcgtattcaccgcgcgtatggatggagctagccgtctctgcgccatacagcgtccattccggatgagccgcatgaagcgcgtccagctgtgcatccggagtcactccagcctgtctatctccagaaatatagttcatgccattgacgccgccgactgccgtaagctgatcctgaatgttgttcagcatggagtttccgcccttctggttgtcgccgatcgtcagcggacgagtatcatcctcatcgagcatccaggagatgatgtcctgagacagttcatcataatgcgcgacagaaccgttgtagcatccttcggtgatctcgttgccgatggaccacatgatgatgcatggctcgttgatgccacgcttgatcatggcacgggcatcgaattcgccccactgcatgccggtctcgccatcaaggatctggttgtccgcggtgatggtgtcctcaaagtgagtcgtgtaatcgttataattgccgttcttgtattcggtccagccatcgaatgcttcgtcgatgacaagcatgccgtattcgttacagatgtcaagcaatacggatgcggccgggttatgcgtcacacggatggcgttgcagcccatgtccttgagcatcttcacctgacgctcgatggcatcgcggttggctaccgcgcccagcgcgccctgatcatggtgcatgcagacgcccttgagcttcatcatctgaccattgaatgagaagccggtctcgctgtcaaagctgtagtaacggaaaccataatcattttcgtatgtatccaccacttcgccatcgaccagcacttcggtcttcacggaatacagataaggatcatcgatcccccagagatgaggcttgttgacgaccatgctcagctgtgcggtcgcttcgctgccggcctcgatatttaacgccgtatcctgcgaaacggccgcgctggcgccgctagcgtctaacagcgtgctgcgcacggtcacatcgacagctgcatcgctgtcgttgacgacagtggcctccacgttcacatctacatcgccggcgtactgttctgccagatctttcgaggtgaccttaacgccattgtagccaacatgcacctcatcagtgacggtcagcgtcacatcgcggtagatgccgctgccagaataccagcggcttgacgggatgctgttatccaccttgaccgcgatgacattttcagtttcaccatcggcgacgatcgcgtcggtgatgtcaaaggcaaactgcgtatagccatatggatgactgcccagtttctcaccgtttacgtaaacctctgcattcatgtacacgccgtcaaaagtgatcatcaattgtttgtcttcatacttctgcggcacgacgaaggtcttgcgataccatccgatacctcctggaaggaagccgctttctgcttctccggaagtcgtgaatgcctgatcgatgctgtaatcgtgcggcagatccacgctctcccagctcgaatcattcaatgacggtgaagcggcgttatccatatcgccgcgattaaatttccaattgtcattgaacaaagcggaacgttccccggaagcgatgatgtccacatagacatcttccggttcggacacagttgcccgaggctgattcgccaagatcggaacgctgatcgcacccatgcacatggatgcggccaatatcagcttgccgacccggctgcaccaattcttcataatactcctctccttttctttaaagatagcgctttcacgcacatccttatattgagtatagcatgtaaacgcattcaatcgcaattagaatgtcaaaatattccatattcatgttaacccatctatttaaaaagcaggcgctcatgatgagggcctgcgataaggacggggcggatctgcccgcacatcggggatcagctccacgaagcagttttcgtaatgctgctgcagctcgctgagcatctgcgcatttgccagctccagttccgtaaaagaaatcaggtcgtggctagtggtgaaatagatcgagacccacagcctgcgcccggtcatcgtcacatcataaaacaccggatcgaaagggtatccttcgagcacctttccggtacgggcgcggatatcatcgatgatcgcttcatccggagagaacagcgcgatgctgcgcatggcgctgcggatcatgcgcactggttccgacagcatggccagcgtcagcaggatagctgttccctgatcaaaatacggaccgatgaatgccagcggggtctgttccaggaaagacgcgatgaaaaacgcggccgatacgccgacactgccggccacatcaagcttccagccatagatttccgcatccgcggtcggtgaagaaagaccgcggccaagccggatgagcaagagcaggatcagacagctgaacacggtcaggatgatttcaaatgcggagatctgcagatgatcgacgcggtgtccgccattgagcatcagctgcacattattgccgatcaatgtgatcatgaccgcgatatacatgaatcccttcagcaggatgaagatgctttccagctgcgaatacccaaagggatgtttctcgcttaccggccggtagaacagcggcacgatgaacatcgtcagcgcgatgatcaaaagctcgaccgcgtcaaacaccgtatcggtcagcacggactgtgaatgagaatacaatgtcatgatgaattccgcgatgacgaaccctgctccggaccagaaagagatctgcaggatccgctgctcctgtttttcccgcaccagcgtatcggttgttttttttcccatatctccctcttctttctctcttagtatatcatatcacgtctgtgtgcacggatttgattccggccggcaattcatgtataatcagtctcatgaacgaacaataccatcctatacgcacatggatcaggaacatcattcgctttgagctgttctaccggctcttcatcatcctgatcgtctatccgctgagcaactggctcatcaatctgtacatcaccacgaatacggtgcattcctcactgtccaatttcagcatgttctttgactttctgagcatccccggcattctcgtgatggcagtgatcttgggcagcgccatctgcatcatcgtctttgaagcaatggtactgatcatgatgacctcatgcatgatccacaaggtgccttacacgccttcctcactgtattccacggcttttgcgcggctggcctgtctgcggcatccttccacgctgctggcatttctttatttcatggggctgctgccgctgacacacatccgctatgtctcttcttctatgcctacgctgcagatccccaatttcatcctgggagagatcacccttacgctgccgggacagcttgcggccatcgctttttatctcatggccttcgtgctgttcgcgctgctttgcttcacgccgctgtatctgtttcaggagcgctgctctttctggcaggccgcaaagaaaagcgtgaagaagacgctcgcgctgccgctgaaaaaaaaggcgctgctcaccgcgctcatcctgggcctgtttttgatcagctggcagatcacccgaagcaccacggtctcctttctgagcggcagcgatttcaacgtctatcttttccgttatttgtatcattcgcatttttttcgtcagcagctgctgtatacgatcctgtggtggatctacctgagcctgtcttctgttttcttcctgtgggcgatcatacgtatctgcgaatcagaaaatgaagtcatccagatcgaacagatcaaggcgcggccattctttgcttcgcgcctcttcacctgggcgagcagccagctgcgccgttatgggcataagaccgctgagcggctggatgcctttccgcataagaagctgctttcgctgctgctctgcccgctgatcgcgctggtcatgatgctgtatcttcatcaggaaccactgatgcaccggccgctggtcatcggccatcgcggcgatatctatgcccctgagaattccctggaaggcattgaaagcgcggctttgcgcggcgcggattacgcggagatcgacattcagctgactgcggacggcgaactggccgtcttccatgacagctcgacatcgcggctgtgtgagcgggacctcacggtcgcggacagcacgctcgctgagctcaaacagctcgatctagtctctcgcggagagcacttcaccattccttcgttagaagaagctgtgcaaaaggcaaaggaagcgcaggtcggactgctcatcgaattcaagccccaagatgggcaggaggaagaaatggccgaaaagacaatcgccctcatcgagaaaaatgactttgcagatcaggctatcttcatgtccatgaatgagcccatcgtccggatcatggaagaagagcgtccatcatggtggaatggctattgcatcttcggcgcgctgggaaaagtggacacttcatggaacgccgatttccttgctatcgaggagagccaggccaacacccgctttcttgagcaggcgcgcaacaacggcatcccggtctatatctggaccgtcgatgaatattactcagtcctcggctatctgcgcatgggcgtcagcggcatcatcggcaattctgcggaagatgtccgaatggccgtggatgattatctcaccaacgaccacgaagaatatctgaacgacgatccccacgacatccgcgaacaatgacgaagcaccggtcttccccggtgctcttttcatggtttccattgatggtgtttcaggtcagcattgccgtttggcaaaaatgtgacgccttctgcttccagcagcgcgcgctgttttgtccagcccggagccgtccttcctgaagcattgaccacgcggtgacatggataatcgccgaaatgctccgcgtgagcgaggacatgtccgacagcccgcgaatgacgaggatgtccggccagttttgcgatctgcccataggtcgcgaccttcccgcatgggatctccctgacgatctccaggatgagccaggcgaatccttcatcgatcaacatccatccctccttcgtctcagcagcgcgcaggccatttcttcgctgagcaccttatcttcctgcatgatcgctaccgcgtcctgcagatcttcaaacgtacagatcgtctccggcttcaggcactccaaatgcttttctcggtgcaggcggtaatcggtgcatccttcttcatctagccggatgccatagatcctttgccgcagagaatacagatagacaaaatacagcgtgccgctcagcgagaacatctgcccgaccggatgatcgaagcggcagtccttcggatcgatccgaccttgttcctgacgctgatgcttgcgccaggcccgcgcgatccgggagatctcagacaaggaaaactgctgcaagagctgcagcggcagatcgaggctgaaggtccgtgaaagttcgagcgcatacagcacagaatggcaggataccatcagcccttttccggtttgcgagcgatgcatcgcaaaagcctgaaaatgcccgttgtgcaccgcataaatataatatacctcatcttgccgtctgaccacgcagccaacgccgatggtctgggtctgcgccttggcagcgcggcagcgcgagatgcgttcaagatccgcagggtcgatccgaaaataatattgatagagattggcgccggggatcttccacatcctgctcgtatccacatacgtatctctgccgaccccatattttgatccgctgatctggcataccttgcgctcatttacccgagaaaaaggatgcgaggaacatgcgtatgcctggatcccctgttcatcttcctgacatacgacatacggccggatctgatgcgcagccgggatgttttccagctgtccctgcgcgagcggcatcctgcaccagacgacatcaccaggctgcagcgtctgcgccggctcatcctgaagccagcggatcagcgcaaagcacagacgcagcagccagtcacgaacgcgcgtgcgcatcatcgatcagatccgcgatcacgatattgcggatgatgaaacagacgatcacttcctgttcctgatcgaacgtatcatagatccttccggcgctccaggctccccggcctacggtagaaacgctgttggccacatagccgcagcggtttccgtccgcgcccagcacttcgatcgcttcgctgtcaaaacggttgtccggatcttttctgattttcagccgctgtccgacatagaaaaacgtggcgccataataatggtcgattccggtaatgacgatactgcgcatgatgactcctcctctcttgactgcagtataacagacatgatggtcaatattttaaccatatgcgcaaaatatcaaaaaaacgcatgatataatggcagtggtgatcatcatggaaaacagtcgttctgccatctttgcgctctaccatgtcctgtgccgcttcagctcccgcgaagagccgctgagcatagagaagatccgcgccttgctgaaacaagagcattcgctcagcctcaccaggaccacgctgcgcagttacctcaaggcgctggatgatttcggcatccgcatcgcggctgtgcccggcggacgatatctggctggccgtcagtttgaggaaagcgaagtatatctgctcagcaacgcggtccattccgcgcatttcatctcttcggcgcagtcagaagcgctgatccgcaagctgctggccacccagagccgcagcttcgaaaaacaatttcatgaaagcgtacatctggaaaaccgccgcaagatcaacagcccggcgctgctccaaaacatcgagacactgctctctgccatacagcaacgcaaggccgtcacctttgcttatctgcattatgacctgcgcaagcagctggtccccaaacggcagaagccatatcatgtctacccatatttcatggtcatggaaaacgacaatgtgtatctgctgtgcaagagcccctcgcatccggagcatttcgcgcattaccgtgtggacaagatcacggatatcgatacatccgcagagacggtcccgccgctggatgatgacatggatccatatacctatactgcgcagcgcaaattcatgtacagcgacgcggtcgatacgatcacgctgcgctgtcatctgcgcatgcttgacgacctcatcgaccagtttggcagcgcgctgagcctggcgccggcggacgatgagcatttcctcgcgcacctgcacgcttcccgtcaaggcatcgtctatctcgccttgcaatatgcgcgctattgcgagatcctgcagcccgctgatcttcgtcaggaagtcatttcgattctgcaggatacgctgaaacgctatgaacgataaaacaggcatggtctcccatgcctgttttccattcagcctctgcggcattgatcgtgctcgatctccgctttccaaccagattcatccagttcttcgcatgcacgaaagtatttcatcgctttgctgacacagcggaaattgatctcgatgccctcgctgtcattgatgaaggaagacgtccgttcaggggcaatgcccagtcgggacgcttctttcacagcgtccatattggcgcccagaaacaagaattcccagccatggccttccttttcctgttcgatcagccgctgcagctgcacataggtccagcgggtgctggcattttccagcccatccgtcatgatgacgaacagcacccgatcggcacgctgatgcggctgacatctgcgctgccggctgattgtcatctcgatggcgctgcccagcgcgtccagcaatgcggtgcttcccccgctggccacatcctctgccgtcatctcaggcatggcatcgatcggcacatgctcatgcagcacctctgtctgatggttgaacagtaccgtcgtcacgaagacctttccttttccatttttctgctcttccagcacacggttgaatccgccggccgtatcgctttccagcccatacatggacccgctgcgatccaagacgaacaccagttcacagatttcgtttttcatctcgctcatcctttctctgttttcgagctcagtatagcgaaaagatgaagccgcatggtcgcctgtgaggggacaaattactgtcccagcaaaggaaatccgtaatgaaacaacatctcattgaccgcaaagatatcatattctccatgttcgataaaatatcggatgatgagatcaaaagaagaacatgaggaaaaagaataacctgcccgattcatgagatcctcagattcatcgatgttcagccgcagcgcgatgcacagcgagagcaccgtggcctttttaggcgtgtaataaatgtcattgcggatcttggaaaaatgacgccggtcgagattggcccgatgatagacttcggcatctgtatatcctttctcatcgatgagccagagcagccgctgagaaaatgtatcctgcttttgcgcgagcagcgcatcaagcgcttcttcttgtccgatagattcctgcgcaggctcctgttcttctgccattatcatgttttttaccctcggctgcgcacagcttctgtccattcgttcatctgcctgcactgcttcatgttccttaagataagccgcgacagccgcttgacgctgaccagaaagcgcaggcaggtcccgctcccccaacaccagataaacctgcagttcttcccgccgcacgacagcggtgatgatgctgcgcgcgatgcggaatgcttcctcctgagcaaaccttgtgttcccgctggaaagcagcggaaaagcgatggagcgcagatcgttctttacagccagccgcaacgcggaacgatatgccttttccagcagctgttctctcttattcctgtcatcggtccatgctgggacgatcacgtaaatgatggatggcgcagacgagccaaagctcttgcgcatgatcgccctgcatagcgctagtctgattttgtgcggctgtccggcgccagcggcagggatgaccacggcgtccgtctgcatcttcgcgatatcccctcgaaccatcaaaaacggcatagcaacgctccttccttatacataaaaagctttcatggtatccaggcacaggcaagccagaacaccgccttccatacaagctccgcagtcgatgaagatatactggtttttccaaaagatctctgctttgccgctgatgagctgggtcggcgtatggccgacgaccatgtagcggtccggatcatcggtccaaggaacgctgcagtccggtctggtccataccagctcattcagatcatacgcggaaagcggtttatcggcgctgaagcggcctaagccgccatggaccagaagaaagcttttgccgccgatatgaagctcctcataagcggcaagatccagcagatagcgcatgatcgccttttgttcgctgcgggaaagggcctgaaactcccgtatcgtcacagcggcgccattgcgcagccagatctccagctgtctgagctttgcttcactcagcttcgctatggcatcctcagtgatttcctgagaaagccagtccagacatgatacgcacatcagctcatgattgccgataaggccatgcacgttggcacggcgcatcatgtcctgcagcaccttcatcgaaccgctgccgcggtcgacgatatccccaaggacatacagcgtatctttttcagagagatcgatctgcttcagcattttctcatatttttcatacatcccgtggatatcgctcatcacatagatcatatctgctcctccatatgtctccattataacagtccataaaaacgggaagcaatatgttttatgctggcatcttggccaagcatcaaacaacaatgcatgccttctgcatgcattttttcatttacatttcccataaatctgttacaatgaatgcgtgaaatggttttcatttcgacataaaattgatcaagcaaacggggagctcgtgtaaacgggctgagagtaagctgtatcgcttagacccatgaacctgatttggataatgccaacgtagggaacggtttttttgtatttctggacatgcttctttgcgggcatgtccttttctgttgaggaagaccatggaaggaggaagatccatgaatgaatgtctgaacgaggtgcgtgcacatgctccgctggtgcattgcatcaccaattatgtcacggtcaatgatgtggccaatgtgatcctggcttgcggcggcagcccgatcatgtctgatgaaccgcaggatgtggaagacatcacatccatctgcaatgctctgtgcatcaatatcggcactttgcataaggcgagcatcgaaagcatgttcatcgcgggacgaaaggccgcagcgctgaaccacgtcatcctgctggacccagtcggtgccggcgccagcgcgctgcgtacgcagaccgccctttctctgatgaaggaactgcctttgcagatcgtgcgcggcaacatctcagagatcaagacgctggcagccggcagcggcacgacccggggcgtcgatgccgatgtggc

SEQ ID NO: 967 - DNA, 9000 bp, Unknown
  16S sequences of unknown bacteria
cacgttgcttttttataccgtattttggactttacacataatttgaagaagagccactttagaaccaagaatttcaaatcataacatcccacttatttatttttcggacaaaagagaaaatgttcttgtgtatttaagtaacgccgtggaaaaagtgtgtaaagaaggcaattttatatttaacggtttatggtataaatggggttcatacggatttgaaaaagacggaagattaagatttgaggaatactatccgaatgctttggaagatacatataagggaataaaaggatatatttattcgtgcgacaaaattgaaccatatcaaaaattggatataaaaattcccaatgcctttatatcagctgaaaaaacaacaatagataattgcgaatttattcctgatgcatataatgaaataataaaagccgaagcgaatggcttgatcaccatattacgatatgacaactttattagtaatataaaaagaaaagagtggctggaaaaagtcataactgatgaataccaaagtaataaatcacatccggattatcgcttttttctcgaatcgagattttctgccataataaatcacgacggtgccttttgattcaatgaagtcattttttagcaaaatatcggtgcagttatcaaaacaataccttcctttaaccgagaacgaccaccctataaccggtttctattaaaattagagtcatttgccacaagctcaccgtaattctattaaaattacggtgagcttttattattgtcaaaggttttattttatgatataatcgacttgataaaatggattttggcggagggtacggatatgaaaagagtgcttatattaaacggcaatggtacagggttggaaagcttcgctattcgaagcgttcttgaatattttgggtacattgtaattatgtacaacataggcagaccgcaggattactttgatatattcagcgggaaacaaaattttaactatgactatttaattatcgggtgtcacggtgacgacggaaagataatcgttccgattttaggagagaatgtctattatcagaatgagtgcaggaataatatcggttatgaagaattacagggattagtgaacatcacggataaaaccgttatatgcaccggatgcaccacgggtgcaggagaactgtacaaggagtttaatcgaaataacaatacctttgtcgcgccgacggattacatcgagggcagcggcagtctaatgtttattgtgaatttattttatcatttgtcaggcggatcgaattttaaggacagctttgcccgtgcaagcagtatcgacactgaaaccgaattgtatgccctttattcttaatgctttttattgcaaggatgacatcttcctcttcgcagacgctcggcgctacattaaagctatcccccaacgtactatttgatcttgcctgccttatcccaccgaaaaaagcacctgcaattgcaggtgcttttttatgctatcgtgagatgcctccggtgcgatccgttatctgaagttgaaccagacgcacatattgctttcgcctctgtttgcaaaagacgcaaacgggatcattttcagcgtgaaatcttcaaaatttccgggatactttgagtaaagcgcgtcgtcgtcggttcttcggaatgcctttactttcaccgtgaatccgtcgaatctgtcggaatactcgtactctgccgagaaattctcatcgataaagatcgtgtgcagatcttccgtgttgtcgatcgcttccgccgcgcatacatacggtccgcagcaaacggcgagtttgccgcagtcggcatccacgcgggagttgctctgtacggcaaacggagttatctcaaacttgaccgttatctccccttcgggattctcgatcacggcgtatccgttctcgacggtaaagtccgcatctatatcgaatgatgcgcaccagcccggaattcttacgcagagctttttcacattttccgcgctcagccggatcacattgcttttcgggaaatccgtcgtttgcgatatgcgcatatcacctattttcgcctctgagcccgcaaactgattgacatatacggtatcaccctcgtagccgtagatatagtctccgagcgatgcgagaactctgttcaggttcggagggcagcaggagcaggagaatacggcgacacgggtcgtgatggcgagattctcccccgagagcttacggcgttcgaggtttatttcgagcggattttcgtagaagaaggattttccgtcaagcgacagtccggagatcatgccgttgtacagaatcctctctattacgtcggcgtacacgggatcgttttcaaagcgcatcatgcggtgagcgaagaacatcagggcaatggctgcacaggtctcggcataagccaggtcgttgctcagatcgtatgcatacgaaaaagattctccggaacgtgccgcaccgattccgccggtcacatacatttttctgccgacaatatcgttgaaaagcgccttgcaggtattatacagctccttgtcgtttgtttcatatgcgaaatccgccattgcggaatacagatagcaggctcttacgcagtgccctacggcaccggactgctctcttacgggcagatggctctgattgtacggggttccgtcactgtcgagaacacttctgccgtttataaagaacgccgcaatatcaaggaatttctttttgccggtcgcgcggtacatgcggatcagcgcaagctcgatctcctcatgaccgggggttgaaaatgcggcggatttttcatcgacgaaaatcttctttatgaagtccgcatatttctccatgaggagcaggaatctgtcttttcctgtggcttcgtaataagctacggcagcttcaaacagatgccccgcgcagtaaagctcatgccaatctctgttcgaaaagcgcttgtccggctcgcatacggtgaagtagatgttgaaatatccgctgtcctcctgatgcgcctcgatatcgtcaatgaggctttccactttcgcttcaagctccggatcgcgctccttctgcagtatgtaagccgcgccctccatccacttggcgacatccgaatcccagaagaaatgcggctgattcggcattcccggtttccagtcgaatcgaaacgcgccgattcttccggtttcgctgaacctgtcatatacggcatccatggtggcgtttctgttgagcagctgcttttcgtacaaaaatccgctttttaacgtgacatccctgtaactcacggtttgcatattttcatcctccgttttgcctattgacacaggcttttttatataatatactaaaacagagacgaaaaaacaagtgaaaacaaatcggaataaagtgagaatttcagacatgataaccttgaacgaaaacggaacgctgaaatatgtttcctcggggctctttcagtccgacggaagctggatacacccgcgtgtgacaattgaaacatatgaaattatttttatgtacgaaggaactgcctatatctgcgaggacggaacggagtatattctgcacccggacgacgttcttatccttgatcccggcagagagcattacggctttcgcgtgtcggaagagtacgtttctttttcgtggcttcacttcaaaacttcatgtgacagatataaaaatcttccgaaacattttcatgcatcaaatcccgcaatgccgaaaacgctgttctcgcagtgcatgcacattgcgaacactcccggatacgacccggtctgcaccgacctgtacacggcgctttacatcgaagagataatctgcaacggcagcgccgtgtccgtttcaaagaaccgccttgccgcgcaggtgaaggaatatgtaaatctgaatatcgaaaaggatttgacggtgcgcctcgtttccgagcatttcggatatcacgaaaactatatcagcaaggttttcaaagcggcttacggcgttctgctcagcagatatatcgtaaatcagaggctcgcatacgcgcgcgcacttctcaataccacgctttacacggcgaatcagatttcccgtcagctctcctttaaaagcgaaaatcactttgtaaaattcttcaaatatcacacgcacattacgccgtcggaatacaggaattcgtacacgaacatccatataaacaaggcgtagcgcgccgtgcggcagaaacgcccgcgtcggtttgggggcgttttacggcaggaacacagccggagctttgtcatttcattgaccgagaggcctgcgacaggaagacaagacggaatccggttatattcctaaaatataaaaaccgttatgcgcttttgctcgaattaaccacgccgccggcacttcataatctttcggcttttctttgtcgagtttctctatgacagcttcggtcatgatcggagtataataattgataccgaataaatctaccgttccggtcttcatattattgtaaatgccgcagtcaaaaatactgccgtattctcggaagaaggtatctatgtcgtctgcatagatgtataaagaatcggttttccaatgttgaatatgccggaaattcaatgtctttttcacggatgttttgcgcggcatatcgcaaaactgtatttcaatgaatgcagaaccgccgtaatttctgcgttcttcccgagcttcgaaaacatgaaacagcagccaaatcacccccgtattccaaactgccaagcccattatatcaccgaataataccgcccgtcaagagattccggaaagagtaaccgcccgccgtaattcgagaaattacggcggattctgcaaaaatcggcggtgaaaggtttttcggcggttttgcgtatggatttgaagctttacgacgatcaatgctttgcggagcaaagctgccgcgttttttctgtatctctcttatcttttatccggaaatgacgatttgagagaagaagaaacgacgatcttctgtctaagatcgtcgtttcttttctggtggagataagcgggatcgaaccgctgacctcttgaatgccattcaagcgctctcccggctgagctatacccccatattattgtaaatactgcaattgccgcattcttgaccgtccccccgacatgccgatccgccgccgaaaggacacggtaggataacgtacgggttcaagcaatagtatttaccgtgcgtctgtctcggatagcttcatcggagtttgacgctatgcggcaaactcgaggacacggtaggataacgtgcggatttatacaatagtatttaccgtgtccattataccttatttcggcggcgctgtcaataccgaaattacagcggaggcgaagcagtctgcgatttttttgcatgcttaagcagctttgtgagaatcgctcccgcgaggcagtatataatgaagtaaacaattatcccgagggagccgtccgagaagccgaaaaacataaagatatattccgagaagagcccgtaaaaagaaaacgccgagccgagagaaataagcgggagcgcgatgaatcttgtgagatccatgccgagcccgacgacgcggcaaagcttgctcacggaaagggatgcgttcacggcttcactgacatatattacggcgatatatccgaatatccccgcgcgcgggacaagaaatagtacgagaaacagacttgtcaccgcatcggcaatgttgacctttacgcagtagacctgctcgccgagtcccttgagcatcgcgtcaacggtggtatcgaggaacatcatcggaagcaccggggcgagaagccttatcattcgccccgcctcggcggaggaataaaccgacattccgagctcgtaccaaaaggtcatgaatatccccgccgcaccgatcccgaagaaaacggtagtgcttatcacacgccgcgcggcggacagtgcgcaccccgattcgccgcgctccgcaaacgaggtcatttccggaacgagcagcgaggtgaatgcgccgataacggcatacggaaacatgacgacgggcagcgccatcgaatggagtatgccgtatgacgaaagcgcatcggacgagcttttcccgaatctgcgcagcccccacggcactgctgcgtgctcaagcatgacaagaccctgacggatatatgcgccgagcgcgaccggaattgcaatatcgcatatttcgccaaagacgggaaaacgcgaaaaaagcttatgacgtaccgctttatccgaagcgcgcgaaacgttgtctctctcggcgggattttttatctcagaggtgtcttcaagcccattctttgcatttgcagaaaatatatttcgaccgcgtttgagacggcgcatatccgcacggtagaaaagatatgaaaaagcaagggaaaacccttcggacacgctgcctcccgcaacgaccgcaaagcacgcccactgaagcccgcgcggagcaaacagaacaagcatcgcagttataagaagtattttgttcgcctgctccgcgatcattaccgcagcattgcgcgaaacgcggcgcgctcccgtaaaatatccgcacagggcggtcgaaagcgaaattgcgggaaggctgagtgcgagcgctttgagcgacggcacggtacgcgcatcgcagagaagcttttcgccgatgatcccggagccgaagaagagcgccgccccggctgccgttccgaaaaaaagactgtatgcggcacaggaacgcattagttttcgtgactcggaacggatattttctgcgtttgccgaagataatatctttgccgtcagtctcgttgaggcaagattgattccggagcaggcgagcgtgaccgcaaaggagtagacgctcattacaagggaaaaaagccccatcccctccgcgccgaccttcgtgctgacatatgcgttgaagcttacggaaacggcgcgcagaagaatgctgacgcaggcgagatatgatgcgctcacgacgaaccgttttataccgttcataacgcctccggaataatttactgagaaaagtatatgcgaaaaggaaaataaaatacccgctcggcagatcgggacagcaaatagcatttaggcttttgccgaatttgacagttttgaatcgcgccgggctttgctgcggtgtttcggagcacacccccgcccggaaggctgaggattgcatacgggatgatgctgtcgtaaccgttcggcaaaaaatcgacaaattaaaaattttgtgcaaactatatatttacaaaattcgacttttgtgatagaataaatcggtttacaatatacaacttaatatcggagggtaaaatcatggcaaaacaaaaactccagatcggcgacgaaggcatctacgacgcccgtaagctcggcgcgggacgtatgcttgtactcggtgtgcagcatatgtttgcaatgttcggagcaacggtgcttgttcctcttctcacgggacttgacgttgcgaccacacttctcatggcgggtctcggcacgcttctcttccacctcatcaccaagggaaaggttcccgcttttctcggatcgtcatttgctttcctcggcggctattcggcagttgccccgctgctcggcaaggacggaatgactcaggcacagcttttgccgtatgcatgtctcggcgttgcggctgccggtctcgtttacctcattcttgcacttcttatcaagcttgtcggaacgaacaaggtaatgcgtttcttccctccggtagttaccgggcctattatcatcgcaatcggtctcggactttcggcatccgccgttaataactgctcggcaaattggcctcttgctttcatcgctcttgccctcgttatcgtgttcaacatctggggcaagggaatgctcaagatcgtcccgatccttctcggtgtgttcggagcttacataatcgctctcattgtcggaaacggattcggtgttgacggctgggcgatcgatttcagcgccgttgccgaggcaaaatggatcggacttcccattcacaaaaacagcaccgtgctcggcattgattggagcaagacttcgcttatttggagctcgataattgccatcgttccgatctccctcgcaaccatgatggagcacatcggagacatctgcgcgatcggcgcaacctgcggaaagaactacgtcaaggatcccggacttcacagaacgctcatcggcgacggtcttgcaacatcgatcgcatcgctgttcggcggacctgcgaacacgacttacggtgaaaacaccggcgtgcttgcactttccaaggtttacgatccccgcgtaatccgcatcgcagcatgctttgcagctcttctctcattctctcccaaattcgcggcggtcataagctccatccccactgccgttatcggaggaatctcgttcattctctacggaatgatctctgcgatcggtgtacgcaatgtcgttgaatccaaggttgatttctcgaagtcgagaaacgtcataatcgctgctgttatcctcgtttgcgcattcggtatcaaatacagcaccggcatgggatttgacgctgcggcaggcattgacggagctctttcgttcaatgtattcggcgcatcgatccacctttcgggtcttgccgttgccgccctcgtcggaataattctcaacgcgatattccccggaaacgactatgtgtttgacaacgataaaggagaagagaccggggtaaattttaagctctgaaaatccggaaaaagcaaaaaagtactttacatttcgcatcggttgatgtataatgataacgtccggcaaatgccggatgacggaggcatagctcagccggttagagcgcacggttcacatccgtgaggtcgagggttcgagtccccctgtctccaccaaataaagacaccattgaaatctgaacccacaagttcggactcaatggtgtttttattataaaatccagtatttatgcggcttttcgaggtcgca

SEQ ID NO: 968 - DNA, 2552 bp, Unknown
  16S sequences of unknown bacteria
agagaaaaaagataaacaggtagttaagctggtgtggattgaaaatattgagaagaacagtaagttctgtcttggaaattgtacaaggggaaagatcaatgtaagggaagaaaattagaactcttatgatcaaatgaacgaatatattatcagaaaactggaagagtaaggttcaaacatttttgaatttcgtgatagaataaaagcaattcgtttacacagcagtgtttaccgggttgcttttttggatagagcgggagcgaaaggaagaaaatttgtccgatcgaagtaaaatcatctggctatatatcgcacaaatcgtttgattatctggtgaaaaagtatcagcttaaaatggaagaccggtatattatttatacgaaggatttaaagcaggagagcggaattctgtttcttcctgtctacatgacgatgttaatttaaccgaatcaggcaaggagccggcttttgttgcgcagagcaataagcagaatatttgtttgagctgagtcagaaaggagaaattatgcatatcattatttgtttagacgatgacaacggtatgttgtttcacgaccgcaggcagagtcaggatgtaaagctgcgggcggatgtgctggagcggctgggagagaggatgctttggatgaatgcgtattcagcgaggcagtttgcggatgcggaagatgcgcggattcatatttcggatagctttctggaagaggcgggaaaggatgatttctgctttgtggagaatcagccgcttttgccgtatgaggcgcagattcaggaagtgatctgttatcggtggaaccggcgctatccgtcggatgtgaagctggatctgccgctggagggctggaatgtgatggaagagacagagtttgccgggaagtcgcatgagaggattacgcggacggtatacagacgaaatatgcctgtgagatggcaggaagggtggaccgatgggcagcggtaacaaaacggcggacaaaagtgcgaggcagtcgaatgtaaaaggcagacaggtgaagaaaactcaccgccagcaaagtggaagcaatcgacaaatgagtaagaacgttcggcagacaagcggaggcgggcaggcaagtggccgtgccagacagcccggaaataatggggcggcaaacagccgtgcacatcagacaggaggaaaccgtacacaaatgagtaaaaagcgcagaaagaagaacagatggaaaaaaggacagtcatggattggactattgattgtgctgcttctggcactgtttgggtaccgggagtgtgatctggaactgccatcgtttgatgttccctcatttggcacatccggaaagaatgtttcactttctgagattccggaatactccggaagcccttatgtggagatcaatggaaatgaaccggatttttcaaagtcggattttacggcggattcgtttgagacatacagcgaactcgattcgttcggacgatgcggagcagcctatgcgaatgttgggcaggatttgatgccgacagggccgcgaagcagcatcggacaggtgaagcctaccggttggcatacggcaaaatatgacagcgtggacggaaaatatctttataatcgctgtcatctgatcggctatcagctgacggcagaaaatgctaataaaaagaatctgatcaccggcacccgctacctgaatgtggacggaatgcttccatttgagaatatggtggcggactacatacatgagaccggcaaccatgtgctgtatcgaatcacaccggtctttgatggtaataatctggttgcatccggcgtggagatggaagctgagtcggtcgaagatcagggggagagtatttccttccatgtgttctgctacaatgtgcagccgggaatcggtattgactatgcgaccggggacagttgggcggagtgacaacaagggtcatcaaaaaaaagattgtaatttttgacgatggcgtttatgataagtgcaagagagcggcaacgagccggatgaaaaatagaaggacggtcggaaaggccggggaggaaagatatgtactatgtaccagacggcacaaaggtgtgcggatattatgagtgtaagaaatgtggaaaccggtttttgtctctggaagtaaagaacaaaatcccatgtccggagtgtgaggcagagatcgactatgagatcggtccggatgaatcactggaggatcttctggagacagcggagctgaaggagaagatcgagggcgaagaggaggttgagcagatggatgcgcttctgagccttgcagtgacaggcggagattttaactggatctgagaagtatctggcttctggaacaacgcgtcagtagccggatatacaggtggcttacccggcagctcatcaaaccttgttgcggagaccgcagcagggtttgatgagctgctgtaaaatgtttaaaaaacgcatactttttgaaaaataaaaaaaattaaaaaaatttgaaaaaagttgttgacaaaagtaagaacctgcaatataatcaatattgttctgagggac

SEQ ID NO: 969 - DNA, 4124 bp, Unknown
  16S sequences of unknown bacteria
cccgtgtgcggcttaggccgcttattagcccgtccaagaactgggatgcagttcatctgctcgaagggctttttcgtgcccgcataccgggccgtcgcaggaggccggaggcgtgtagcccgcatgggcgcggggcatcgggggcgccggtgcgtgtcagttgcccgacaggatcgcacgtgccacggcgaggccgttcgcagaggcttgctgcagaccgcgcgtgacgctcgccccgtcccctatcgcgcgcagccccttcacgttcgtgcgaaacgaggtgtcgacgagcacgcggttggagtagaacttcgtctcgacgccgtacagcagcgtctcgtcgctcgcgatgcccggtgccacgtggtcgagcgcgcccatcatctcgacgatgtcggtcatgatgcgatgcggaaagacgagcgacaggtcgcccggctccgcgtccacgagcgtcggacgcaggctgttgcggcgcaggcgctcggcatcggtgcggcgcccgcgcttgaggtcgccataggtctgcacgagaatccgcccgtcggagagcatgttggagagccgcgcgatgtgcttgccgtactcgatgggctcgtggaacggcttggtgaagcgcttcgagacgagcagcgcgaagttcgtgttctcggtcttgaggtcgtccgacttgtaggcatgcccgttcaccacggcgagcccgtcgtcgtagtactcggtcgccacgacaccggccgggttggtgcaaaacgtccggaccttgtcgtcgtaggtgggcgtatagtagacgagctttgcctcgtagaggctgttgttgaggtactcgaggacctcgttgcgcacctcgacgcgcacgccgacgtccacctgccccggctccgcgtcgatgccgtggtcgacgcacatgtggctgaaccagtccgccccctcgcgccccaccgcagcgatgacctcgggggcgctaaagcgctcgccctcgtcggtgacgacggccttgagggcgccgtcttccacgacgagctgctcgacggccgtgttgaacatgaggtgcacgccatgctcgacgaggtagttctcgatgcgctggtaaatcttgtatccctcctcggtgcccaggtgcctgatcgggcactcgatgagctgcaggttggcgcgcacggcacggcgcctgatctcgcggatctgctcggcgctgtccgccccgtacacgtgcgagtcggcgccaaagcgcaggtagatctcgtccgagtcgtgcatgagctcgttggcggcatcgtagccgaggatgtcgggcagccagccgcccacatcaggcgaaagcgacagcttgccgtcagagaacgcgcccgctcccgcgaagcccgtcgtgatggcgcaggggttgcagcccatgcagcgccccgtctggcgcttggggcacgagcgccgctcgatggagcgccccttctcgatcaccaggatctcgagcttggggcgcttcgtgatgagctcgtaggcgcagaagatgcccgagggccccgcgccgatgatgaccacgtcgaattctctcgtcatgctcacatccttatggaaagattgaaatggactagtacgcccaggggtcggacaggtcgacgccgttggcgatgagctcgacgtcgcgcgcgatctccgcctcctcgtccgtggggatgacgagcatcttcacggcggcgcggtccgtcgagatgaggcgctcgacgttgtccttggcgtagttgcggttctcgtcgatctcgatgccgaagggctcgaggccgcggaagatcagcctgcgggcgtacgcgtcgttctcgccgacgccagccgtcacgacgatcgcgtccacgcccgccagctcgaaggcgtaggcgccgatcatgcggcggatcgagaacaggaagatgtcgtaggcgagctccgcctgctgatcgccatggcggatgacctccttgaggtcgcgcaggtcgcccgaggtcccggagatgcccagaaagcccgactcgcggttgaggatccggtccatctcgtgcgggctcagatgctccttctccatgatggccgtgatgatggcggggtcgaccgagcccgagcgcgtgttcatcatgatgccgtcgagcggcgtgtagcccattgaggtatccatgctgtagccgtggtcgatggcgcaaatcgacgcgcccgcgcccagatggcaggtaatcatcttgagcgagcgcaggtcctcccccaagaactcggcggcgcggcgcgacacgtacttgtgcgagatgccgtggaagccgaacttgcggatgttgtacttctcgtaataacggtacggaatcgggtagatgtaggtgcgacgcggcatcgtctggtggaaggcggtgtcgaatgcggccacctgcatggcgcgcggcatgagctgcttgcagcgctcgatgacgcgcagcgcgtaggggttgtggagcggcgcgagctcggagtactgcttgatgacgtcgatgacgtgccggtcgatgacgaccgagcagttgaacgcgtctccgccgtgggcgacacggtgcccgatggcgtcgacttcggagagctcctcgagcggtgcgcccgaaagctcggtgagcgccttcatgacgagatccatggcctggtcgtaggtctttgcctcgaccgtgcgaaacgtcctgcccgcctcgttgatattgatgaagtgggcgttgtccgtgccgatgttctcgaccatgcccttgcacagcgatttgccctcgggcagcaccgggcgatcgatggccttcatcaccatatccgcatcgaacagcttgtacttgagcgagctcgagcccgcgttgaaaacgaggattttcaccgtgcgcgcctctcaatcagctcgaggtgacggtgctcgatggtcttgatgcaggcctcgagcgccttgcggtcggtcggctttgccaggtggcacagcggcttgacgccaaacgcctcgggctcgtattccgcgtacgcgctcatgaacacgatcaggggcggatgctccaccttgggaagcgcctctttgagtatgggagaggacgggtctgcgatatcccagtctaaaaagacgacgtcgaggccgccccgaacgatcttggccacggcctctgggaagctcaccgcttcggcaacgaccttcacgcggcccgtgtcctcgagctggttgcgaagctcgacacgcgccggcgcctcatcgtcggcaatcatcgcctcgaaaatcatctctgctccctcacgcgcttgaattgcagcatccaaagcatacatactagcattgctgtattccaaacacattcggctttgcgcatacgtctggccgcatggcatcgaaaggatggcagacatggcaacgatgctctatcagggacacggttcgtaccgcttcgtgtgcgatgacggcacgaccgtctacgtcgacccctttgcgggaacgggctacgagcttcccgccgacctcattttggtcacgcacgagcattttgaccacaacagcgtcgacctcatgccccgcaacgagggctgcgagaccatacgggcggcagacgtacacccctcccccgaggtctaccgcagcgtggaaagccatggcgtcaccgtgaccggcgtgcaagcatacaacaagaaccaccccatcgacgagtgcgtcgggatggtgctcgaactggacggaaagaccttcctcgcctcgggcgacacgagcatgaccgacgacatgcgcagcggcaagctggcggcgcttcgcctcgactacgcggtgtttccggcagacgggtactacaacatggacgtcgcagaggcgagcgcgtgcgcaaagctcgtcgatgccgcgcacagcatccccatccacctcgtgcccatcgacgacccgagcgaccccgcgcagctcttcgacgcagccaaagcctccgcattcgacgcgaagggcaagatcgtcctcaagccgggagacgagctgacgctctaacaacgcagccacagccctcagatacgagaagcgcccccgcaacaagcaggggcgcttcgttttatcctgtggagccttggattacttgaccacgagggtcgggcacttgacgtgcttgatgatcttgtggctgaccgagccgatgggg

SEQ ID NO: 970 - DNA, 15048 bp, Unknown
  16S sequences of unknown bacteria
gccgtccaggcgctggccgtcggccagctgcttgaatgggacagcgagaaggtcatcgtcaaggccggcaccatcatcctgctgtgcaacaccctggtacagctgatgcagaacttcacctggcagtttacattggtggaagaaggcatggagagctcctccatcctggcctccatcgccagtcccatcgccgttttgctcattcctctgggctttggggtgtggcagctggccgccgccgctgtcaccggctttatcgccaaagagaatgtggtgggcacactggccgtggtttacggcatcaccaacttcatcaatgtggatgaactggtgctcacccacggggccgatcaggtggccgccatcttcggcctgagccaggccgccgctctggcctacctgatgttcaacctgttcaccccgccctgctttgccgccatcggcgccatgaactcggagatccgggacaaaaaatggctgctgggaggcatcggccttcagtttgccacaggctatgtggtggccttcctggtctaccagatcggcacattggtcaccaccggcacctttggccagggcttcgtccccgggctcatcgccgtgctggccatcgtgatggtattcgcccttctcatccgccgcaccaaccgacagttgtccagagactacgctctgaacgccggcgactgatacggctgcgctgcaagccctttctgaaaaaggaggttttcaaaaaaaggaggttttcaaagatgtcccctacggaccttattttgctgggagtgattttggccctggtggccctggccgcccggtatgtatacaaagccaaaaaaagcggctccccctgcatcggctgtgacgccggaaagggctgctgccactgctgctcctcggcccaaaagaaaaaatagaactgagacccatttccccggaggctttttcctccggggaaatttttcttccggatgcttatctcccggaaaaacaggacgatatgaaaaataggtctatttttgtgacaaattcgctcttttattctctttctctctgtgcatagcccggggttttcccggcgtcaaaggaagtgaaaccaatggaaccaatggagcactggcatcctcagtacttccgtctggaagcagaggacacgcccccagaaaccatgcggcttctggccttttccatgggctttgccgcccacagtcccttgtgtgccctgcggggcatgtggcagggccggcagccggaatctttggaaatcaccttgccctccggcccctggcaggcgctggaggccaaaagcaatgtgcccctggaaggaggccggttccaggccgccctcacccgggccgctttcgcccggctcagccgtctgtcggagcgttcccccctctatgccggggaaaacctggacgggcaggcggtggtccacctgtcccacgaggatatggtggcctggatctttctcctgcccccggtgggccagggccatgagctgtcctccgacgatctgctccaggccctcatcgaaaaaggggtcacccaggggatcgacctggaatttctctgccgcctgccccacatggagggccggtatttcacccccttccctgtggccatgggccgcaccccttctccgggccgggacggctgggtggaagaactgttcccccgcaccctcaccccctttctgtcggggaacctggaggacgccaactatgtgaccctcaacctggtgcggaaggtgaaggagggggagaccctgtgccgtctccacccggccgcccccggtcagcccggccggacggtgcggggacgcaccctggcccctccccccaccagctccccttccctggaaggaggccgtggcacccgcctttcctccgatggcctgtcccttctggccgcccgcaatggccatgtgcagttttccggcaaaagctttttggtgcagccggtgctggagatctcaggggatgtgaccgccgaagacggagcggtgagtttcctgggcgatgtgtatatccacggggatatgagcgcagggtccatcctgcgggccaccggcaatgtgcagatcgacggcgtggtggagggctgccacctggaagctggggaaaacctggtgatctcccggggcgtccagggccagggggaagcggacatccgggcccacaaaagcatcttcgccaaatacatggagcactgcaacgcctatgccggcgagagcatctatgccgactgcatcgtggattccaatgtgtacagtgacggctgcatttatgcctgcaccggccggggcgtcatcgtgggcggcagcatccacgccgcccagacggtatcggcccagacggtgggctccaaaaatgagcgccccacctccattttcctgggtggcagtcccaacgaggaatttgagcgggcccagctccaggccgaggaaaacaaggccctggcccttctggaaaccctggagggaaaaccccagacgcccgaggtgaaaaagcagatctattcccagcgtctggctctgaaagtggtgcagatgaagctgaaccgccaggccggcgccgagcatctccacccggaaaaagaagcggctcccgcccaccggcatttgctgtgcgatgcctgctatccggtgacaacggttaccatcggcagggagttttttcaggtgacaaaatacaccgctccctgtgccatcgggcttgacgattgacccttgattcgtgtatgataatagtataaaaatatgttggttttcctgctccgccccatggcatgtgttctcctttgctctttctttctagagtcagacccaatattttattttgaaaggagattccgacttggcaaacgctctcacggaacaggaatttctgtccatctcagatcaggcgctgcgaaagatcacccatcacatggggcgggtgcgtcttttctcccagcaaccggaaccatctgaggatatgtgcacggtctataccacttttgaaggcgactatcaaggcagcctgattctgtgtatggacacggagtttctgcttcacctggcccagcaggtgctggatgccaacgatgtaaccccccaggacatggaagacaccgccaaagaatttttcaatgtgctctgcggaaatgtatccgccgggctgcaccaaagcgccgggctttccacccggttccgtatcccacagttccgctgcgggcctgtggctcctgtgccggaaccgtgtcgcgtcctgttctataccagctgccgccaggaggggcttcagctgattcattatcctcttcccctcctcaaagcgttgtaacgcaactatctttcagataaaggagcgtgatccacccatgcccaaaaagattttggttgtggacgattcccgcattgctcagctgcagctgcaaaagattctggccgattccgattatgaagtagtgggatgctgtcagtccggcgaagaagccctggaactgtatgacaaactctccccggaccttgtgaccatggacattctgatgcccggcatggatgggctggaagccgcccgcctgcttttgcagaaggaccccaaagcccatgtactcatggtctcttccctggcctacgacgacaccatcgacgaagccgtacgcatcggcgccgctggctttgtctataagccctttgacggcgagcagctcttcgccgctttgaacaagatttttcctgcggtctccgcttgatgtcatctgaacaccggcctgtgatccccttttcacaggcgccgcccccttttcctcctcggagcataccatgggcgtggggcgatgggaaaccccatctccccatgcccatttttccattcaggaggtttttcccatggcgaatatcacacaggatctgctgtccctgcagtacagcaccagcttctccctcagcggcatggaggtagccaacattgacttgcagctttcggtggctcccccgcccccatccaccctgacaggtgttgtcaccgacggcgaaactccggtggccgatgccaaaaccaacagcgagggcaaatatcttttcggcggcgtgctggccggggatcatctggtcaaagccaagctggagcagtaaacaaactctgtcaaagcccaccctgccccttctccttgggagaaggggcagagagcgtgtcgaaaaagtggcttaggccactttttcgagtttttgcaaggggctggcggagtgcctccgctcccatactgcgctcccgcgctgggcaggtccgatgcagaaaggcaaagaaagtatggccgtccggccaccggaccagcggggcgccccgctcttgcaaagtgcaaaaagccacgcacaggtcgcggctttttgcggattgataggggtagagcggccatactctcctaggctgtataggctgctgtgcctgggtattccggggctggcggcgagccccggaaggggccagggtgcgatcctggcagggtgcatgacaaaaggccttcccaaaggaaggtcttttgtgttcggtttggttctattgcctagcgcggcagcgcagtttgggtgcagcgtcacgctgcccaggcactgggcccgggtgatggtttatcacacccggagcagtgaggccccgggcgcatccccgccggagacaggaacgggcgtcccggcacgggaccggggaaacaggcgggcctacatcggcctgtttctgcctcctggagagcctatcgccctttctttttcctgggaaaatttctgtttttcctttacccgagagccctttttacccccggatttttttggtttatctttcctccgatagaaaactcacccaagaacaatccgttctaataagggattttctagaatattttgggctatactggttttggtgattcctatgcggcaatatcgaaggatccgggatctgcgggaggatctggatatgacccaacaagagataggcgaagcccttggattttcccaacgcacttacgcctactacgaaagcggccaacggatgatccctccccaggtgctctgtgctttggcggattttcaccaagtaagcgtggattatatcctagagcgcaccgatcagaaaaaaatcaaccgataacaccaaatacacctttccctgaaaaaaccccctgcactttttattgtgcagggggtttttattttttcagcatcaattcaaaaagtctttcagctttttgctgcgggagggatggcgcagtttccgcagggccttggcctcgatctggcggatgcgttctcttgtcacattgaactccttgcccacctcttccagagtgcgggtgcggccgtcctcaatgccgaagcgcaggcgcagcaccttttcctcccgaggggtcagggtcttgagcacctccaccagctgctctttcagcaaagtaaaggaagccacttctgccggttcgggagcatcgtcgtcggggatgaagtcgcccagatggctgtcctcttcctcgccgatgggggtttccaggctcaccggctcctgggcgatcttcatgatctcccgcaccttgtcggcggggatacccatctcgtcggcgatctcctcgggagagggatcgtggcccagctcctgaagcagctgacgggacacacggatgaccttgttgatggtttccaccatatgcaccgggatacggatggtgcgggcctggtcggcgatggcccgggtgatggcctggcggatccaccaggtggcgtaggtggagaacttatagcccttggtgtaatcgaatttctccaccgctttgatcagacccaggttgccttcctggatcaggtccaggaacagcattccgcggcccacataccgcttggcaatggacaccaccagacgcaggttggcttcggccaggcgctttttggccttttcgtccccttccagcatccgcttggccagctcgatttcctcatcgggggacagcaggtccaccttgccgatctccttcagatacatccgcaccgggtcgtcgatggccagaccttccgctaaaacggtgtcgtcgggcacttcttcctcgtggatgtcctggatctcctgcaggtccggatcgtccagatccatcaggggcacttccggcaggccgtcttcctcttccacggcgatgccgatgcccatctgctccagcatctccatcattttgtcctgctgcttgctgtccagctccagctcgtcaatggccagattcagctctttcatggtgattttgccgcttttcttggcattgtccagcagagccttgatgatctgctgcttgctctgggttccctcctggtttttgtcgttcttcttgttcttgtcttccgccattcttacattcctccacgctcttgctgccgccggagccggcgctgggccagctccaggagggcagcatcgtcttgttcttcggtctgatttttctttttgatatattccatctcgatcaccgagagataatcttccaatgcccgctgggggtcctgcaccggcggctccttggccaccagcctggccagcgtctctccctcttccggggaaaggaggctcatgcacagccccaggctggtctcctccccttgctgccgccgcttgagaagcagttcatagatcttccccaaaaagggagaggaaaactgctccggccgcagccgggaggacaccctgtccagaagctccccgtgggaaaacagcagggccacaagcccttcctcccgccgggcggagcgcacattgtcatagtgcagctcccgggcggcgggctgagcggtccgagcgggctgcatggcctgccgttcctgctgggccttctgctgccaggcccggcgcttccgctgccgctccacctcttccagcatggattccgggctgactcccgccttctccgccgcctgccgggagaagatctcccgctccacggcgctggggatggcgcaaagcagcaaggccgcctgctgaagaaactccacccgatcttcggtctcttccagatcgaaccgggcggcaatctcgctgagccggtactggatatcactgtccgatttttccagcagatcccggaaggctcccgggccatttttccggatatattcgtccgggtccttggccccgctcatacgcagcacccgcaccttgaggccggtgggggtcagcaagtcgatggcccgctgggcggctttctttcccgcctcgtcgctgtcatagcagatgatcacctgctccttgccccgggaggccatcagccgggcctgctccttggtgagggaggtgcccaggctggccacggcgctttggaacccggcctgatggagggcgatcacatccatatacccttcggccagaaggaaaaaatcccctttggattttttggcgaagttcatggcgaacagattctggcttttctggaacaccggggtatcggaggagtttaaatatttgggcatactatcgtccatcacccgtccgccgaaggcgatgacccggccctggatgtcgatgatggggaacatgacccggttccggaaccggtcatagaccccgccgcttttgttctgcaccacaaggccgcattccagcatttcccctttggtaaagcccttctgtgtcatggcatggatcaggctgtcccagctgtcgggggcaaaacccaggccaaaatgcttcagagttcccggggacaggccccggcccagaagataggaaaggcccccctttccttcgggggaatagagcttttccacatagaaccgggcgctttcggtgcacagggcgatgagccgtttccgcttctccccataggaggccccggtgtcttcgggaacttccattcccacctgggcggccagatggcgcaccgcttcggggaaggtcatgttttccatctgcatgacgaagttgataaccccgcctccggcgccgcagccgaagcaatggtagatctgcttatcccgggacaccgagaaggagggggttttttcgttgtggaagggacacaggccaaagtagttggagccgctttttttcagcttcacataccggctgacgatgtcataaatgtcgcatcgtgcggtgagttcctgcaaaaaactttctggtaacgccatcttcttccctccattcaagcagcatgctactggcggagtgcctccggcagcgtgacgctggcggagtgcctccgctgtcatattgtgctcccgcactaagcaatcaaaccaaggcttttctgcgagatttagcccctactttgtctttctacacacaacctgcccagcgcggtagcgcaatatggccgtccggacaccggactcatatctgccacgactgggggatatacaggcgggagaacacatccaccgcaaagcggtcggtcataccggccacataatcgcaggcggcccgctcggccccctcctgcaaggcgatctgcatataatcggtgggcagatcgtcggcgttctccgaaaaatgccggtagagctgggtgagcacccattgccctttccgctcctcccccttggcccggggattctggtacacatggtggaacataaagtcccgcatttccagcatggcctcctccagaagcggcggcaggccgatctccccttcttcctctccataggtcaaaagaccgtttaccaaagtgtcgatacgctgggaatgggtctggcccagcacactgcgcaaagacgccgggatatcctggggcgagaggatgcccccccggatggcgtcgtcgatgtcatggttgagataggcgatccggtcggcataatggacgatgcgcccttccatggtgtcggcttttttcttgccggtgtggcacagaatgccgtcccgcacctccatggtcagattcaggccctcaccgcccttttccagccggtccaccacccgcaggctttgttcgttgtgggcaaagcccccgggcaccacctcccgcagcgcctgttctccggcgtggccaaaggcggtgtgccccaggtcatggcccagggcgatggcctcggtcaggtcctcgttgagccgcaagccccgggccaccgtgcgggagatctgggagacctccagagtatgggtcagccgggtgcggtaatggtccccttccggggacagaaacacctgggttttgtgtttcagcctgcggaatgccttggaatggatgatcctgtcccgatcccgcataaaacaggtgcggctgggggattcctcctgaggcgtgggccggccccgggatgcgcttgccagacaagcccctttctgcaaggtgcgctcttccagctcttccagtcgttttcgtatcacagggcatcccctccctttatataatacgccaaaaagacctgttttccttcttttccggggaaaattttttctttatttcacccgcttggcccgcagggacacttctcccttctgagggttgacccggccggaggtgctgtccaccacctgggcggtaaagccgtcaaatttttcatcggggatggaaaagtgtatgaccacatggtcggaatattccacatcgtcctcctgggcgtcaaaagcgggcatcagactgcgcaccgtctcaaacagggaataatcgcaggggatgctcccctggcggaagggcaccatctcggccaccccggcggcgtccacggcgatcttggccccgtggccataggcccgggtcagcccgccggcccccagcttgatgccgccgaaatatcgcaccaccacgcacagcacatcgaaaatcccctcttttttcagcacctccagaatgggcattccagcggtaccctgaggctctcccgcatcggagaagcgcatcacctggccctcctccacgatgtaggcataggccacgcaggaggcatcccagaattccttctgcattcttttgatctgatccatggcctgctgggtgctggtcacctgaaagatatgaccgatgaaccggctttttttctcaacaaattcgtccttcccctctgcaaagggcaccttttttcctgccatgctcatatactttctcccctttcacaagctggaaaagcggccttttccagtaaaaggccgctttctttcattcctgttcttcggtttgcgcgttttcctgattctgagcttcctgctgtttctgtgcttcctgctgccgctttttttcctcctcggcccggcggcgctgcaaggcctcccggcgggcggcctttttccgcttcatcagttcttcccgggcctccttgatggacaggtcgtttttgatcttcatatatttatagatatcgaagatgcacacgctgcccaaaaacagggcgatgaagaaatggagccaggtgaaatccagcagcatccaggtgaccccgcccaaaaagagcacataaaacacgatggccataatgagatagggcttgccttcggggcagatgacgatgggctctttatgccggggagcctctttcatctttttttcctgttcctcggtgatcaggggaccggcccttttttcctcctggcggcgcttgtcctctctgccccagcagaagaaggccgccaccacaaagagcaggatttcggcgataaagccgatcacattgggatttgcgcctttgatccacagatagatcatgtggaccacttccgccccgctgagaatggcaaaaagcagggtgaacatcatccacacgctgagctgtttcattttcatgccgttttttcctccgtttgttctgcacaagggccttcctgatggcccgtattattctagtatacacggccagcggctttttttccaccattattttgtgtattttcataagaatgacatttttcccgaaaggctgtataaattgtccggtttttttgctatactgatagaatcacgaaatggaggtttgacgcatgggttcgggaaactcctataaaaagcttttttccaccaccatgattctggccattggttctttcagctccaaggtgctggtgttccttctggtgcccttctacacccgggtgctctcccagagcgaatacggcacggccaacctgatcacccaggcctgcaacctgctgatgcccctggtgtcggcgggcattgccaacgccgtcatccgcttcgccttgcagaaaggaagcaacaaaaaaggcatcttctccatggggcttgtgacggtgctttgcggcggcggtgtactgcttttgctctcccccatcctctctctgctggagtttgtgcagggctataccttcctggtgttcctctatgtgctgatgagcgcactgcacacggtgtgcgcccagtttgtccagggcatgaaatacaccaagctcttcgccctggacggcgtgctgcgcacgctgatgaccatcggctttaacattctgctgctggtggtctttgatctgggcatctcaggttatgtgctggccaccattttgtccgacgccctttccaccctgtttttgtggtttgtggcctccctgggccggtatttctccctgagccacatcgaccgggatacccggcgcaccatgctgcgctattcggtgcccctgatccccaccatgatctgcgtgtggatcgtcagcatgagcgaccaatatatgctggagtacatcctcaacggcctttacagcgccgcggccaacctgcccaaccaggtgacccacatcatgggcgtggtgggagacgcctgcaagcaggaactgtccctgcccgacacctacgccgtgggcagcgccgccgtggccatctatgtcatctcgggcaaggtgcctcacatcctgtccattgtggccagcatcttcggcgacgcctggcagatctccatcgtctccgaagaccccaaaaagcagcagcggttcttttccaatgtgttcgccacctatcagtgcgtggcactggtgggctcttccggcctgattatgacggccaagatcatggtcaccctgctggccgccccctcctattattccgcctggcggtatatcccggtgctggtgctgggcatcacctgttcctgcctggccaccttcctgggcagcatctatatggtggagcggcagagcgtccacaccctgaccaccacgctgctgggggctttcctcaacattgggctcaacctgctgaccatcccccgcatgggcgtgatgggcgccgccctgtccacctgcctcagctatctgctcatgttcctggtgcggggcattcacacccggaaatacatccccgtccattggcggctgcacaaattcctgccctcctgcgccctggtggtgctccaggccgctctgatgctgtgggaagttcccctgtggcccctgtggcagatcctgtgcttcctgctcatcactctgctcaatatcaaagagctgctccgctcccttttccggcttttttaggcttttttcccttttccccctttacatcgggccaccggtgtgttatgttacaaacagaagaacaaaacagaggagatcatgcgccatggtcagccgtctttttacagctgcatattacttttactttagctttatcaacttttttgataaggcttatttgagttttgctgtaaaaagcccctgcctcggttgattccctgagtcaaggccagcgcggccccgcagcgaaattcgcagcggggccgtttttttgtgccgtaggagaaaggatttgttgtaaaatggtagtgcttctcaagaaaaacgccccccagcagcagctggacagtctcaccgcctggcttcagagcatgggcatcacccctcacatctccgtaggctcccagcagaccatcgtgggcctggtgggagacacctccaaggtggatatggatgtgatccgggccatggacattgtggaggatgtaaaacgcatccaggagcccttcaaaaacgccaaccggaaattccatccggaagacacggtgatcgaggtgggcggcgcccgcatcggcggcggaaacttctgcgtcatggccgggccgtgctcggtggaaagcgaagatcagatcgtggcggtggccaaagcagtgaagcagtcgggcgcccaggtgctccgtggcggcgccttcaagccccgcacctccccctacgccttccagggcctgcagggcgacggcatcaagctgcttctgctggccaagcaggaaaccggccttcccattgtcagcgagatcatggacgcctcccacattcccctttttgaggatgtggacatcatccaggtgggcgcccggaatatgcagaacttcaccctgctgaaagagctgggcaagctgcgcaagccggtgctgctcaagcggggcctggccaacaccctccaggagctgctgatgagcgccgaatacatcatggccgggggcaatgagcaggttatcctgtgcgagcggggcatccgcacctttgagacctacacccgcaacaccctggatctttcggccatcccggtgctccattccctgtcccatctgccggtgatcatcgaccccagccacgccaccggccagagcaagctggtgccccccatggcgctggcttcggcggcggcaggagccgacggcctgatcatcgaggtgcacaacgacccggcccacgccctgtgcgacggtccccagtccctcaccccggaagatttcgataccctgatgcaaaaagtgggagggattctgccctatgccttccggtgattttcagaagatcggcgttctgggcctggggctcatcggcggctccatggcccgggctgcctgccaggcaggctgcaccgttttcggcctggaccgggatccccaggtgatggacaaggccggagccatcggcatccggcctatgacagaagaagtccttccccagctggatgtgctcctcaccgccctctatcctggggccacattgaaggaaatggagcgtctggccccgcatctttcccaaaacacgctggtggtcgacctgtgcggagtgaagatggcggtggtgcccggcatggaaaaattgagccgccggtatggcttcccctatctggggggccaccccatggcgggaaaggaaaccagcggctgggacttttctcaggccgggcttttccagggggcctctatgatcctcacgccgggagaaggctttgacccctccctttatgacaaagcggcccggtttttcctctccctgggcttcggacgcatcaccaagagcaatccccgctcccacgaccggatcatcgccctcacatcccagctggcccatgtgatctcctgtgcctacatccaaagccccacggcagaggatttctccggtttttccgccggaagctttcaggacatgacccgggtggcccggctgaacgagaccatgtggaccgagctgttctgggacaaccgggagtttctcgcgggggagatccggggcatggccgggcggctggagcattacgccagcctgctggaaaccggagacaaagaaggtctttttgatctgctgcgggacgccagagaaaagaaagaagagtcggacagcattctgaaaggtggaaaaagatgaaaacagtatccattgattcttccaaacaatataacatccacatcgaacgaggccttttgaaaaaggccgggagcctgatctcccaggtgcacccccggtgcaaggtggccatcgtcaccgatgacaatgtggcccggctctatctctcccaggtttccgccgggctggaaaacgccgggtattccctgtgcaccctcatcctgccccacggcgaacacagcaaaagcctgggcgtctggaccaaggtgcttcagttcctggcggaaaacggcctgaccaaaagcgacctggtgctggccctgggcggcggagtcatcggggatgtggcgggctttgccgccggcacctatctgcgggaaattcccctcattcagctgcccaccaccctgctggccgccatcgacagctcggtgggcggcaaaaccggcatcgacctgccccagggcatgctctatgccgcggcgaaatgcgtcggcaagacagccctgatgattat

SEQ ID NO: 971 - DNA, 2878 bp, Unknown
  16S sequences of unknown bacteria
acctgcgcaagtcgatggtcgccgatccgctgcgccgcgagaacaccaaggacaacacgcccgcgctcatcaccttcgacgtcgtttctggcgactcgctcaagatcgtcctcgcccccaagggcgccggttccgagaacatgggcatgctcaagatgctcaagcccgccgacggcgtcgagggcgtgaaggacttcgtgctcgaggccgtgcgacacgccggccccaacccctgcccgcccatcgtcgtgggcgttggcatcggcggcaacttcgaccacgtggcaggtcttgccaaacgcgcgctcgtgcgcccgctgagccagccgaaccccgacccgttctacgcggcgctcgaaggcgagctcctcgacgccatcaacgcctttggcacgggacctgccggatttggcggcaagaccaccgcactcgccgtccacatcgagcagatgcccacgcacatcgcgtgtttgcccgtcgccgtcaacatcaactgccacgtcgcccggcacgaagaggtggtgctgtaatgtccgagacccgcaagctcgcagggacgatcgacgagaagaccgcgcaatcgctgcacgccggcgaccaggtgctttttaccggcaccgtgtacgtggcgcgcgatgctgcgcacaagcgcctaatcgacttgctcgacgccggcgaggagctgccgtttcccgttgagaacgccatcatctactacgccggccccgcgcccgcaaagcccggccaggtcatcgggccgtgcggcccgacgtccagctaccgcatggacccgtatgccccgcgcctgctcgacctgggcgtccgcgcgatgatcggcaagggggcgcgcagccaaagcgtcatcgacgccatcgtccgcaaccgctgcgtgtactttgccgccgtgggcggggccgccgcctacatcgccaagtcgattgcgtccgcgcagattgtcgcctacgaggacctggggaccgaggccatccgcaagctcgaggtcgtggacatgccgctcaccgtcgccatcgactgcgcgggcggcaacgtctacacgcagggccccgccgcctacctcgcctccgccgcccgctagacgcggtacgcccgcgccccgcacgcaccagccgaacagaagccgaaagaagcgcactccatggtcgttgatttcatctcgcttgccgtcatcgtcgttgtcgcggcgctctgccccatcatcgcgagcctcatccccaacaagctcatccccgaatcggtgttcctgctcatcgcaggcgccgtgttgggacccaacctgctcggcgtgatccagacgaccgacgtcgtcaacttcctctccgagctcgggctcgcgtacctgttcctgctcgccggcatggagatcaaccccaagaacctggtcggccacgagggcaagcgcggcatcggcgcctggggcatctcgctcgcgcttggctttgtcgtggtcttcctgctgccgtggttcgaccccgcccagctcgacggcatcgccgtcgccatcgccatgaccaccaccgcgttcggcacgctcgtgcccatcatgaaggaacgcgggctgacggggacccccgtcggcaactccatcatggcctacgggacctggggcgagctcgcgccgatcgtcgccatcgcgcttttgctctcgacgcgttcgagctggcagacgctgctcatcctgggggcgtttgccctcatcgccgtcgtcatggcgtttatccccaagaaggcaaaggccgccggcagcaagatcgcgcacttcgtgcagacgcgctccaacacgacgtaccagacgatggtgcgcttcacgatgctgatcctcgtcctgctcctcgccatctccgaaatcttccacctcgacatcgtcttgggcgcgtttgccgcgggctttgtcatgggcgccatcatccccgagggcgacgaagagctcgagaccaagctcaacggcgcggcatacggctttttcattccgctgttctttatcgtgagcggggcgaaggtcaatatccttgccatcggtgacaacccggtgctgctcgtcgtcttcatcatcgcgttgatgatggtgcgcggcatcccggtctttatcatgctgacgaccgacaagcgctgcgagctgtccgcgcacaaccgctggaccgtcgcgctgtactgtacgaccgctctgccgctcgtcgttgccatcacctcgattggcacgagcatgggcttcttctcgcaagacaccgcctcggtgctcgtcgccgccggcgcgatcacggtgttcctgatgccgtttctcgcatcgctcacctaccgcgtcgccgacgccatgcccggcgaggcgatcaaggaaatccgcgagaacccgagcgacatcggcaggatcatccgccgccatgccatgctcgagcagctcgtgaacctcgagatggccgtcgaccacctcgagcagcgcaagaagcagatcgccgagcagggcgagtcatgcgacatcagcgagtacaagaaggcctccaggcgccatgccatactcgcggacgcgctgaagagcactgccgcagagctcgcccagcacgaagagctgctcaacgacgcctcgctgcgcgaggccctgcaggagctgcgcagcctgcgccgcgaggagctgaggcgccgccgcatgcacatgtccgaggaagagatcgaggaaagccgcaaccaggtggtcgagaacctcgcgcgcatcgccatcatcgaatcgcgcaggctccgcgacgagacctcccacaagggagcctcgcacgacgggagcgctcccggcgtggctccgcgcgcctaacccccacgcccaggcagcggcagcttgaggcaagcgagccagagcaatacaaaaggggcc

SEQ ID NO: 972 - DNA, 1522 bp, Unknown
  16S sequences of unknown bacteria
tagtcagcaggcattgtgccttcgggactcagggcttctcccgtgccggattcgttaacgccgatccagttggttggaacccagtaggtgccctctgttgtggatctgcttccgccagtaaagttgcagtaaagattccggcccgagtagaggacggcaaagacctggccctcaaaggcggaaccgtccccggtcagggccatgggactgcgcagcgccagaatcgaccggggtacaggttctccgggcgcatattccagggccgccagcaccaggcaccgcaccggcagatcctcggtgccgtcgtagtcctccacacgcagcaggctgtaccgcaccgccgctccctccggggcttccaccggctctcccgcataggcgagcgcttcggcttcggtacagcccgccccggtcagacaggcgagcagttcttcataggtgtaattacttccggcagcgactgcctccacagcggaggccggatactgcaccgccggggcgggttctgcccaggcggcagagcccagtccggcggtcatcagggcagccagtaccagtcccaacatggtttttcgcatgaaaatcccctcctgatcggattctcctgcccggcaccggacagggcttggtatctctctgttaatcctatcatagcacatcgctttgccccaggcaaattccttctcctggcacaaaaaccatagggcaaatcagaaaaattttcccgggctgattgtgaattataccaaaattctacaggagaggcgaaaactgggtatacatgattgacaatggtacagaaggcttgttaaaattttgataagcccctgtcaggacgctgcacagggaaaaaccacagacactcccacagaaagagagagcgatggtatgaaacgaattgtatccgcactgattgtggcagcactgctcaccagtctggctggctgctccagttccgagaccctcaccggtacagccaagggctttggcggcaccgtgactgtcactgtgacccgggaaggggacaagatcaccgatgtaaaggtagatgcccccaatgagaccgccggcatcggcgataaggcagccgcagagcttccggcgaagattgtggaagccaactccaccgatgtggatgtaattgccggcgccactattaccagtgaagccattctgtacgccgtgaacaacgcgctggaccccgagacctatccctccaccgctgagaacggcgaagaagaggagaaggaacctcagcagattgccgcatcggatctctatatgggacagggtgtggtgaataccagccgcatcggccctggcagcgatgacaccggaaccccggtttacagcttcaaccaggtctatgccaatgcgctgtttgatgccgagggacgcattctcaccctgaatgtggaccagctggaagtatccacccccaactatgacggcgcatcgatgcctcatttcagcggcttcccgggacagggcggctacaatctggattccgaccacgatgcca

SEQ ID NO: 973 - DNA, 15030 bp, Unknown
  16S sequences of unknown bacteria
attgtcatcaacggctttagcaaggcttttgcgatgacgggatggcggctgggctatattttggcggatcggcgtctggtaaagcagatgctcaagatccatcaatatgtgatcatgtgtgcgtcctctatgagccagtacgctggcatagaggcgttgaaaaaaggtttatcggatgatttttcggcggtggaaaagatggtaagggaatacgaccgccgcagaaaatatgttttggcccgtttacgggcaatgggactgccctgctttgagccggagggcgcattctatgcgtttccggagattaagggaactggactgacaagcgaggaattttgtacccgcttgttgcgagaaaagagtgtagcgatggtgcctggccctgcatttggggaatcgggagagggctatgtgcgcttatcctatgccacagccatggatcagatcaagattgcgttggatcgcatggaggagtttgtccattcgatataattgtgaggggggatttgtatggcggagattaagctgatcgctacggatttggacggtacgtttctcaagggtgggcatacgccgcatccggagaacatcagggccgtacgggcctgccaggaagcggggattagagtatgcgcctgtacggggcgaaactgggcggaatgcagaaaaattgtggaagaggtcgggtttgacgacttttgtgcggtaaacaacggcgcggccatcgtggaggtaaaaacgggagagcttcgctatcgaaaccgatttgatccagaggccattgcaggtttagtggatgtgatgctgtcctacccgaatgtaaagtttgggcttacaggcctggagagtactggcgtgcttaggggccatatggaggattggtttgaaagcgagccaaaggagcttttggatgagctgtaccatctgacagaatatgataccaaagaagaattggtagaggcatgcaaagaggatgtggaacgcatcaactgccgtttgccgttcttagagcattttgagcagatccgcgatgccatgcgcaattatacggatttggaaattatgcagtctacggacggatatttggaaataggcgctaaggacggcacaaaagcggaggcgctgacagtgctgacggatatttacaatgtaaaaccggaaaacgtaatggccctaggcgataattacaacgatctttatatgctggcatgggctggcactggcgtagcaatgggcaatgcagaccagcgtttgaaggatttggcggactatgtgacggataccaatgtaaacgccggtgtggcgaaagcgatttatgagattgcgctacaaagagcatagagggaaggaaatggaaatcaagcttattgtaacggatctagacggcacgctgctgacgaaaaaggatgaagtgcaccctgacaatatccgagcgcttaggcgctgccaggaacgagggataaaggtatgccccgtgacggcaagaaactggaaggagattgcgcccgttttggagcaggtggcgtttgatgaggtcgcggcgctgaacaatggggcgtgcatggtcaatctggcaacgggcgcagtggagcatcagcttgtatttagcaaagagaatgtccagggtatggtggagacgatctgccggctgccgtatacgttcttatccttgatgggaaccgattatatgcacgtcttggaaacatcggggaaaatttcatggtttagcaactatgatgaccaggaacgcaaacagatggggattcgagcgttttccgatgccgggatgctggtgagagaaagcgtggacgtccaacggttgacttgcggcattcaaaaacaaggcgagacaagcgcaagaaaagcgctgcgcgatatgcaggctcagtatggatgtaggacgatgtttatggaagaggcggacggagattacatcgagatttccccggtacaggcaaacaaagcctttgctatgcagcagatttgctgccattttggcattgatgcgcagcatgttttggcatttggagacaatgaaaacgatatggatatgcttaggcatgcgggcgtgtccgttgccatgggcaatgcgaatagggaggtacagcaagtggctaccatggtgaccagcagcaataaagaaggcggcgtagccgcagctttacaatctttaatattttaagggatgcaccacaatgcgcgctagcgtattgtggtgttgttgtaacaaaagaaatggggtgctgagttttggcggagatcaaattgattgcaacggatctggatggaacgtttttgcagggaggggacagcccacatccggaaaatatacaagcggtgaaggaatgtcaaaaggctgggatcaaggtatgtgcctgtacagggcgtagctttaaccgcgctaaggatatcattgcgcaagcaggttttgatcagttttgtgttgtcaacaatggggcgtccatcgtggattggcgcacgggacagcatagatatcgcaaccgctttgagccggaaagtatcggaaagatcgtggatgtcatgatgagctaccatgcgtcctttggccttactggctttgaaacactgtatatgctggaggggtatgtagaggcatggtaccaggcactggatgaggatatgcgccggcaactaaacgggcatatctaccgcacaaaagaggagcttgtagaagcctgtgcagaggatgtagagcgtatgaatctaaatctgccttttttagaaacatatgccgatttgagcgaaaagctggcaggcgtagcagaggtagaaattacagcctctggcccgcattcgctggagattacgcatatggatggggataaatcccaaaccctgatggtgctggcggatatttacaatgtaaagccagaaaatgtaatggcctttggcgacagcttcaacgatatgtatatgctggcatgggctggcactggcgtggcaatgggcaatgcggacgaacgcttaaaggctgtggcggacaccgtcacggataccaacaaaaacgccggcgttgcgcaggcgatttataacattgccctgcatagagggtcagagaaataaagaagattttggcctacgggcacataggccaaatcgatatgaagggccctagcagctcataggtgtgtcgatgaacaacgcgcgagaaaagagaaggacagctggcatcatgccgagctctagggctttgagaaaataggtgctataacgggcacaagacgatgggggtaagagaaggacaatggcgcagattaagctgatagcaaccgatttggacggcacatttttacaggaaggggatacgccgcatccagagaacattcaggcagtaaagcgatgccacgaagctggaattaaggtctgtgcgtttactggcaggaactggtcttggacaaagcacatttatcagcaagcgggatttgatcgattttgtgtgctttgcaatgggtctgcgatctatgatgttgaaaatcaagaaatgcggtacagaaatcgatttgacccggcatccattgagaaaatcgtacaggttatacaccggtatccaaaggcggattattggtttacggggttttctcatatcagcatgctgaaaagccatggcgctccatggtatacctgcatggacgaggaagagcagaaaagaaaggatgttcagttttatcaagaagcagatgcgttgattcgtgcgaccaaggacgacatcatgcgtatcaactggcggctgccgtatgatgtctatgcagaacgtgttttggaggagatctcggagtttactgagatagaaattgtgccggcagaggagcatacgttggagattacgcataaggacagcaataaatcagaggggctgatggtgctatccgacatttatgagatcgacccggaaaacatcatggccatcggagatagctacaacgatgcaatgatgctggcatgggccggcacgggagtggcgatgggcaatgccgatgagcgcctaaaggccgtggcggattatgtaacggatgttaatacgcaggcaggtatggcaaaggctgtgtatcagattgcgttggggaacaatatgcggccataaagccgcttagggggaggcaagaatagatgtctaagatcaagatggtggtaacggacctggacggaacctacttttacaacggaatgccaatggaggaaaaccagcgcgcagtgcaaatggccagagagcagggagtcaaggtgtttgcctgtacgggtaggagctgggcgatgtgcagctataccatgcagcatatcggaatggacgactgggcggttacgggcaacggggcgtctgtgacacaagtcagtacgggaaagctgcatcatccctgttttgtggatcggcagcatgtagggcccattcttcgcttcattgcttcaagcgggaaatacaagctcaatacctattgcggcgatatgatgtacaccacaaaggagctgctgccttggtggctggaggattcggataaacaaaaccaaacgctgcccaaggagcagtggacgcgctttaccgtctgcgatagcctggaggaaatgatagaaaagagccaggatgtctgcgaactgattcgcctggaaacgggctatgaaagaacacccatgccgcaggagatccaggcatatatcgatacgctggatgagtttcaggtaaccactagctttgacgggcactgggacatcaaccataagcaggccaataaggtgcgcggggtacagtatctggcagaaaaattcggcattgcgatggatgaggtgctggccattggggatgacatcaacgatatacaaatgatacaggcagctggtatcggcgtggccatgggcaatgcccaggaatctgtgaagcaggccacagaataccacacagatctttgtaaggagcatggctttgccaaggcgctggaaaaatgggtactgaaataaaagggcagatcaaactcatcgtcacagatttagacggtacctttttggcggatcacgcggcgttgagcagagaaaacattcaggccgttcaggcagcccgggaaaaggggatcgtggtaagcgcctgtacgacgagaaattggtgtgcggcaaaagaaattgtacagacagcttgttttgacggcgtgacagcgtgctgcaatggaggctcatacatcaatacccaaagcggggcgatactgagtaggcattgtttgccggcaggggtggttcgtggattggtagaggaaagcttggcgcttggggcaaaggtggcgctgcatacctataggcagacctatgtaggggacggaagcatttctcccaagcacctattggaagaggaatttacggtaaagcgatgccgtgatgccgctgaaatgctgtcccatgcaggcgacgcggtggagatggtagaggttaccggtagagacggcagccaaatgccggaggtctggcgggaaaagattaggccatacggaaaggtgtatattgccaaccaaaaccggggtgtgtaccatattaccatgccgtgtgcgtctaaattgcaggccgcccaggctttggcaaggacgatggggcttaacgcgtcacaggtgatgtgtttgggcgatacctacaacgacagagagatgattcgctgggccggtataggcgttgcaatgggaaatgcagaaaaaggcgtaaaagcggatgctgactatgtggccaaggacaacaacgagcatggctttgcacaggcggtggggagatttgtactgtaaaagaagggaataccaatggcgatcaaattgatagtgacggatctggacggtacgtttttgtcagatttttatcaggtgagcgagaagaatatcaaggctgttagggcggctaaggaaaagggcgtaatgataagcgcctgtacgacgcgcaactgggcgatggcaaaaggcgtggtgcgctggggagagctcaacgggctggccgcctgctgtaacggcgcttcttttgtgcgggtagaggacggctttgtcatcaaccggcactgcctcccgaggagaagcttggaagggctggtgcgcatcagcttagaatacgaagccaaaattgcgctgtattctcatgagcagacattgatggagccaaccacctcgcccatgcactatttgatgatcagagaggattggcccaaccatatccctccgcttcgcattcccgtgaccaaatgcgataccatcgatgaaatggtgattttgggccgggaggatacgcagctattggaagtattcagcaaagatgggaaaccgctgcccgccgagtgggcggagcgtatccatgcacaggggaatttccatattgcagagcccaatcaaggctgttatcatgtatcgtttgcaggcgcttccaagcttaaggcggcccaagcgctggcaagacagctgaggttaaaaccggaggaggttatgtgccttggcgatgcatacagcgatagcgagatgatccaatgggccggcataggcgtggcgatgggcaatgccgaggaagggattaaaccgctggcggattttgtttctaagcgcaatgatgaaaacgggttcgcctatgcgctggaaaaatatgttttataaaaggaggatatagcgtgggcataaaactcattgtaacggatctggacggaacttttttagatacctaccataccctgaacgaagaaaatgtaaaagcggtacgcagagccagggagcaagggatctatgtggccgccgttacggcgcgcaactggagcgcttgtaaatgggcggttacggaaacggggtttgatccgctgtgcgttatcaataacggcgctgccatcgtagagggaagcaacgagaagctggcatttgaaaataccattcccgcaccggctgtgcgcgccattttacaagcggcggccgaggccgaagcctccattgatgtatttgccggcatgttttccttggaatatgagcccacccgcttatctaccaaagatatggtacaatggcgcacagaatgggagaaaaaaccagcgcattgccgtcctgtggtggaggtatatcaagacctggaaaagatgatacagcgcgccagcgacgtttcagaaaatattaccgtgcacggcaaggacctaaccgagctgcccggctggttttaccgcagggtcatcgagcagggagagttttatttgacgagcagccatacgggatgcattgatattatggcatatggctctaccaagcgcgaaggcgtagagcgcctggcaggcatgctgggggtaaagcaagaggaggtcgtggcctttggcgataatagcaacgatatcggcatgctcaaatgggccggtaccggtgtagcggttggcaatgcagcgccaagcgtccaggcggctgcggatatggtgacggcacgcaatgatgagggtggctttgcaaaggcgttggaaacactgattttttaaggagtgtagcaaatggcagagatcaagattgtaatgacggatatggacggcacatatatggaaaattctttccaggccaaccaacaaaacttagaggcaaccagaaagctggcagagcgcggtattcccgtatgcgctgtgacggctcgcaacctggggctggtgcggcgcatgctgcatttaggagaattagaaacctattgtgtaaataacaatggatgctcggtacacaatgtaaagacgggggaaagcctatggagcaaccgtattcccgacagttggctggtggctgcgcttaaagcatgcgacaggattaaggatacgggcattcaggttgaagtgcatacaggggaaatgtccatcgattacgggcctctaaagacgctgcctagccatgcggaccgtgaaaatgaacagacagagccacagtttcgctgccctacagtggtggcaaaggatattgacgatgtattgagaattgcggatggcaaagcggagctgattcgtgtgttcgattatagggaaaacggcgttttaccaggcacgttttatcgcgatcttatcatgggtggcgaatttatgctgacaagctcaaatcctgcggttttggaaatcatggcggcggggagcagcaaaaggaacggcgtggcgcagctggccaagatcttgggcattcgccaggaggaagtgatgtgttgtggagacggcgccaatgacattggcatgatcagctgggccggcgttggtgtggcgatggacaatgcatccgatgaggtaaaggctgcggcagattatgtatcctgtaacttcaagcagggcggcgtggccaaggccatagaaaaatatattttgaatcgataagaaaagggatttgcatatgcaagacaaagcagcattgatacgatgcgaaagctacgaccaacaagaagtggatcgggctgtggcgcaggcttttgccttggtaggcgggttgggccaatggataaaacccgggatgacggtggcgatcaaggccaatttgctgatgaaaaagaaaccggaagcatttacaaccacgcatccagccgttattgaagcggtggccaaacaggtccgggctctgggagcaacagcagtgataggggatagccccggcggcccgtttacccccgcgttggtacatggagtataccggacttgcgggatggagcaggcagcggaaaatgccggcgcagtgctgaatgaggactttgagcaggttaccgtctatgaggaaaaaagcgttgtgcttcgccagatgcagatttgccggtatttaacacaggcagatgcggtgatcgattgtgccaagctaaaaacgcatggccttacgcaatatacgggcgcggtgaagaacctttacggatgcgtgccgggcacggtcaaggtggaataccattttcggatgccggcactgaaggatttttcgcagatgctggtggatctatgcgagcatatccggccagtggtaagtttgattgatgccgtagaggccatggagggagacgggccgagcggcggtacaatgagaaaaatgaattgcttgatcgcctccccttcggcctatgcggcggatgtggtaggcactaggctgatggggcttaagcccgaaagcatctgcacagtacagcgtgccatagagcgtaggcttgtagacccagagcaggtgttggtgctgggagagcgaatagaggactatatagcaaatgattatcaggtgcccgtgatccaaggggagaaaacgctgccccgcatggcgcctacatgcgtaatggagctgcttgaaaaatggatgaagccaaagccggttttcctgcataaaaaatgtgtgggctgcggcgactgctttcgtagctgcccacctaaggcgatctcgatgaaggagggaaagccacaggcagatctagatgtatgcattcgctgtttttgctgccaggagctgtgtccggtgcaggcgattcgcatcaagagaaataaactattgaaatggattggttagatgatacacattgtattggtttcgcctgagatcccgcaaaatacgggcaacattgcacgaacatgcgcggctacgggctgtgcgctgcacctggtaaagccgttgggattttccatcgatgataagcatttaaaacgcgctggcctggattattgggataaggtgacggtgggcgtatatgagagctttgaggagttggaacgaaagtatcctggcgcgcatttttatcctgtagaaacggaaggaagcagattccataccgaagttacgtatccagaggatgttttttttgtgtttggaaaggagacaaaggggctaccgaaagcgattgtggaaaaatatgcagataccctgattcggctccccatgcgaaaggggctgaggagcctgaacctatccaacgcggcggctgtgatggtatatgaagcactgcggcagcgtggatttgaagggcttgtgtaggcgatggtaaaaaaacagcaaagagctgttttttttggaacgataatttacataatattaacattgtttttatacgaaatttacgatgaaacgatgaaagagagggaaaaatcaggtaaaatgaaatagaagtatgtctattttcttgtgggggagaacagcatgacgatttttgatctatttacgttgctaggcgggctaggcctgttcttgtatggcatggacatgatggggaaagggctggagtccgcagcgggcaatcgcctaaaaaccattctggaaaagttgacgagcaaccggttgatgggcgtattggtgggaacgctcgtaacctgtgtaattcaatcctcttcggcaacgacggtgatggttgttggctttgtcaacgcagggctgatgaacctatcccaggcatttggcgtgattttaggcgcaaacatcggtaccaccattacagcgcaaatcattgcctttgacctatcccaatgggcgccgttatttatcatcattggcgttgtgccattgctgttttccaaaaagcaatctattcaaagctattttaccattgtagccgggttcggtatcctatttttcgggatgaacaccatgagcacatccatggagccgcttcgcgatagccaatggtttctttcctttatcagtagctttgaaaatcccatcatgggggtactggttggcgttatctttacggcgattatacagtcttcttctgcatccattggtattttgcaggcattggcagccagcggcgtcattggcgtgagcgcagggcacagcgcagggctttacctggttttgggggccaatatcggcacctgcatcacggcggtattggccagcaccaacggcaataccatggccaaacgtgcggctgtgatccatgtaatggccaacatcattgggaccatttggtttgggttgctgattgcttttgtacccattcctgagatcgttgcaagctggtcgccgaacgacccggcgcgtatcattgcgaacttccatactattttcaatgtggttaacacgattttgctgttgccgtttggtggtttggtcatcaagtttatccataagatcatcaaacagaacaaaaacagtgacgaggatgataataggcttttgtatttggacgataggatcgtggatacgccgaccatggcttccatttccattcatcaggaattgggacatttggcggataagacgtaccgcaatctggaacgtgcgctggaatccttctccaagcaaagcgaggatatggcggaaaaggtattcagcgaggaaaaaagcatcaattatatcgcttcggaaattgtaagatttttagtaaagctacaagctatgacagagatatcggatacagagcggttggagatcttccgggtgcatgaggtggtcagcaatatcgagcgtatcggcgaccatgcggagaacattgcggagtacacgttggactgcaagatgaatgactccaaattctccaaggatgctttggatgatttgtgggatattgcagaacatgccaagcaggcatactctgcagccatcaaggtgatcaagggagaggggcatgaggaagaagaacgacgcctttgctgggaaaatgaggacatggtggataagctgcgtgatgaaatgaaagaaaagcatatccgcagactggcaaaaggagagtgcgatccccgctctggtatgatctatgcggacatggtagtagacttagagcgtatagcggatcatgcgaccaacctggtaggcgatatatcgggcgaaccaaaaatgatagcaaattaaaaagagcgcttacagcgctctttttttattacccggtatacgagacatcataggcattgttttgagagaaggttaaggtgatggtgccctctacatccgtgcggtatagtttggagccattttctaaaatatgctcaaaggctttttcttgcttcttttgctttttatcgctgtacccctctgcgtcatccttactgacaacgctgacggtgggctgaacagcctgaaggaattcctgagtagcagcatcgatgccgtgatggcctacctttaaaaatgtggaacgcaatccatctccatatgtttgcagcaaggtttcttccgcggccttttctgcatcccccatgaagagaagctttgtctgtccgaaggtcatttgcaagacaatgctggtattgttgatctcttcatcgtttacatcatagggagacaatgcattgatggcaacaggcccaaaggaaaaagaactgccctgcgttagatattgcggtgtaagccctttatcagcaatggtagcctgtactgtgcgatacaggtctgtatcattgctacgcgtggtggtgtagactgagcctaccggataggtatttaaaacccaggctgcacctccaatatggtctttatgtggatgggtcaacaccaatatatcaatgtgatccattccattgttttgcatggcggtttcgatggcgttttgagcatgataggaaccattgccggtatctatcatcatggtttcgccgctgggcgactgtaaaaggatacagtctccatgctttacgtctacaaccgttactggtaggctttggtcttcaggaagagaggagcaggcattgagtatcaatgccaaagcgaaaaaaagtacaaggcataattttttaaaacgcgacatgaagatcctcctttggtgctattgtactggaagaaaagcagaaaagcaaaaaactagttgccagaacgaaaagaagtcggtatcatgaaagaaaacaacatcagcaggtatgctgagaaaaaggagaatgcgctcatggaaacagtggtattgaaagtcagcggcatggagacggaaaaggatcccaaaaaggtgcgccgtgcggccaagcagtttgaaggggtatccaaggtaaccgttaaccaggaaacgggcgaggttgaggtaggctttgagccgccggctacgctaaacgtaattaagcttgccatcgaagaggaaggctttacggttagcgaataagcgaatcgattcataaaaaaaagagccaagcggctctttttttattcggtaggataaggctgggtatattccatgatccaatccggatgcccaggttcggtgaagcctaattttttgtagaagctttgagcgtcgaccgtcataagcagccaacgatgctgttcggccagatccggacagtgcatgatctgatcgatcatccattggccaatgcccatgccgcgcaggctatcctccaccaccacatcctcaatataggcgcaagttacaaagtctgtgacgacgcgggcacagcctaccaatgcgccgtcttttaaaagaacgaaagaataagagttttcaaacgcctttttggtggtgcgacgtactcgggacgggccccaatattgcttttcaatgagatcacaaacatcctcaagatttacctttgaaggatcgttggtcagcaggaccccgtttttttctgcttcaaagactgccatgaatttccctccttggctatgctaaaaatcgagaccattttatagcgttttgtccaaataggcaactaggatttgccaggaaaacagaggcacagtataatgaaaccattaggcgaggaggaatggaaatgcgaatcacggtagggatgtccggcggcgtggattcatcggtggctgcttggctgctgaaacaagaggggcacgaagtgacgggcatctatatggtgaattgggaagaagaggacgaatcgggcgtttgtacagctgttgatgattatgacgatgtgagacgctgctgtgatgtgatcgatatcccgtattatacagtaaatttctccaaacaatatagagaacgtgttttttctgtatttttagaagaatataaagcgggcagaacgccgaacccggatgtgctctgcaacagcgagataaagtttaacgcctttttggattttgcgatcaaaaccgatgcggaggcactggcgactgggcattactgccaactggcgcatacggatgatggtgtgaagttgatgagaggggccgatgagaacaaagatcagacatactttttatgtggattgacacaagcacaacttgaacgagcgatgtttccgattggagctttgcaaaaacctagggttcgtgaattggcgcaaaaggcagggctgccaacagctagcaaaaaggactctacaggcatatgctttattggggaaaggaatttttcccgatttattgggcaatatatcaaaaagagcgttggcaacatggtagatattgacagtggtaaggtgatggctcagcatgaaggattgtttcactatacgataggacaacgcaaggggatcggtattggaggaagtggaagcggggagccttggtttgtggccaaaaaagatccagccacaggcactctgtatatctgtcaggggaaaaatcatccggcgttgttcagcagagggcttacagcagataaaatgaattggattgcaggagatgcaccatccaacagttttgactgcacgatcaagtttcgttatagacaaaaggatgttccttgccgtgtcgaagtaaagggaaggcgtatttacgtacgatttgaaagcccgcaaagagctgtaacaccaggacaatacgccgtgctataccagggcgaagaatgcctcggtgggggaattatagaacaggagataaaatagcattttcccccttgcatacaactctaaaggatgctataataagtttccaccaagacgaagcaaacatggtaaaaaacttttttaaaaattgtgaaaaaaagtgttgacaatgctggctggtcttggtaatatagacaagcgccgtgaggaacggggtaaccgggaagcgcggcggagcacctagaaaactacatagtgaatgagaagaaaagagcgaaaagcctagcgaaagtaaaggaagagccaaggaagaaacaaagttaaagaccagagggatctggtaagaatttttaacaagagtttgatcctggctcaggacgaacgctggcggcgtgcctaacacatgcaag

SEQ ID NO: 974 - DNA, 10331 bp, Unknown
  16S sequences of unknown bacteria
cctgccggtcgcgcggggtaggcgacttattaattacgacaagatactttccattaaagtaatcaatcagcccggcggccggatagaccgccagtgaagtgcctccgataatcagcacctcggcctcccggatcgcacggatcgaagcatcgatcgtcgcggtatcgagtccctcctcatagagcaccacgtccggcttgatcacacctccgcaggtgcagcgaggcacaggctcccggctattaagcatatactccgcatcataaaactttgcacagcgcatacagtaatttcgatgtatgcttccgtgcagctcaagcacatgcttacttcccgccttctgatgcagcccgtcgatattctgtgtcacgatcgctttcagctttcctttttcctccagctcagctagcttgtaatgtgccgcattgggcttcgcatccagaatgagcattttgtcccggtagaaccggtaaaattcctccggatgcctcttaaaaaacgtatggctcagaatcgtctccggaggatagtcatacttcatatgatacagcccgtccacgcttctgaaatccgggataccgctctccgtcgacacgcccgcaccgccgaaaaacaccagattgttacattcgtctacaatctcctgcagctgcttttttccctcttccatcccgcacgtcctctcccggccttacctggccgcgtaaatctgagccagcttgcccatgaccacgaaccgcgtcgaatcatcaccggtacatgtcgataatgtcacgatccggtcctcctttgtcactgtcacatcctggttgtccactacagaattcgaataagcccggctgataaactggtcgaactcatcatctgtaaaagaaatctgataggtcagcccggtcttatctaccaccgatgcggaaaaaatccgatactgataaataaagtccggcgtaaagatccagaaataacggctcttcttaaatacctccggatcgttaaaattcttgagcttgccaaacatcgaaccattcttcatgttatggccgtagatgatcgtattctgatccgtgaaatcacccatgttgtagctgttcacaaacaggcagccagcaaaattgtcggtcttctcaaaagtccgatgcagataatagtcgttgtctttgccctgtacgaccggatatgagatatccagtgcccggatccgcagccagccgacgatatcactgttcaccgagagcagctgagtaaaatctatcgggttcttcagcaccggaagcgtcttttcctctccgtcttcgaacaccgtacgcacttcctggccggatatgctctgcaaagcatcgtcatcttccagattgtcgatattttcactctcctgttcctgatctgcagcatagctgttctctagattgtcatactcatccgaactctttttatattctttataaaatccatataaggtatagcctgaataaagaaatacggccagtgccgccagcatcacaatcagccggatcacatcaccgagcgttttggttcgtttccttcgtctgctcattctactgcctccctcctgcctcgtctttatggcttatttcctgtatgcagccattttctttctgcgagccgctttctttttttcttctgcatccggcagggtcacgataaaccttgtattgtggatatcgcttgtcgccgtgatcgtccctccgtgcagctctacgatctgctttgcgatcgcaagtcccagtccggctcctccggtccggcttgaccgtgcctcgtcgacacggtaaaaccgttcaaagatcgtctcgagctttttctgaggaatctgctccccctcattggtaaagacaatcgtcgtccggccccttccgccgcgcgcctgaataagaatctgcgtattttcccgcccgtaggccgccgcattgcgcagcagattatcaaagacacgcgccagcttatccggatcgccctggatcatcaggtcttcctcggcatcgaccgcgcaggtcatcccttttgcgttcagcatcccgtagctctcatctgcaatctgctccaggaaaagagaaagattcatctcctgcgtctcaagcacaaaatcctgcagattgaaccgtgtgatatcaaaaaattccagcagcagctcttctaagcgcaacgctttttccatcgtgatatgtgtatattttatgcgctcttcttccggcatttccggctgcgtatcaagcatgctcagatatgcgagcaccgaggtcagaggtgtcttcaggtcgtgtgccagataagccacgagctcattttttttcttttcgctcagtgccgcctcctgctcccgtctgacgagctcctccttcagatgagtcaggtcgtcctcgagcagctgcagctcatccggaagcataaccggctgctccgcaccacggatcacagccttcagcgccatgctcaccgcattcagatcacagatctgccggaacacgaaaaaaacaagagaaaaaaacagcactgctgccagtaatcccagcaccagtgccggtctgttttccagcaaactgctctgatccgcaaagaaggtgagcaccccatagcagaccgtaataaagaggagtgcaaaaagaagtgtctttcccaatatggcaaatgccattttctgatacttatttttcaaccttgtatcctactccccatactgttttaataaaatcgctcttgcgccggttatcgcccattttctcccgcagatgccggatgtgtaccataaccgtattgttactgttcttgaaatatttttccttccatatctgctcaaacagctgctctgaactgatgacctttccccggttctcacacagaagccacagaatgtcgaattcaatcggcgtcagcataagctcccgctcattgtaaatgcactcgtgcgtatcacggttcatcacaagtcctgcaaagtcaattatattttctgaagcagccttctcgcctccattgtatttcatatagcggcgcagctgcgctttgactctggctacgagctccagcggattgaacggcttcgcgatataatcatccgcaccgagcgtcagacccgtgattttgtcgccatcctccgtcttggctgtcagcatgatgaccgggaagcgatacttctcccggatcttctgcaggacgcggaagccttcaatgtccggcagcattacatctaagagtgccagctttggcggattctcctccacctttttcagggcttccagcccggtatgggccacctctacctcatagccctcattgcggaggtacagtgcaatgacctccgcaatctctttttcatcatctaataccagtattttttcgctcatatatccttccaggcaagtaatcagatcagagtaccgactgtacgcggatacggaagcacatcacgaatgttggacatgccggtcagatacatgacgcagcgctcaaaaccaagtccgaatcccgcatgcctcgtcgatccgtattttctcagatccatgtaatacttgtaatcgtctgcccgcatgccaagctctttaatgcggttctccagcttttcaaaatcgtcctctctctggctgcctccgatgatctcaccaataccaggtacgagacagtccatagcagctacggtcttgccgtcctcattcatcttcatgtagaacgccttgatctccttcggataatcggtgacgaaaagcggacgcttgtagatctgctccgtcaggtaacgctcatgctcggtctgcaggtcacagccccaggataccttatattcaaatttatcattgtgcttctcaaggatctcgatcgcctcggtgtaggtcacatggccaaactcggagttgagcacgtggttcagacggtcgatcagtcccttatccacgaaggaattgaagaagttcatctcctccggagcatgctcaagcacataacggatcagatatttgatcatatcctctgccagacgcatgtcatcattcaggtctgcaaaggaaatctccggctcgatcatccaaaactctgctgcgtgacgcgccgtattggaattctcggcgcggaaggtcggtccaaatgtatagacgttgcggaatgcctgtgcaaatgtctcgacatccaactgaccgctgaccgtcagatttgtcatcttcccaaagaaatcctgtgagtaatcgacattgccctgatcatccttcgggagattgttcagatccatcgtcgtcacctggaacatctcacctgcaccctcgcagtcgcttccggtaatgatcggcgtatgcacatagacgaagcctctctcctggaagaactgatgaatggcataagcgatcagagaacgcacacggaatacagcctgaaacgtattggtacgcggacgcagatgcggcacggtacgcagatattccagagaatggcgcttcttctgcatcgggtaatccggagtggatgctccctcaagctccacacctgcagcctgaatctcaaacggctgcttcgcatccggtgtcgctacgagtgtgccttttacgatcacagctgccccgacgttgatcttgcagatctctgcaaagttttccagctgatccgaatatacgacctgaagggtctcaaaaaacgtaccgtcatgcagtacaataaaaccaaatgccttagagtcacgattgctgcgaacccagccgccgaccgtgatttcttttccgatataggcatcagtgttgtggtagagctcttttactgttgtgaattccattgtttttgttctccttaaatttgtctaatgcggacgtttcgtgcgcaggccgcagacccgcccgcgttgcgagctatccgctgcttatgcatctgcacgaaactgttttccacattataccttcttttttactttcctgcaaggtcgagatttccgcaggcagatccgggtgcatatctggtcatggatatacgccatacctgttcctggctactccacgctctttaaggattctaccatatcgatcttcttcagcttatagtacatcaccagattgacgatgatcgagaacgcaaaggtaaacagggttccgatgacatagcttagcagcttgatgttccgtccgaacatgcaagcatccacttctaccgtctgaatgatgaagagatgcaggaatttaccgatgaagaggccgactgccgccccgataatcgtcagcaggatattttcgcgatagacataggctgccacctcgccgtcataaaatccaagcaccttgattgtcgcgagctcacgcttgcgctcgttgatgttgatgttgttcaggttgtaaagaacgacaaaggcgagcatacctgccgatataatgagtacgataatgacaatatccaacgcaccgagcatatggtcaagctgaccctttagggactttgtataggtcacgttcagaaccacatcacaggcaagcagctgttcaccgagtgcttctgcttcggagagtccgtcgactgtacggtaaaatatgctgttgaattccggagcagctttgtatgcccgctcatagcatgccggagtcagataaatatagtggttcagatagttttcgcaaatcgccgtgaccagtacttcagcctcaccaccttcatcatcctttaaggtaatcgtatctccgataccgaccttcagcgcctttgcaatcttttccgtgacaatcgcaccttcatcggtcagctgatactcttccttcgtcgtccggtcacggaagcagaagaaatcttccagctgttccatattctccggcacgtatagataaaccgtccactcttttttactgcctgcagcctgcacctttttcttttcgactgcgaaccgcttacttgccgacacctgatccgactgtctcaggagccgcaccgctttctccttttcagaagtgcctgcatccgcatctagcaccgtcatcgcgtcatagagctgcagttcgtcaaactgcagaattgccacatccataatcgaatcccgcaaaccgaagccgacgagcagcagtcccatacagccgccgatgccgatgatcgtcatcagaaaacgctttttatagcgcatgaggttgcgcacggtcgatttccatgtaaagctcagatgcttccacaaaaacggtacgtattccagcagtacccgtttcccctgcttcggcgcaggcggacgcatcagctctgccggaactgcatgcagctcccggaagcaggcaaaaaatgtcgccgccatcgtgcataccagagcagctgcggtcgctgccgccccgaagccccagtcatacgggagcaggattttcggaagatactgatacattatgctataaccatttatgataaccaacgggaatatcttttccccgacgagcacaccgaatatactgccgcccatcgtcgcgtaaaacgcatacttcagatatttggaagcgatgtccttcttcccgtagccaagcgccttcatcgtaccgatctgtgtccgctcctcctcgaccatccgtgtcatcgttgtcaggctgatcagtgccgccacaaggaaaaagacaagcggaaacacctgtgcgatatttgtcatacgctctgcattttctccatatcccgtattatccgggagctcgttgcggtcatacacataccacttcggctccttcagatccgtaagctgccgcttcgcatccgcgatcttctcttccgcatctgcgagctgctgcttcgcatccgcaatcttctgctcgccatctgcgatcttatccgcagcctcctgctttccgtcctcataatccttccagccgtcggcgatcttttgctcattctcggcaagctccttctccccgtccgcgatctgctgccgtccgtcggccagcttctggcgtgcctctgacagctggctctttgcatcattcagctgctgctcaccgttcgaaagctttgcacgggaagcgttcagctctgcccagccaaggtccagcttccggcgtgccgtgctcagctgacttttcgcatcggtcagttcttttttccctgcatcgacctgcttctgtgcctcttgcagctcctgctccttttcttcaagctgctgcctggccgccgcaagctgctcctgcccctgctgcagctgctgctgtcctgctgcaagctcggcaagccccgcatccagctgcgtttttgctgcagccagctctgcttccttttccgagagctgactgtccgtctctgcaagctgggctgtggcagcatccagctgtgttttccagcccttcagctggacatcgcccgcatccagctggtctttcgttccgtccagagccgcctgctgtgcatctagctctgttttcgtcgcatccagctttgccttctgttctgcaagcgcctgcgccgtctgcgaaatttctgcttcctttgcagcaatttcatccggaagttgtgtctcttcctgctgcaaacctggaagctttccatctgcatcctgaatctttgcttcttcaccggcaatatttgcattgcatgtatcaatatccgcctgtgcagcttccactgaagcagaagcattttccatctctgctttacactgtgccgccatctcatttgctttggcccgctcttcttccgatgcccccggatcctgcgacagccgttctgcctccgcctgtgccttattatatgcaacggtcttctctgccagtatctgctgtttttctccaagtgtctgctgcaaagccaaaagcgtctgctggtatgcactcttcgcatttgccgcttctgccttctgtgccgtcaacgcggtaatctgctgctgcacctccgacagacgggcctttttcccatccagctccgtctgtgctgcgtcacaggctgattttgctgcctcataggtattcagtgactcctgatatgcgctctgtgcctgtgcaagctgtgcagatgctgtattgtactgtgtccttccgctctcacaggcagcctgctgcttctcatactctgcattctgccccaaaagcgccgttctggcctcctcatactgcttccgcgcctgcgaaatctgtgccatccctgcatcatattgctcctgtgatgcctgcagctgcccggaggcctgctccaaggcggccgcgctctccgcaagacgcgcactctgttcctctatctgctgctttccgctctcaagctgcgccgctccatcatcgagctgcttctgcgcctccgataattgctgatttgcttcactttccttactctggtactgtgtaaggccgaaccgatattctttttctccgtcattcagctttgcgactgctgctgcaatctggcttctggcatccgcaagctttgcctcattctctgtgatctgctgctcgccatctgcgatctcctgctccccatcactaagctcacgcctggaatccgcaagcttctgcctgccatctgcaagctcagactcaccatttgtcagctcggactctgcctctgcgagttccgattccgcttccgctttcccatccgcaagctcctgctccgcatcggcgacttcctgctttccgtcctcgacttccttttcggcatcgtcaatcttctgctgtgcttcgccctttacctccgcataacgcagttcacaccggacatcctgaatcgcctccacgcgttcctgcacttcctcgattttcgcatcataggcatccgtataggcgacttcctcttctgctccttttacgcgcagatatgcggtatgataaacttcggaatgaaacgcttccggcaaaagataagcaaagccggacacggaaccattgccaagcgtcgtgcttccacgctcaaatgcaatgtagcacgggctgtaaccgatcccgcacacagtgaatttgcggtaatgcagcgccgtatcctcttccgaagaaactgtgactgccagcgtatcaccgacggaatatccctgccgttcggcaaatgtggcatccaacagacattctgtcggctcgtccggcaaacgcccctcctttacggagagctcattcaccccatccggaatcgactccaaatgcagtacctgctgcacatcgccgctgccacaatacacatcctccatgtagcttccgaccgcaagcgctaccccctcaacctccgagagcgcttcgatatcggcatctgtcagcccgagtgttccgagcaccttgatatccatgagcttattctggtcgtaataatagtctccagtcgcgcgcatatccggcgcagccgcctgaatcccggcaaaaaatgccacgcccatcgccacaataaaaaagatggagaggaagcggttcaggctcttccgtatttcggtatgaaattctttccgtaatgcttttttcctcaatgtcctgctccttaccactcaatttcctgtaccggcattggctgtgcattcagtgacatctcagagaccctcccgtttttgatccggatgacccgatctgccatcggcgtgattgccgtattatgtgtgatgacaatgaccgtcatgcctttctgccggcacatatcctgcaaaagcttcaggattgccttaccagtctgatagtcaagcgctccggtcggttcatcacaaagcagaagttttggatttttcgccagcgcccgtgcgatcgaaactcgctgctgttccccgccggagagctgtgctggaaagttccccatgcgttctcccagaccgacctcctgcagcacccgttttgcattcagcggatttttacagatctgagatgccagctccacgttttccagtgccgtcaggttcggaatcagattataaaactgaaacacaaacccaatgtcgtccctgcggtagccggtcagcttccgcgggctgtattttgcaatgtcttttccgtctacaagcacccgtcccgtgctcgccgtatccataccgcccaaaatgttgagcaccgtcgtctttcccgcgccactcggcccgacgatgacgacaaactcgcctttttgtacttcaaaatcaatgccgtccaccgcatggatgtcaacctcccccacatggtagacctttgttacctgttccagctttacgtatgcttcctgcatattgtcccccgtactcatttttattctcttatatattctattgtagctttccttctccccctgcgcaatgactttataaaaatttaagtcctttcacctttaccggacatcattttccagtccaacccactgcttattgctttgcgcaattgaagcagggtacttgcttgattcgggtcaaagcggatattcgcaatccgcttcgctacttgctcatgaacgcagtcgcttcgcgatctgtc

SEQ ID NO: 975 - DNA, 13891 bp, Unknown
  16S sequences of unknown bacteria
caaataaccaagaagcagggcattgggtctcatctcccattgtcctgcttctttttcattccaaattatattcacatcatttacccatacatccaattcaccctcaaaaatacccccggaatcgctctctggttgtcctattttttaaccactaaggccgttttttgaccccatttttgccggttgtcctatatttaaccactaaaaattgggtgaaaacggctctcgtttggtcaaatcaagtcaaactatatcagcccgtttaggtataagaaaaccccggaaaaccttgattttccggggtttttgaaccattttgatatagtctgagcagtcgattatctcttgctgaactgcggagcgcgacgagctgctttgagaccgtactttttacgctctttcattctcggatcacgagtcaggaatcctgcttttttcaggatcggtctgtactccggatctgcctgcagaagtgcacgtgcgataccgtgtctaactgctcctgcctgtccggtgtatccgccaccacgaacgtttacaagaacatcaaatttatctgcattctcagtagcaacgagcggctgacgaacgataaccttcagggtctcaagtccgaaatactcatcgatacttctcttattaacagtgatattaccagttcccggtactaaatatactctggcgatggatttttttcttctgccagttccgtagaattttgctttagccatgatatttacctccttatcctacttaaaatgtcagtgcttccggctgctgtgctgcatgcggatgctctgcgcctgcgtaaacatgaagtttggtgaacatttctcttccgagcggtcctttcgggagcattcccttaactgccagctctacaaccttctccggtttctttgcaagcatctctcttaaagtagtctctttcataccacctacgtagtctgaatgatgatagtaaatcttctggtctaatttctttccggtaactttgatcttgtcagcgttaacaacgatcacataatctcctgtatctacgtgcggagtgaaaaccggtttgttctttcctctaagcacctttgcaacttcagatgccagacgacctaatgtatatcctgtagcgtcaactacgtaccattttctttccacttttgctggattagccatgaaactgttcattggtatacctcctgtaaaaattcaattaaatattcttgatttatacgtaaaaacatcttaccggggctttggatcagacattttctcgctttgtcacagttaaatattatatgtcagctggtcacacatgtcaactgttttttccaattttactgataatatttttattaatgtggatcatgcagatcaccgtcatagtcagagacataagctctgcaatagggatcgcccaccagaccagctccactctgccaagtctggacaatgcatatgcaaccggcagaagcactaccagctgacgtgccactgacacatacatactgtaaatagattttcccagtgcctggaatacacttccggctgcgatacagaatcctgccagcaggaagcttaaggagatcgtccgaagagcaggaactccaattgccagcatagtctccgatgcactgaacatcatgagcagtttatcaggcatcgtctggaaaatcaccagacctaaaatcatgatcaccactgcataagtgatcacatgacggatcgcactgagcacgcggtctctcttctgcgcaccataattatacgcaacaatcggtatcacgccattattcagtccgaagactggcatgaagataaaactctgcaatttaaagtagatgccgaataccgctgtcgcagttgcagagaatgagatcaggatcagattcatgccataggtcatcacagaactgatggcctgcataacgatagaaggaataccgatctcatagatctgtgcaatcacttccacggaaggacggaatcctttcatattgatcttcacttcatgatttttcttctgatttaaaataattgccgcaacagcagcaactatctgtcctgtcaccgttgccacagcagcgcctgccacttccattctcgggaagccgaacagaccaaagatcagaatcggatccagaataatgttgataatggctccggttccctgggtgatcatggtataaaaagttttccccgttgcctgcagcatccgttcaaacatgatctgaacaaaaataccaaaagacgtacaacagcagatcgtcagatactgctttccatactgcacgatctcttcaatatctgtctggcttctgaaaaacggctctgacagcaacaatccgatcagcaaaaacacgagataactcatgactgccagaaatactgcattttcagcaatcttatttacacgatccatatcttttgcaccaagtgaccgggccagcagtgcgttcacacctaccgctgtaccaactcctacggcaatcatcagactctggataggaaatgccatggatacggctgtcagtgcattttcactgactcttgcaacaaaaatactgtctaccacattataaagcgcctgcaccagcatggagatcatgatcggcagcgacatggtaatgatcagtttacccatgggcataatacccattttattttctttcataactgctttttccattgttgttatcctttctcccctttgaaatgaatctccatcaatgtcagtcctctggccggtgcggtgggacctgccagctggcggtcacagcctgccagaatctccggtatacgctccggctcccagtctccctgtccaatcttcatcagcgtaccggcaatgatccgtaccatattatagagaaatccatttcctgtaatgcggaggatgatcaggtctccctgcttctccacatccagcgcatagattgttcgtactgtcgtcttcacctgggcgcccgccgcacagaagctctgaaaatcgtgttccccgatcagataggcagccgcctgtctcatccgctccacatcaagctttcgatatgtaaaatgcgaattgaaccgataagccggcagcggaaattcccggttcaggatccggtactcataggttttcaccgtcttctgaaatctggggtgaaaatctgccggaacttcacaggaatcctggatcctgatatcttccggcagtctttgatttaatgcatatgaaaatttatctgcggccatcctcgcttcggtgtcaaagaccgccacatttccgcaggcatgaacacctgcatctgtccgactggagcccatcacatggatctcctctcctgtcagttctccaatggcccggttcagaacggattcaatggtctccccatttttctgaacctgccagccacagtaattggtgccatcataggcaaccacaagttttacccttttcatgcaattcctttcttaaaacggaataacagtgccactgagcagacgtccaaacacgatcatcagtaccagatacccccatacaaccgcatatgctatatggtctctactttcataatgaagcggcttcatcttggtacgtccgtcacctccacggtaacagcgggcctccatggccatggccagatcgttggctctgcggaatgcagagatgaacagcggaaccagcagcggaatcatggcttttgccctctgaataatatttccagattcaaagtctgcacctctggcaatctgcgccttcatgatcttatccgtctcttccagcaggattggaataaaccgaagcgcaatggacatcatcatggatatctcatgcaccggtacatgtaccgctttcaacggattcagcagacgttccataccatctgtcaggtcattgggcgttgtggtcagcgtcataagtgaagagccgatgatcaggtagatcagacgaacacccataagaattgctgtacgcagacctttatctgtaatttttaaaaatccaaaatgccacagcactacatctccatcaatcagaaaaagattaaatactactgtgatcatcagaagcatcacaattgctttcaatcctttggtaataaacttaaatggaaccttggatgtgcgaatgacaaatgcaagaaaaatcgttgcgatcacataccccaaaattccctttgccacaaacaaagaaataatatacaacatggttgccaccagcttcactctcggatccagctgatggatcaccgattttgcgggataatattgtcccagcgtaatatctcgaatcatggtaaatctcctacttggatgctttcagccaggcttctatggcatctgctgcctcttccaccgttgtcgcatcggtatttacatctgcaccttgttttttcaattcctgcatcaggtaagtcgtctgtggtgctgccagcccgatctcttccagttctttataatgatggaacacctccacaggtcttccgtcaaaccgcacttcaccctgattcataacgatcaaacggtccacatattttgccacatcttccatactgtgggacaccaggatgactgtgatccctctggatctctgaagtgcactgacctggtcgagcacctcgtcacgacctcttggatccagtccggctgtaggctcatcgagaatcaacacctccgggtccatagccagcacaccagcaatagctacacgacgcttctgtccgccggacagctcaaaaggagaactcttgtcatactcttctcccattccgaccatccgaagggctgcttttgccttctcttctgcttcttctttcgtaaagcctaaattcttcggtccaaagcacacatctgccagcacttctgtctcgaacagctggtgctccggatactggaagaccagccctaccttgctgcgcagcttcttcatggaaaattcttcatcataaatatcttcgccattataataaatgtgtccactagttgccttcaccaatccgttcagatgctgggtcaatgtggattttccagaacctgtatgcccgatcaatcccacaaactgtccatccggaatctccagattcacatttttcaaggcatgcatctcataagaagtcccctgcgaatacagataatttacatttttgatttcaatcgacataattcatccaccagttcttcattgttcaatattccatctggaagcggaattcctctctgctgcagttcgtgagccaccagagttgcctgcggcacatccagcctcaattcctttaacttctccactttggaaaatacttccttcggagttccttccataaccagttttccatcatccatgacaaagatccggtctgcctcgatcacttcttccatataatgagtgatcaggatcaccgtgatcccttcttctttattaagcttctttgccgtctcaatgacgctttttcgtccatgaggatccagcatggccgtcggctcatccatgacgatgcatttcggatgcatagccatcacacctgcaatggctactcgctgcttctgtccaccggataatttgttgggcgagtgatgacgatatttgagcatacctactgcatccaggctttcttccacacgggtccagatctcatctgttggcactcccagattctccggtccgaatcccacatcttcctccacaatcgttccaatgatctggttatccggattctgaaataccattccggcattctggcggatatcccacagatgttcctcatccttggtatccatgccattgacccacagagttccatctgtaggtgtcagaagtgcgttgatatgctttgcaaacgtggattttccagaaccgttatgtcccagaaccgcaataaaacttcctgactcaatcttcaggctcagatgatccaccgctgttaattttgattctatatttccttcttcgtccagtcgatcatattcgaaagtgacgttttctgcttttatcatggggctgcctcctgcatttctcatgattcattatctttacatgggccaaaagacccacactaacgtgcccattataccatgaacggctgaaatttcaagaaaattcagccgcttccagatattagtttttatttttcatattcaggttaacattttatgccaatgtaccaaggatgtttctgtatcttctgctgtctctgctccatgaatctgttcctgtccatatggcccaaatccaagtttctgtgccacatggagggatgtatcattcgtcctctcaatcagcacatgaagctcttccagatccagcacttcttctgcgtaagcgaggatcgctcttccacactcctgtgcatagccctttccacgatatgactgcccaatcagataaccaagctccactgcatcgtctaacagttctgacacaaacagtcctgcctgtccgatgatctgtccactctgtttttctatcactgtccacagtccaaaatcatagaacagataggcatgacggatataggcttccataaattctgtctcttcatccagtgtgttcagcaccggaactgttcccctcatcatgccgccttgcttccagatctcatataggtccggaatatctgacgaaatggtctccctgatcagcagcctctctgtctttgcaatctttaccggaatgccagatttgcgaagccggtcacgctccagaaatgccgggtctagtgcactttccatcagcagatccaccgccgcacaggtaaataccttcacaccattgaccagtgctttttcatcaaaatcaaaccggtcattatgaagagttgcatggcacttactgagattcagaaaataacaggactgtcctccatgctccttcacccgctctgacatgcaggaataatcctcgctgcctcccacaccaccttctggcacatagaccaccggtaactgcagtctctcttcacacagctttttcatgcggtccatcagttccggcgtgttgagactgttggtcgctgctcccatcagccggatctggctggtacatccatgcatctgcgctgcattttcaatgatccggcaggcataatcatacatatactgattagcctctgccgtcattcccctcacttccatctccatgtgagcagactcacagatcacatttctggaactgcctgccacaagttttcccacattcactctggtatcaccatgactgtatcttgggatcgcatggagattcaagattgccgtggctgcggccagcatggcattatcacctgcctccggtgctgcggccgcatgggcagcctttccatgaaattccacatccatcttcgtggttgccaggctgtggccatcaccaattccgatcatgcactgctcctgatcctccttgccactcatatgcgcacccagcactacatccacatcgtcaagatgccccttctctacaatggcttttgcaccgcggacaccttcctcagccggttggaaaataaattttatagttccacgaagctgatctttcataccgcaaagtatctttgctgttccaagccccactgtaatatgaccgtcatgtccacaggcatgcatataacctggacatattgaccggaatccctgcttttccggaaaatgatccatgtcttcgcactctgtcaccggaagagcatctatatcgaaccggaatgccagcacctgattctctgatgcccgttctgacgccttttccgaagcagtcctctcctctgacaattttccatgcagaataccgatcacaccagtaaatccgccgcgtgtcttctttaacttttcttctgacacctgccccagcgcttttacttccttataatgttgttccagcagcctttcctcaggtacacccattctggcatctgccttgcagacttctgttcccattaacacctgatcacatccatagctttccagcagtttcgcgatacgggcagatgtccgcatctccatccatcctggttccgggtactgatgaaattcccggcgaagtttaattaactcctgttccaggctctctgcttcttctatgatattttgataaatctcttctgtactcatatatccttctcctgctttccgacatctcaaaatccggatgcgactctgtttttctctactgtaccccatctgactgcaaaaatccactgaaactccggcaaaaaccgcgccctctttacgaatccgactaaatccgttaaaataagaactaataatgctctgtcccaaagggcatagagaaaaggagataaaaaatatggcacagaatcctgttgttacatttgaaatggacgatggcagcgtcatcaaagcagagctgtatccggaggttgctccgaacaccgtcaacaacttcatcagtctggtaaagaaaggctactatgatggtctgatctaccatcgcgtgatcgaaggtttcatgatccagggcggatgcccagacggaaccggtatgggcggcccaggctattccatcaaaggagagttcaatcagaatcgtttcaaaaatgatctgaaacattccgctggtgttctttccatggctcgtaccatgatgccgaacagtgccggaagccagttcttcatcatgcataaagatgctccgcatctggacggcgcttatgctgcattcggcaaagtcaccgagggcatggatgtggtagataagattgctgagaccgatactgattatcgtgataaaccgatcgttccgcaggttatgaagaaagtaaccgtagaaaccttcggagtggattatccggaaccggagaagatgtaaatgtaagaactcagtaccgcgaggggcggtgggtgagataagagctcgtatgacatgtatcggacagaaaagccccacaatactgtctgagcacgtacacatgctgtgtacgcgtcagccagtacagcggaacttccctgttcgctccaagtcatacagcgcagcttattctcacccactgcccctttccagttctaagctcttactttgttcttctccttctggattctacaattccaatcattccaattcccaataaagccagcacacccgccacccctagtaagagtaatggtgcactgtcgcctgtcgtcgggctctctactggtgcgggctgtggtacgactggaatctcttcttctctgtgggttcgcttggatccgcctggtttcggtgtctccggtactggtgtgggcttgtctgatctttcattatgaaagcttcccacatgcctctgtatccgtacaaactgtccgccacatggtccgtcataagaagcatccaccaatacagtttcttccgtaggcaaatatcctgtcggcggtgtcaattccttgatctcatatttccccaaaggcaattctcctgcaaagattccttttccatctattccagtcacgcaggcttttataaatgttcctgctggcactgcaactacaggggcatcccggatgatccattttccacttactgcatcatacacaatattagtgtaaatatcctctgtcacatacagcccaaagactgctccgtaaagcggcatttcattttctttatccttcttctgtacctcgatctgcagccgctggcgctcatttttgtactgcacactctgaatatcaaaatttatcgtctgctcctgcggtgtaatctcgaattccttcacttcctgattgagcacaaatccatctccagcaatggtctccatgatcttatactttcctatataaaggttggtcgcataagcccatccataccggtctgtattgatcgtcgttaccacgtcaccctttttgtggatcagatattccttcatatccgcctgatacaacaggaacagatcctgcgtcacctcctgcgtatagatattttctgcagcaatgatctggaagctggcaccttccaccggtgcatcctgataaacaaattcaagtccggtcattccattggtctcttccaccgaccttgttcctgcaagctgttctccatgcttgtacagccgtaagattcccttctgctcctgatttttctgcagtaccgttaccgtcagattcccatactggtcacacactgcatatttattttcacccatctgtccatctggataaaccgatccattattgatggtaaatgtcagtttccgctgaggtgtctccgtgatcttataaccactctctcttccctcacttatatctgttacggtctgctcgctcccatttaccacatagccagatggtgccgtcagttcagtcagttcataggttccaatgggcacttcctgtggaagagtaatatagcagtccaggatccgtccgccttttttgagaaacaccgggcagaatggcttgtcagctgtgccggtcatctctttggcattcggatcataatagctcatccagccatccttatcgtatttccagtttaatgcgatcagactttcctcactgagttccatggtcagacagcgaagccggtaggatgccccttccttcagtaccgttccacgcaccacttcctctgctttaatgtactcgcctggctgttttataaattcttcatcagccttcaccagacgtagaaaggactttgtgatcgtattgttgatgatccgctgtttctgaagttcacggccttctctcgcctttgcaccagcatgatcgccatagcggattccttcctccaccgtatagaccttctcgattttctgcttcgtagcatccgtatataccacgcctccatcctttgtgataaatgcaagaaatggtttggccgccacatgatgttccggcgtggtggtctccacaaacacataggttccgtaagggagctccggagtaatgatccgcccgttcttgtcagtgaacatctctttcacccgatatttattaaggccatccaccttttccagccaccgcttatcaccgttggtccactcctcgtgtccggtccgcttatataccattgccgtcggctctttggtgaaatcataatcataaaatgtcatgatatcggcttcactccatgtgcctgtctttggccgaatgctcccgtttttaactcctgacagattgctgatgagataaacagaaaatcctgctccttccatcacttccagctctgtctggtacgtattatccgatgtcttgataaattctattccctgcttcaccacatagtcaccggaatagaccgtatgagaagcactttcatcatctactgtcagctcattctttgcctcgctggcagtctcatctctcttttcgatctttatcatctgatctttgtaagaaactgtcacatcatatactgcctcatcaaacatatatccttccgatggtcggatttccttaatataatattttcccagttccagatctccaaacaaagttctccccggtgtatcctcataggcaatagttccccatttattttcaatatgtctggaaccatctgtatttaaaatatatccagctgaattgcgtttcggactctttccgatcacctcctgtgccaccagttcatcctttccgtaaatgattccggtcactccatcctgatgttcaatattttctgccgcatagataccatagactgcgccatccagtattgcatctccctgatggattccgtcttccgcttctgtatcatatttgaccagttctactgctcccagtgtccgctcattggtaatgggaaattccagcgtatcgccgccctttcctgtcctggaatcggtgcgctcctcccacacatagccatttggtgctgtgtgctctcgaatgctgtatgtataggtatttttttcaaactcctccttggatttttttaccgtaaaagaagcttctccatcttcatctgtggtgactacgccaatccatgctccgttttcaaaaatgtccaccatacagccctcaagacctacttctgtctgccagtctgtcttattgatcttgagcacgacttcactttcagaaggcatttccaccggatttttccccttgaacaattccggctgatccttcaatccagtaatctgagcattcggattgtccgaatggtaaatgtaatacgtctgcgatccgctccccgccaactgataatagttccacacattggaagccatcttgtctgcagcctccggggaactgatattgagcatggcaacagtccgtgctaccacctgctccatagacaatgtcgtgctgctctgatacagccagatggagatctgtatgctcacataattttctgtgcccacagatacctgtgcgatcagatttccaagaccatcgtttcggatctcatactccccttcgcctgccttatagacataacctgtcctggcagattttcccggctggagacagaatgccggctgccctcccagcgtcagcttgaagattttcccatgaccggttccattgtatccggtgtagctgacaatcagtttcgccagtgcttcctctgatgtctctgccagtgcttccagactgccgccttcctgctgaagtgcctgcagatcttctttttccaaaccttcaaatacggttccacagaaaaattcatccgcactcaccccagtatccagaatctccagacactgctccagatcctgccccagatacacctgttccgaaatatccggcgcaatactgaccagaaattccgccaggtcccgctcataatcatacaaaccatcccaccaggactcatcctgtgacagcaactgctcgtacccttctgaaaaatactgttccttccaggtcaggatcgatgctacatccccctctgtaaaatgatattgcaggtcagtttctgactctccagtttcagcagttaattcactgacttctgattccgcttctgccgtatcagaatccatttctgctgtatcttccacctcttcctctaatgacacttcctctggcaatattgtttctgctggctcatcttctgatactacttcctcagacagcagttcttcttcatttgtatcctgaccgaccgtttcctctgccattacacctgtctgaagggtgccaaaaagaagagcggtacttaatataactgctcctacacgtttccatattttatttttcttcatttttacaatcctcttgagtcgtacacacactttgcgacactagacggaatgccagaaagatcggtactgacaatattcaattatgttttgggaaatcatcggctggaactaccgacgttttcagacatgtttatcgtaaacgattgaagtgggtttgtcaaccaacttcttctgaagtatcttctatattttcatttgaaaaataaaatttttcccgatgcagaacttcaatatattcctgtagtatcagaggatgatacaaaggaatcagctgccttctaaatattgcatctactacttttacagtggcagcatctttcttcttggaaaacaatgccgccacaagtacatttgtatctataactgcataatatttcattatattccccttttttctgaacgtgcagccgctatctccgcttctatttcttctgccgtaaattcaggtaaatcatttgcctgtttacgcaattcagaaaatgcctgcacagcttcctctacgctaacctttttttcaggcagtgttgcttcaaatggtaaacctctcacaattctgcttcgtaccataaacattcgaaatgctgtaggaagatccattcccaactgctcatagatatcagctacttcctgttttaattccttatctgctcgaaattgaattaatacctgctccgccataatttttctcctatattatatgcaaaatatatttatatgttatgtatagtatatgcaatatatatacaaaatgcaattcatttttatatctcctttct

SEQ ID NO: 976 - DNA, 4397 bp, Unknown
  16S sequences of unknown bacteria
cgcgaaatatcaatcttattatatacaaaagaatccggtttttaaagaggttttttcatttttcccaaaaaacaggagacggcggccgtgtgctactgcacccattctccattgatattgaccgccggtggaaacagcgcgagctggctggagacctggccggatacagaagtcagtacgccgccgtatagttcttggttgaaaaaattcccccatcttcccattgcctgcgccaaaatcaaggaaggcgccgcacaatctaacaaatcccaaaaagacattttacgccacttggccatgatcaaggcagcgataattccgccaatgacagctccatagatggcaaggccctgcatttgcagggtaaaaatgcgatccaaatgcccggcaaattcatcccaagaaaacacaacataatagagtcttgcgccgatgacgcccaacggcacagccaaaagaataaaatccaaaatcatatcgctggaatacccgcgaatcttggagagctttgtagagataacaatccccaccaatatacccatcatgataattaggccgtaccaatatacatcaaaaccaaaaatagaaaacgcaacgccgtccaaacctattgcctcatttcacaagaaatcgcatccgtatacagattccctgccacagacgcctttttgctttttcctgaaaagtttcagtccattatcgcattttgaagatacgatgtcaatcaagcgcctgattttaagcgtttctgtgaaaatttgcgccaatctaaggaatttcttttttctatgtaagaataatgatacaatataagtaatttcaggtatggaggatttctattcaatgaaaaagaaattaggattgcttttatccgttcttcttgttgttccaatcatactgaccggctgcggcagggatggaaaaaaactattggaagaggctatgaaaaatacatctgatatcaaatcgcaaaagattgatttcatcctctcttgcgagatcgagcaaagcggtatttccacatcaccgcgccttgatttttcgctggcctccgatcaggatagcgcccatctgaatttttcgatggacagtctcttatcctcgcttcttttccagtcctttaccccggtttcagaggatttgtatgtgcaaaacgaccagggaacagcgacaatttatgccaaagatgcgcaaggcagcggctatatcaaaactacgatgccggccaatgatcttggattagacggccttatgaaggtagacgacttctccgttcaggcaagcggatttgccgccctggcaaatataagtaaatccatcaaagtcatcggcacagaagaagtcaatggcgtaaagtgtgacgtcgtcaatgttactttggattttgaaaaaatatccagcttttctgatacgttgggaaagagcttggacgatcagcaaaaaatcttgctgaatgtattttcggaatgcattgatttcaaattctatattggccaagacgatgtgcgtatttacagcatccgcattggcatcaacaacaaactggtttccatgctcaatcagttgttcaaacagcaaggagattcttccatcaacatcaaagatatgcaaattgaaggcggttatacggtagactatcaaaatgaattgaaagagcttccgaccaacgtgcaaaatgccgaagcattgagcaatgaggattttgaaagccgttgttctctttttcagatgatggaacaaggcactccaacatacgacgactatcttccggatgatatttatgaagataccgatggtttctgggaagaagattccttggatgccgacaattattacgacgattatatgggaagctgatttacttggataaaaaagcgcacagattcttctgtgcgcttttgattatctggtttttgttatggggggcattggaacctcatcaactgtcgaaatgggatattgcgttttccccgttacaatgtccgccgtgatcttcaagacaaacagccgatttctcatttccgtggtaatgctcttgatggccggccgtcccgtatgcgtgcaaagtacgctaagcccatgaatatattccgattcctgttccggcgttatgatttctgcccttccatatgccgttacactgcgataatcatgggtttcctttcggtagctatcgtatcctacccgatctaaaaagttccatacgctgattgctacatgcggatctttcttgatctgttcaatgcggtgcccttcgatggccatgtggaaatagaagatcagctgatcctcccattcgtacccgaaattcatcggcacgatataaggatacggctcatcatgcaatgccacacagcaggttttctgcatatccaaaattgcgcaaagcattttcttatcgcttacccttaccttttccctgtgcatctttaagctcgtatgatccgtcatgaaacattccctccttttgttttgtcgatatatccttaatctcggacaatctttagggctctctcttggtccagcagcaaaggccttacatacgctgccaaattggacagcggcaatacctccggttttaactggatacccaattcctccatcatatattttctacgctgttccacgcgtgcccacatctctggatacgtccgttttagctcctcacgcagggcctcatccgccagcgcgataccctcctccgcattgataccgccgtacggtgggcggctgggaatgatatccatctgcagaatcataccgcttttcagcgttgccttgctatccttttcaatgggcgaggacatccattcttcagaagcgcacaaatgccccggatttagtgtccaaccatattccgacttggggaataccgtatctacggccgcatatacttctccacctgttactccaaggccgacagtttcataccaagtagccgccgctgcaaaatatggacgcgccatcacatctacataattgcgcgcagcctcaggtaggtcggcttctgtttttgccacatacgctgcacggcaggtcagccctccgcgcaggctcatagaggtcgtaaacgcatctcccacctctaccttcttataacgtggactaacgacggcaccaccaaacctggcgcctgttgcacacatcggatggcagggcgtaaactggccatacgcatgcaggtgctgggccagctccaattcagttttccccggtgccaaatccttcaaaagcgtctctacacattgggaagcccaagcagcatttacctcgtattccgcaatctcatccgcctcaagtactgtgcgaatcccagaatccgggtcaatcaaaagcctagctgcgttctccatcttcccttcagccccgatgttttcttgaatggcggatatccagtaatgcggcatatcaaataaaagtgcgttattctcacagcggccagtaaacatcttccatccaattaatcccacacggtcaccttttgcaatgcccgcctggcagaatagctctgctactgttttttccgtttccattggctggtttggcaaagagaaatagggacaggcgaccggctgcacttcaacacggctgtactgatgcatcttatacatctcattgcccagcatcatatgtggcttcccattctggcgcacaaccaaggccgcttcttcaaacctaggctcaaagccagtaaaataatagaagttatcgccatgctctttgtctgcatagataacgaccgcatcgaatccttctttctgcatggcgctctgaagcctattcatatgctttgcataagtctggtcagaaatgagcacgggcttatccggcgacgctatatgcggcgcagatatgtttgtatattgcacttgttctgtttttaccatctttgctttctctcctctttccatatatcatccgcgtatccactaggccaacagcaacggcagaatccgatctgtcgctaaagatcgcagtccttgtaggtaatcctcttcaaatgccggcgcaaaggctatttgaggctgcacacgcttagggatcaatgtgtccatttcctgctgaatggcgcgctgctcgtcttcgcatcctgtcaaacgctctccgcccaatacaatgtaagatggatttaccatgcaatttaccatacagatcaatttagccgcggccaaagacatctctgatagcgactgtgtctttctcaacgcctgaatcaatgtatagcagccgtcaaagggcatatcgctcaattccccggcaaactgtcgcccaccgcgtacgacccttccgcccacaatgcttcctgcgcatacacaaccacaatttagctgcaaatagaccaaatcaatcgtttctttatcccggtttttttccttggccatacggtccgcatatcc

SEQ ID NO: 977 - DNA, 7821 bp, Unknown
  16S sequences of unknown bacteria
aaatgagcggatttgaggtgttttaggattgcgagagcatgaaatgcgaagcaatccgtgtatcatagggggcaaaataccttttggccccaacatcatattttgtaattcaaaaaactgccgcagcctgcggcgaggaggtaatgtatgaagcacaaaacatttcggggcggtgtccatccgaagggctacaaagagctttctcttggaagtccgatcgaagacttccttccctcaggagatcttgtatttcctgtaaaccagcacatcggcaagcctgcaaagcccatcgtgaaaaagggcgacgctgtacttgccggacagttgatcgcagaagcagacggctttgtctctgcaaatattgtcagctcctgctccggtacggtaaaggctattgaagagcgccacaccatatccggcggaagagccacctgcatcgtcatcgcaaatgacggattgtttaacgctgcacccggtatcggtatcgatcgggaagcttctgccttttccgggccgcagattcttgatgccattaaatgggccgggatcgtcggactcggaggcgcaggctttccaacacacgtaaagcttgccccgcgcaatccggagcagatcgactatgtgatcgcaaacggctctgaatgtgagccctatatcacctgtgatgaccagctgatgcgcacgcagagcaacgggatcgtcgaaggcatgcggcttgttcttcgtctttttccgaatgccagaggtgtgattgccatcgaagataataagccagaagccatcgaagctatggcacatgcctgcgagggcgacgcaaatctctcagttcttccggtcatggccaaatatccggaaggcggtgagcgcagtctgatcggtgttgtcaccggacggcagcttcgcttcggacagcttccggcggatctcggctgtgttgtatgtaacgtcagcaccctaaatgctatctaccgcgctgtctgtaagaccgagccgctgataggccgtctctttacggtgtccggagacgcagtttccaatccgcacacgctctttgtccggatcggcacttcctgcagcgagctgcttaaggcagccggtggaatcaaacccggctctgaagcaaggaaaatcctctgcggaggcccgatgatgggaatcgcaatgtctacactggatgcgcccgtcgccaaaaacaacaatgcactgaccgtgctcgcttcagatgaagtcgagcttgccgaacagcagatgactgcctgccttcgctgcggacggtgcggacatgtctgtccgatcggtctcgtgccgcagatgatggcggaggccgctgagcgtcaggattatgagcgttatgagaaaaagctgtatggtctggattgtatcgcctgcggaagctgtacctatatctgcccggcaaagcgaccgctgatgcagctcttcaaacagacaaaggccgccatcatggccgcaaagagaaagtgagggaacggaaaatgaatgaaaaattattaaatatgtcttccagtcctcacgtccggcattcgcttacgaccggatctgtgatgacagatgtcgttcttgcattgctcccggcaacggtattcggcatttaccgttacggactccatgcatttctcgtcatccttatttccgttgcttctgcggtacttgtggaatacctgtttgacctggttgcaaagcatccgaacacaattcgcgatggcagtgccgtcgtcaccggacttctgctcgcgctttccctttcaccgacggttccgctgtacctcccgtgcatcggttctatctttgcgatccttttcgtaaagtgcttctttggaggccttggcagaaactttatgaacccggcgctgaccggccgctgcttcctgctgatctcctttggcagtgccatgaccgactttcatatcgacggcgtgagctccgcgactccgattgcagccttaaaggccggtgaggcagtcgatattgcagcggaattcctcggatttgcaccgtctgtcatcggcggctccgcactggcgctgctcatcggcggtatctttctgtgcatcaccggtggtatcacctttgagattccgctctctttcattgtcgtattcaccgcatttatgggactgttcggaggaaacggctttgatcctgtttacctgttcgcacagatctgcggcggcggtatcctgatgggcgctttcttcatggcgactgatccggtcacgagtccggtgacccgaaaaggacagcttctcttcggtggtatcgtcggactgctctccggactgttccgggtacttggctcttctgccgattctgtcagctacgctatcatcatatctaatatgttcgtgccattcatcgacaggttctgtgttccaaagccgcttggctaccgccagagcagcccttccggaaagaaggaatttccgaaggctgctgtcaacctgacgatcatcacattatgtgccgggcttgctttaagcagcgtctatctgctcacaaaggacaaaattgccgaacaggagcttgcagccagtgctgcttcctaccgggaggtatgtccggatgctgtcagcttctcgcatgatgataccattgacgcctccgtgtctgccctgaatggagctatttatgacgaggcattcggcaagacctatataaacgatgtggtaatcggaaaagatgccagtgacgctaccgtcggatacgtcatcagtgtttccagcggagacggctacgacggaaccatcacgctctctgtcggtatcgacacaaccggaactgtacttggtatttcctttacggaactgcacgagaccgccggcatgggtatgctctgtggcgaagatgcattcaagagccagttcaatggcgtcaacaccgatgcatttgtcctcaataaagcaggtggcagcaccgccgacaatgaaattgattctgtatccggagcttcgacctcttccggtgcagtcgtcaatgcagttaataccgctctcgctttttatgcggcatctatcaagtaaagggggaatttccgtatgaataaatatgtagaacgactttacaacggcatcgtaaaggaaaatcccagccttgtcctgatgctcggcatgtgtccgacgctggccgtcaccacctctgcagtaaacggcatcggcatgggattatccactctcgccgttctgattttttcgaacctgatcatttccctgatgcgaaagatcatcccggaccaggttcggctcccggcctatatcgtcatcgtcgcgtcacttgtgacagtcgtcgatctgcttttgcaggcctacgcgccggggctttattccgcactcggcatttatatcccgctgattgttgtaaactgcatcatcctcggacgtgcagaagcctacgcaaacaaagtcggtccggggcttgcgctgtttgacggccttggcatggggcttggctttaccgtcgcactgactctgatcggtatgatccgtgaatttcttggtgccggcagcctttttggcaggcagcttcttccggattccgtacctccgattgcgatcttcgtcaaagcaccgggtgcttttcttgtcatcgcactcatcatcgcagcgttgaacgcattccatatcgccaaccattcgacagatctggtgagcggctgtgacggctgctgcaatcactgcagcaaggccggctgccacaatgaacataaggaggaaaaaagcgtatgaatacctctttgcttttaatcattatcacaactgcgctggtcaacaacgtcgtactcagccagttcttaggcatctgctccttccttggtgtctcgaaacagatcaagacatccctgagtctcggggtagctgttattttcgtcattaccctctcctccggtgttgctagcctgctgtatgattttctgctcgttccgctgcatctggagtaccttgagacgatcgtattcattctggtcatcgcctgccttgtgcagattgtggagatgttcctgaaaaggacctctccggccatttacaatgcactcggtatttacctgccactgatcacgaccaactgtgctgtgctcggtgtcgcactcaccaacgtgcaagatggctacaatttcatccagagtgttaccgcaggctttggtactgcaatcggctacacgatctcgatcgtactgcttgccggtatccgggaccgcatcgatgaggcaagcgttcctcgtccgttccgcggtgcacctgttgtccttctgtccgctgccctgatgtcgatcgcattcatgggctttgcagggctgtcactgtaaggaggtagtttatgtcatcgatcattatcgccacacttgcagtggccatcctcggactgctgatcggcattctgctcgtcacagtcgataaaaaattcaaagtagaggtagacgaaaagcaagtcgctatccgtgaatgtctgcccggcaataactgcggtggctgcggctacgccggctgcgatgccctcgcctctgccatcgccaatcaggaagcacctgtcaacggctgtccggtcgggggcgatccggtcgcagaaaaaatcagccgcctgctcggtcttcagatggaaaagacagaaaaagtcaccgcctttgtcaagtgctccggtgactgtgaaaatgcggcagcacgatgccgttacgtcggcattcacgattgcgcttccgccgcaagcagcgggctctccccgtggacctgtgattatggctgtattggttttggtacctgcgcctctgcctgtccgtttggcgctatcaccgtagatcagggagttgcccgtgtagaccgcagcaaatgcaaggcctgcggcaaatgtgtcgccgcctgtccgcgtcacctcattgagctcgttccggaatctgccacctatgccgtgcgctgttccagccatgaccgtggtgctgctgtcaaaaaggtctgcaaggccggatgtctggcctgcaagctctgtgaaaagcagtgcgagtccggtgccatcaccgtagagaacaacgtcgcacacatcgattacgagaaatgtacaaactgtggaaaatgtgccgagaaatgtccggcgggaattatcaagaaaagaaacgtttaaaaatcacaagaaacagaaaacctccggtgtaatcaccggaggttttctgttcttaacttaacggatcatctgcaaaactgccagtccgctcttttatcatctgataccagagctgtgagaaaattactcctcagtctcctctgccggagcctgattctcaagagccttcatgctcaggctgatcttcttatcatcgccgttgaaatcaacaacctttgcggtgatgatctcgccaaccttcagaatatcagacggcttatcaacatgatcgtgagaaatctgagaaacatgaagcagtgcgtctacacccggctcaagctctacaaatgcgccgtagtctgtcatacgtgccacacgaccctctacgacattgcctactgcatacttgtcagcagcggtcagccacggattctgatcctcgaacttcaggctcagagcgatcttctcacccttgatatccttgatcaggacattgagcttctcgcctaccttgaagaccttcttcggattctcaacatgtccccaggacatctcagagatatgaagcagtccatctgctccaccgaggtcgatgaatgcaccaaaatcggtaacgttctttaccacaccctctacggtatcgcctacatggatccgctcgaacagctctttctgctgctcagcttttcttgctacaagaatctgcttgcgatcaccgatgattcttcttctgcgcggattgaactcagtgattacgaactcaatctcctgtcctgcatacttttcaagattcttctcgtaagtatcagataccaggctggccggaatgaagactcttgcctcgtcaacgactacgctcagtccgccggtaagtacctgtacaaccggagccttcagtacttcctgagtattgaatgcctcctccagtctcttattacccttctctgctgcaagacgcttataagtaagcagtacctgtccgtctccgtcgttcaccttcataaccttggcttccatagtatctcccggatgaacgagttcgcgaaggtctgcattctgctcatttgtgtactcgcttctggtaatgataccatctgccttgtaaccaatgttcaggataatttcatcttctttgacatcaataacagtgccttcgactacctctccattgtgaattgttttaaatgattcttccagcatttgttcaaaacttaaatctgacattgttttgaaacctcctcaattaaattatttggggtcgatgcccctgctgtaatacctacgcaacccatggatggcaatcgccgaatatccaaatcttttaatgtttgtatatagtaagtatttgcacattcctttttgcatatttcgaataactttctcgtattcgagctgtggctgcctccaatgacaatcatgcagtctgccttctgagcgatcctgcgtgcttctgactgccgctcttcggtagcgctacatatggtattcaaaatatccactctatcataactcattttcgagataatttcaactaatttatcaaatttcttgtaattaaatgtcgtctgagagacaacgcagagtggctttgcagggtcatgccgaaactgctctgcctcctcctcggttccgatgaccgtcacagctccggcgcaccagcccttgataccctccacctccggatgtccgtcattgccgatgatgaccacgtctgcgcccttttctccgtactcgcgaacgattcggtgaatcttttttacaaaaggacaggtcgcatccacaatgtccagcccctgatccttgatctcccggtaaatccgttccggtacgccatgggaacggatcacgaccgttccatccgtgatatccagcagctccttctcgctctcaatgacacggacgcccgctccggccagttcccggacgacttcttcgttgtggatgatcggaccatacgtataaatcggctttcttccttctgcgatctggcgcttcacctgatccacagcacgcttcacgccaaaacagaaccctgctgtttttgccaccattacttccataactgattccctttcctctatgcatgaccaccgcttccgcggcgcgactcttttacctgcatgtcgctgtctgcatccgctcccgtgcaagtgcaacgatctctgtcacgacttcattgattgtcatgtccgagctgtctacaagtaccgcatcctctgcccggcgaagcggtgccgtctccctgtgggaatcccggtaatcccgctcctttatgtcgcgctcaatctcttctaacgtgcagctctcacccttttcgatctgttccttataacggcgctctgcacgggtcttcacactggccgtcagaaaaattttcagctgggcatccggcaaaatcatcgtcccgatgtcgcgcccgtccatgaggacatcctctttttttgcaagcgttcgctgcagctccgtcagcttcgcgcgcacctgcggctttgcagacgaacggcttgtcatatcactgacctgttcggtacgaatcagcccggtgacattttctccatttaaaaacacctgctgcaccccgttttcatagctgatcgtcacctcaatatcagaaagctgtttttccagcgcagcagcatcctctatgtccgttcctgcacggagcagtcccaatgcaatcgtccggtacatcgctccggtatcgacataaataaaaga

SEQ ID NO: 978 - DNA, 3415 bp, Unknown
  16S sequences of unknown bacteria
gcagcttttgcaaaagcgctggcaggatccgcagcagctccagcgcctgctgcgcctgctgcgggagaagggctttgtcacggtagagacaaagcttgcccgccgcagcaaggagaagacggagcggatgatcctgcttgccgtctctgcagaagaagcgcaggccctggcggcgcggaagaaaaagaccgcgccattgcagagcgccgttttggagctgctggcgctcaccggcagcgcaggcagcaaggatctttgctatttcaccggcgcaaacagcgccgttctgcggcggctggagtcactggggctggtcgagtccagccagcagcctgtcacgccgcccgccagctttgcccctgcttcgcagccgccggaccttaccctgacgcccgcccagcagcaggcgtatgacgccttggccgccgacctgttggacaatgcgccccatacggcgctgctctacggcgtgaccggcgcaggcaagacggcagtctacctgcagctcatccaccgctgcctggcagaaggccgcagcgccctggtcctcgtccctgagatcgggctgacaccgcagctgctggcgcggttttccacccactttggcgataccgtcgccgtgctgcacagcggcctgcggatcgcggatcgctttgcccagtggcagcgcatccgggcgggccaagcccgcgtcgttttggggacccgctccgcggtctttgccccgctggagcagctgggccttctgattcttgacgaggagcaggagcacacgtataaatccgaaaactccccccggtatcacgcccggtaggtcgcccagtaccgggcgatgcaggagcgcgccctcgtcgtcctcggctcggcgacgccctccgtcgcgtccatgtacctggcaaagacggggcgctaccgcctgtgccgcctgccggagcgctatcacggggctgcgctgccccaggtgtcgatggtcgatctcaagcaggagctgcgggccgggaacggcggcgtcgtcagccgtctgctgcagcaggagctgcaaaagaacctggacggaggagagcagagcatcctctttctcaaccgccggggcagcagcccgatgctgctgtgcgtcgactgcggctttgtcccccagtgcccgaactgctccgtccggctgacgtatcacagcgccaacgggcggctgatgtgtcactattgcggccacagcgtccccgtaccgccggtctgccccagctgtgccggacatttgaagcaggtcggcttcggcacccagcgcctggagcaggagctgcaccacctctggccggacctcccggtcctgcggatggatgcagacaccgtcacagtggccaacccccatgaaaagatcttccgccgcttccaagaggagaaaatccctgttctaatcggcacccagatggtcgccaaggggctggatttccccaatgtcaccctcgtcggcgtcatggacgcagaccaggctctgtatcaggccagctaccgcgccccggagacgacattttccatgctgacccaggtcgtcggccgcgcaggccgcggcgatcgcccgggccgggccattattcagacgatgacccccgccaacactgtcctgcagctggcggcgcggcaggattacgacggcttctatgccgccgagattggcctgcggcagctgcggcgctgcccgccgtttggcgaccttttgatcttccaattctccagccccttccaggagaaggcgctggccgccgccgcggcgtttcgcggcgaattagaggcgctgctgccgggccttgcgggccagaacgcgccgcctatgctgctggggcccgcccctgcggctattgccagagtcaacggccgcttccgctaccgcctgaccctgcgctgcgagaacacaaagccgctgcgccagctcattgcctggcagctgcagcgcttccgcaaaaacaaagcctattccgcggtgcacgtcagcgccgactgcaacccgtacgacgtctgacgcatcctcgcaccctgttttgataggaaccccagaagagaggtaagaacactatggcaattcgcaccatcctgaccgagggcgacccgaagctgacaaaggtctgccacccggtgacaaaatttgaccaaaagctggcagacctgctggacgacatggtcgagacgctggaggcctccggcggcgtcggcctggccgcgccccagatcggcatcctgcgccgcgccgtcgtcgtcgataccggcgaggaatttctcgagctggtgaacccggaggtgatcgagacctccggcgagcaggacggcatcgagggctgcctgtccgtccccggcgtgtacgggtttgtcaagcggcccaatgtcgtaaccgtccgcgcccaggaccgggacggccagtggtttgaggtcaccggcgaggaactcatcgcccgctgcttctgccacgagtgcgaccatctcgacggccacctctaccgggagaaggtctatcgctacccgacccaggaggagctggaggaactatttggcgacagggagacggaagcatgaaaattgtatttctcggcacgccggatattgctgccgcctgcctgcaaaaaatcgtggaggacggctttgacgtcgccgccgtctacaccaagccagacatgccgaaaaaccgcggcatgaagctcgccatgagcgacgtcaagcagtacgccctgacgcaggatattcccgtcctccagccccagtccttccgggacccggcggtggtggaggagctgcgcgccctggcgccggatgtcatcgcctgcgtcgcctacggcaagattttgccccagagtgtcctggagatcccgcccctgggctgcatcaatatccacgccagcgttctgccaaagctgcgaggcagcggcccggtccagtgggcgatcctgaacggggaggaggagacgggcgtcaccgccatgtacatggccccggagatggacgcgggcgatatcatcgaaattcgccgcacctccatcgacccggcagaaaacgcccagcagctgttagaccgcctggcaaggctcggcgcgcagcttctctccgataccatggcccagctgcgagacggaaagcccctcccacgcaaaaagcaggacaacagtatggcgacctatgcccccatgctgacaaaggccctttgccccattgactggggaaagacccgccgccagatctgcgaccacgtccgcggcctcgacccgtggcccgtggcgacgatggcgcttgcgggcaagcgctttaaagtttatgaagtagagcccagcgggaccgtgacagcggccgcccccgggactccggtggcgctgacgaagcgggggctggagatcgcctgcggcgacggcgtcctgaccatcctgaccctgcaggc

SEQ ID NO: 979 - DNA, 2770 bp, Unknown
  16S sequences of unknown bacteria
gatcacatccacatatgatccacgagtttatcatgtctatcgtggaggacagaaaacctcttattgatgatataaaaggcgcttactggactgcaaccggcatctgcgcacacctttcggccatggaaggcggcaaaaaaatgccgattccggattttgcaaaactggattaagaataaggtgatgaaaaacggcaatctgtagtaaaaacggaagtgaaaccgggttgccgtaaatactctgggaaaattgaaatgtaatatgtacattaacaaagaagtgtcgtacgatcatccagaatggatgattgagcggcacctctttattattttccggaattctttggaaatttcagaataactatggtatgatggttttaaaaatctatcattcatttatcagcgcaaagattgacgattataacagcagtgtctattacgagaatccctaacaaaatgctttaaaaaaatggctggaataattttattgatcgaggaggtatataatgaaaacatttcagatcagtgacaagataaaggaggtttccagaatcggaatcggatgcatgcgcatcaccggtcttccggatgaaaaggcagtccgggagctgatcgacggagctatggagcttggtattaatttctttgaccatgcggacatctatgcagccggagaagcagaggctgtgttcggaaacgtactgacgccaacgctgcgggagcaaatggtcattcagacaaaatgcgcgattcggcctggaatctgttatgatttttcaaaagaacatattttaaggtcagtagacggaagtctgaagcgactgaagacggattatgtggatattcttcttttgcaccggccggatgcactgatggagccggaagaagtggcggaggcctttgatattctggaaagctccggaaaggttcgggcatttggagtcagcaatcataatccaatgcagatcgagctgctgaatcagtactgtggcggaaaaatctgtattgatcagattcagttttcggcagcgcactgtccgacaatcgatgcgggactgaacgtcaatatccacaatgatgcaggctgtaatcgtgacggcagtttgattgagtatgcacgcctgaaaaagataacgctgcaggcatggtcaccgttccagtatggaatgttcgaggggatttttatcggaagtgaaaaatttccggagctgaaccgggtattggatgagctttcagaaaaatatgatgcatcaccgaatgcgatcgcaaccgcatggatcctgcgccatccggcaggcattcagacaatcgcagggagcaccagcctgaagcggattcaggatatctgcagggcggatgacatcgtgctgacccgcgaagagtggtatcgcatttaccttgcagccggaaaacagctgccgtaaatgctcccgggccatccggctccgtttcgtatggactacttacggagccggacatagatcctttactctacttcttttccatcgatcagtacatgccggatcacaccggtcagctcaaagggactgccgtctacaatgacgatatccgcgtcttttccttcttcgagggaaccgacacggtctgcgataccgatgtgttctgccgggtggatggttatggcacggagcgcatcgtattcatccattccggccttgattgcaaagcctgcgcaaagcgggagatagtggagcggaattaccggcgcgtcggtgatgatggagacatgacatccggcgtttgcaaggattcccggagtttcccaggtcttattttgaagttcaaattttgttgcatgtccgagggtcggaccgatggcaagcggaaggttctcttttgcaagctcgtctacaatcatatgtccctctgttacatgctccagtgtcagatcaatgccgaattcctttgcaatccggattgcagtgcagatatcgtttgcctggtgcgcgtgcgcttttaaagggatttcgtgatttaataccgggatcagagcttctgccttctgatcgtaagaagggagcttggagatatcatcaccggctgcttctttttttgccttatagagctttgcctggcttaacgcgccgcggatcatggaagcgtttgtcatgcggctggagataccctgattctggtagcagcgcttcggattttcaccgaacgcacatttcatggcaatcgggaattttacgatcatgttatcgacacggttgccgatcggtttgatggccgcaaaggttcctccaatcgcattggagctgcccggtccggttgcgaagcaggtaacaccggcctttgccgccattttcatacacggatcaaaggggttgatgccatcgatggcctgtacctgtggagtgacaggatcgttcagctcattgtagtcctgtccctcatagccaattccgtagccgtcaaggccgatgtggcagtgtgcgtctataaagccaggatacacgtgacatccggacgcatcgatctcttccgcattttcagcagagatattttttccgatttttacaatcttcccatgctcaattagaagatcagcgacaaagatgtcctttgttatcgctgtgtgaagtgttccgttcttaatgcaaatcatttgaaaacccctcctcttgttctgaatgtacgccggatttttactcagaagcttctgtagtaaatccggcttatttgtatatgtagtatgatacacggattgcttcgcatttcatgctttcgcaatcctaaaacacctcaaa

SEQ ID NO: 980 - DNA, 2615 bp, Unknown
  16S sequences of unknown bacteria
ttgaaaccgacggttcggtacaacatccccgctgcaacacgttcaaaacggcggatggtcagtttggcgaactccccagcagcttttttgcaccggattccctcccggacggcgcagaaccctgtctgtacgaagatcgttactatcccagccacaaagcggttgaccattaccaccgctacaaagaagatattgcactgctggcaggcatgggcatgaatgtttatcggttctccatctgctggagccggatcttcccgactggcgatgaactggaacccaatgaagcaggattccgcttctacgatggcatttttgacgaactggaaaaacatggaatgcagccgctggtcacgatccatcacgatgagctgccggttacactggccttgaaatacgatggatggtccagccgccacaccatcgactgctacgtgcggtactgcaaagcactgtttgagcggtacggcaagcgctgcaaatactggcttacctttaatgagatcaacgcggtccgcggctttgcggcttgcggtacccacaagtgcgacaaccagacccactacaacgcggtgcacaatatgttccttgccagcgcacgcgccgtgaaactgggccatgaaatgatgccgggcagtatgtttggtgccatgtatgccatgagtgagctttacccggcaacctgcaagccggaggatgtgtttacccgtttgcagaagcggcgggaaagctattacttcattgataccatggcacgtggttattatcccagctatgcggcagaccttctggcacgccggggcgtgatcctgcacaccgaaccgggagatgatgcgattctggcagctggcgcgctggactatgtttccttcagctactaccgttccaatgtgtgcagcacagaaaccagaatgaacgtgatcggcggcgatccgaacccgtatctggaactgaccccgtggggctggcccattgacccgctggggctgcgcttcctgctgaacgaactgtgggatcgctaccagaagccgctgtttattgtagaaaacggtctgggcgcagtggacaaggtggaagaagatggttccattcaggatgactaccgcattgctttcctgaaagaccatctgcgggcaatgatggaagcaatcgtgacagacggtgtacaatgccttggttacaccatgtgggctccgatcgatcttgtcagcctttccacgggcgaaatgaaaaagcggtatggcttcatctatgtggatatggatgataagggcaagggcacattggaacgcaagcccaaaaagagctattactggatgaaggatgtcattgcaagcaatggcgaaaagctctgggccgagtaacaggaattggacagaaaaggagaaatcaaatggcattcgatgcaaaaagcgccgcagcggagatcgttcggctggttggcggaaaagaaaacatcaacagcgttgcgcattgcatgacccgtctgcgctttgtggtcaaggatctgaaaaaagcagatcaggaagcactgaaaaaagttcccggcgttctgggcgtgatctatgctggcgggcagctcatggtcgtcctagggaaaaacctgctgcccgtgtatgaaacggtggtcaaagactttgaccttttggaaggcgcagcagtcaacgaaaatctggacgctccggcagaaaaaaagccgctgacgctgaagagcgcaggcgtggctgtgctggagtatgtttcggcagcggtcgccccgatgatcacgggtctggtggcaggcggtatgctgaaggtggttctgctgctgatcacgctggtcaatgcgggctttgcagatactgcgacctacgctcttctgagcggtcttgccgatgcgccgttcttctttatgcccatctttgcggcctatggcgctgcgaagaagctgggcggaacaccgatctactccatgatgtgtgccgctgctctgctgcatggcaagtatacagcgctggtggccgcaggtgagccgatcaccctgctgggacttccggtgcgtctgatgagttattccagttctctgctgcctgccctgctgatcgcgctgtgtgcctactatctggaaaaattctttaataaaattattccgggaattttcaagtccctgctggtcggtctgtgcaccgtcacggtgacggtggttctgggctttacggtcctggcacctctgggcggttatctgggcaactatctggccgttgtctttggcttccttggcgataagatcggctttatcactgtgggtctgctggctgcttgcttgccttggctggtcatgtgcggtatgcaccttggcctggtgccgttcatgacgcaggcgctgacgaaccccggttatgatgccgtgttccgccctgcattcatcctgcacaacatggcagagggcggcgcctgcatcggtgtggcactgcgcaccaaggacgctgaaaagcgcgccgaagcactgtctatcgcgtttggctgcatcgtggccggtgttacggaacccgcaatctacggcatcaacctgccccgtaagaagcccatgtacggcgtgatggccggtggtgctgtcggcggtgtggctgctggtc

SEQ ID NO: 981 - DNA, 31072 bp, Unknown
  16S sequences of unknown bacteria
aggaattatgggttcttgaactcacttcctgttgctcttagtttgacaattcacccacccgaatccgtcggctaacagtaataagtttgaattagttccttatcactgttaagccaatctttctaacggttttgtggcctatgcagcctgtattcattttatcaatgcccgcaggatacaataccctcacggtattttcattctctcaacttcgaaaacacttgaggccggcgcataaccactgtttgcccaaccgcaacagcgaatgggcattacctctactcttgaacaacgtacaaacttaacaacgtatgcaatgccactggtataagcagcaaggcacaaaaatcaattacaattgtatatatagtacttgtcaatagatattccaaaatattatctacaaacccaatttcaagcctttattagagcacagccatacccacggtgcctgtaaaaggcttttcacggagcctatggcaatactactcgcatgcctgcgggtgcatcccacgtagtccggatatcaccgtccggctgccggcagtgctccacgcgcaggatacctaagggcgtcggataggtccccctcgcccattgaagatcgcccagctttggccgcagctcgatcgcgccgcatcctgcctctaaaatatggatgcccagcacgtcttccgccaaaaacgccgtgggtcccgaggcccagccgtgacaaaggctgtggcgcaagcccttatagcagaaagcgccgttatccccgtgaatatcctgcatcccctccggcaccggctcgtcgatccggccgctgttctccagccaatcgacgtcaaagtcctcccagaaggtagtggctccacgctccagcatccccccataatacgtctcgagcatctccaacgccgctttcatatcctccgccgccgcaattttcagcaaataatagctcatgaacgtggacatacggcgggccccatccttcagcacaacggccgccgcttgcttctcgtccagcaggcgggccagtccaagcatggcggcggtctgctttgagccgtaatgtgctattggctgcagacgtaaagccgaccgctttttggagcagcaggtggctgccgcttcttctccatactgaacggccagtttttctcccgcctccagcgccagggacagcaacgcgcgggatccgtccttttcctcggcgcgttcatggctgggccagtcgagaaaataacccggcagagtgtcggagccatccgctcgaattaaatcggttatctgtctgataagcaccagcgcatagtcccggttctcttcgagaaaagttcggctgcccgtataccaataccaatcccatacaatgagcagccaccagagagaatacgttggcatgccgttcatccaaccgggcaaaggcgtcgtttcccgggcaaagcgcagggtatcctccagcaggggctgcctgccgaacaccgtccggatggtcagcatctccggatgcatatctcccacccaaaccaatcgatcccttttaattccatcccaaacataccgctgcatattcagatgacaggtataggcagccgtgtcgtaaatccgattcagccggtcccgatcacagcggaaagacccaagatagggaatatcccgataaatgaacaccgctgtaacccccttgagcagcagcttcgtgttccggctcagaagacgaacgcagagaaaccgaaagccggtttctccccaggccgtatcgctgagcgccgggagcgcaaccgtcatgtcccggggcgcgtggtcgttgccggcgtttttttcaccgatgtcactcagcgcctcggaagccgattccccaaaggtcagccgtacacgcgccggattttccccctgaataagcccgcacaatagccttgccccgccgtgcagctccgcgccgtaatcaagcagtatgcccgcctcttctccaccctctccgttttccagcacggccatagccggttcgctggtagtaatctgcaaaagctcccgggagagcagcctctccgcgccgttggtttttcctttgaccgatacgacacggcggggaaagagatcccgccgtatccgttcatcccgctgcgcggcactgaattgttccagtatatccatatctgtttctttcacctcaatcggcgttttttccaccataaaaggtatcccgcggctcctacagacaccgccgcacatcccgcgatcatcataatcggcaggagcgagggggccgatcctgcagatttcgtcgccccgttgtccgttgaagcggtcgccgtggctccggagcgcgtgatttcggccgtactttccgagacggcctttgttgtgtcggggggcggggtctgcgccggctcttgcgcctcgcctgcttccgtggccgcccttgtgcttattcccgttcccgaagcggccgccgtcgtaaaaacggacgcggtgggaagcgtgtgataggccccgccgattcccggctgcttttcatcatagccgaccaccagtatcccattggccacctgccgctgagcgccgtcgctgggacggttcatcagtttcagctgtccgccgcttttggcgatcatcgtggtggagccgccgccatccaaatgcatagcgttatagcagccctgctccaatagcagctgggccatctgccaaacggttagccctttactgaagccgggctgtcgcccgtccgccgtcaccagcatcacggtgccgtcctctttcacccccacagcggtcatgggcgacggggagctatagccgccgtaagcgccggagccatccaggttggggttgattcttccgtcccggattagaaattgaacgccgcccagtgcaaatttcacccgattccagcgctcgttttcgtaggtaaacgagatatagacggtctgacccggtcgtagtttttccagcatttccttatgtacatcacagctcgaaagcaccacgcatccctccggtatcgccgtgtcgccgacgcctgagggggacagcctctgcacgataccttccagcacgtcgccgccgcgtaccgcgcctttttgtatgcgtatgaccacctcctgccccccgctgctgtccgtccgggtggacgcgccgaatttatccgtatacagcaccaacgcgtccggacagttcacggagcacgagcctttcatacgcaagcggttgatgtggttgaccgtataggatgcctcccctacgtgaagggtgatatccatccacggcgcgtaatcgataaacgccgtattgtcctcatacatggcgacacagtaggcatcgcatccgttggggggataaggctccccctggtagggaacgggcgggctggtatacagttcgccgtcctgcaccataaacccaaaaggaatcccatgaccgacagaggtatccatactaaaaaaaccaccgtttatccccgcgaccaccttgcccccataccggtcgtccccgtcctccgccattcccagcagatgctgcacaccgctgaccgactgatgcgacagtcccagcttgagttccgcttttttctccgagggacggaaagatacggtatgtatttttaaggcccccgaatcggtatgggtgtcggaaaaggcgtaccgcaccccatagcccagatcctcctgaagcacgggggctgtgtcggctaaaacggccccggaggcggaaaacgtcagcaaaacggcggcggccagaacaagaaaacctgtcttgatccttctcatacggttcttccttcgccccgacggaacagtatttggagtttccgcgcagccaggctagccgcatccagacgatagctgtcggagatcggtcgcaggacaacgccgccgccctcgtatacgcccggctccgtcatgcgcagcgccgatggttctatgctgcattcttcttcgcaggaaacgcccagcatctggaagccgtggcttatggtcatccgctcccgtgaggccgccagctttccgggctccgcaagaagcggtatgccaaactccagctctacaaaaccgttttcagggaccgtcgtcgccgcaaagccgttgacccgccggcattcgacggctgagccgttgactttcaggtgataatccgccgcatagctcgggataaaaagcgctatccgatcctgcggcagccgcccgtacagccggcaggatacacgaccctccaagggatactgggtacggatttccagtcgaccgcccggaaatcgaagctcggccggattgtagaggccgatgtgtacgacgccgttcttttccatgccgatgctcctcgccacctcggccagaccctccccgccccgcatggagcagcaccagtatgcgtcgcctccggttcccgtcgcgtacaggaacggattatctccaagcgcgcagctgtcgcaaccaaagccgccgttctcgcgctgggcgtgtccaagagcgttccaatatattttttgtgctgtctcaaaataaatgatattctccgtaaaccggaacaagtccatagcggccataaaagaatccacaatggcgcagggttccgtccaatgcgggcggcggaaccagttttggttggcgtaattctccgtcataccctgccgttcatacagggaaaacagccgtttggccatctccagataccgagcgtcccccaacgcctcataaaagcagagaattccccggattcccgacagcgtggcatgggtctgcatggaaatgcccacgaaatcaatagcggcgaacgcctcgatcatttcctccagcaaatccttcagttccgggatatccaaatcccgatacgcccggctaagtccatccaggcacatataggcgcagccaatatccgtggacagataccagccgtttatacaatctcctgtcagctcgccgtccggccgtccctcgaatacacggtcttccggtcgcaacggataccgggcatacgcgccgccccgcagcggcagatagagagaccgcaccagccgcccggccgccgcgcgcgcctcgccgcagccggtgagccgggcatagtccagcagcgcccgcagcagccagttgtgcccggagagctgctgctcattgaaacaaccgggtggcagaatctcccccaaataccctttttcattcaaatttccatacacggtgcgcagggtttctcttaaataggagggctcccgtttggtgacttccatctgccggatcagcgccagcagcgtgcggccctccgcgtccgccggccacccgccgctgtctagccggcagaccctgtccgggatatatatatccgactccaggcgcatgctactgcgcagcagacgatgcgacagcagtcctaagaccgtcacattctccaacgataggcttttcatccgggtacctcctgtatcagcaaaagagcccggcgcgcgccgggcccttttgccttgtcatgtcataaaacttcacttaagcgcctcagcggcctttggcggatcggcgtcccgcaagcagagctgccgccacgccggcacccaacagcagaaccgcgggaaataccgccgattcatagccggtatggggggaacccccgccgccctccgcggattccacggaggaggtgccgtccgtactcgtgacggacgaatcatccgaagggctggttgacgaggtggttggggaagccgtactgctggtattgacgccgggagcgggcgctccctttgctatgagcgtatacttgccggtcagcgtatcccatgtggtgtcgccgtaggagatatacgttccctgattcagggaggaatcctccgggaaatcgtcgttttgcttgaggctgatgccaaaagtggccgacagatccgcgactcccaaagccgtccacgggatagccgcctcaaaatcccagccggttacggtaagagtacaggcggacttcacctcgtcaaatttcccggccgcgtagtcctcccgctgagaacctccggctcccacccgcagggcgggctttccgtcgtcctggcaggtaaagataaactgcacatctccgtctccataggcgcccacccgattggccgcggaaaaatagaattccaggcagtcgtattggaacgaatagatgtctccctttccatcgtccgcgaacgctttgtccgcgctgaaaaaaggcgtggtgtcagccaaccggacggccagatacagattatctgtgtcccaggcaaattggaaccgcatcggcttaccggaagcctcatcggtatgcgtgaagaaacggtttgcccaaagcgcttcgtccagcctgccgtccaccgtcggggctgtttcggccttctgcgcctcttgtttggtaaaatctaccaaagaaacaggcgccctgtaaaacccgccggccaggccaccggcctcctcgccgtttccgctgtcggccaggaaaatgtaaccgcctcccacggcggactgcgccaggttgccgctcagcccgtccaccgtcagctttttcacctcggaaagattggtgtccagaatggtgatctttccctcctggctgtccccgaccaccagatagccgccgcacagcacaatgctataggctttcgccagctcaatctgcttgagctgagtgccgtccggcccgattttcgtcacgtaatacacggaattcgccgagccggtcgcatacacgtttccctgcgtgtcggtggccaggtaaaacggggtgtaggccgtttggcaaacgccgttctgtgcgaagtccgtatacaggacgatgttttccggatccgtcacgtcatagcagcgaatggaaaagttgtgataagaaaccgccatgtagcacagataggtatcgccggttttgaccacagcaacgccgttgacgcccacattcgtgccgcttgccgccacggcctcggtgacatggccgatctcatccatggtggcttctttcaccgcggcgagcgtgattttgtgattgtcgcccgcctcggcgtgggtaagccccacgaacaggttgccccgatcgtcgacggccagccctttgggataccggtcaactgggttactcacctctgaaatggcgggcgtatagctgtccgcgatctcgccgctggaaacgctgattttctgtacgtcccgcgtgttctgaagaaatccggcgtacagatattgcccgtcgggagaggccgcgcagccccgcagctcatagcccaactcggtatccgccagcgtcagatcacaaatccgtgtaaaagcggcgtccggcaccgacgccgcggcgggcgaaagaaacggcatagaagacaaggataccagcagcagaagcgccaaaaggcttatcgatactttacgcatagctatcctccattatatcattgttgtctatagccgccgggcatgtcaaattcccggcggctatagatttccgaccgcttaatttttcgcctgtttttccgctcttcccgtgaccgccaacacggtcacggccagcgccagcgccagcacagcacccagcgccagcggcacgccggtctcgggaccggtttctccggagtcggagccgtccgtctcagcggaatcgtctccgccggcgggaggctgatagccgtccacccatttgataacctccaccgaatttacggacagggagttatccttgttcagcatcagcttcatcgaaagcgtcttggccttggagggaagcgtcaggaccttgccgtcggcggacagagccgccttggccgcgtttacggcttccttcatttcaatcaccatggtggaaaccgcaccgtttcggataaccaggaacgtcttggaaccgctctgcatatctaaaagcaggaagctgccgtcatcctccgtcacgatggtctgcgttccgttcccgtgtatgctcatggaaacgccgcccagcgccttgccgtccgcatccaccagcgtgccctcaaaggtaaaggtatgctcctcttgcggagcctgcgtcgccgccgtggtgggttccgtagtgggctccgtggtggcgccggtggttgcactgccgtcgggatagtagtggacgggttccttcgtgatggcggaaggggatgtccgaacgccctgaggcttgccgggagtgactacccaagcgccgttttccttgatttccgtgccgttggggagcaggcaaccggcgcgcaggtcgatggtttcccctttcccggtcgttccaaaatagggaaccttatttttcgccagggccgccggagagagggtgaattccaagttatccgtacggccgttgctcgcctgaataccgacgaaaatgtccggatccttttcaatcaaatccttgaaagaatagccgttaaaaaaaatataatccgcgaactgatagaaccacgcttcggaatccattacaatttcgccgttatcgtaatacttttgcccagcggtcaaggtcttgggagacacattgagatgaacgatataatagttttcactataggtgttcacaccggtccaggtaatctccgccttaggcgcgtcggtggtgggcggcgtaataatggacgggctggtagtggctttagtggtagcttcggtagaggcttccgtagaggcctccgttgtggcttctgtggtggaaggcgtgttgactacgcgtttgccaaccgtttccgctccagaggtaaacgtaaacttatacgaaatttcctcggctaacgcggcaacaccgggcagcttgcagcctttttcaaaggtgatggtctcgccgtaatcgccgaagttcaggaaatcgccgctgtttttaaacacgatatccagctggcccgccgaggtggccgggagataccgaatatagccggtgtccatccattccttcaacgttttatcgttaatccggatttttgtcgtaaaggcgtccagctcctcttgggtgatgacctccttgatggtaccttcccaatagttaccggtggtgagggtcgccggctcaacggtgcagaaaatttttaattcgtttgcgcccgcaccgatggtgctgaatttcaccccggtaatatctgttcccgtgctttctgcaccgctgccggccaaagcgggaaatgacagcacgcatacgctgacaagcaacgcaagggacaataccagcgtgaaaatcctggccattttctttttcatgaacaatcctccaatacaattttgtttatacgtgtaacttttgacaaaacgaaatcccagtcttcaaaataagaagagggtttcatctttctcacgctcagagggttccgtccggttcatatttcgccagccacacctcggaaaccatcccttgagggagcagatgatagggcgagccgcccgcgccgtccggaccgagacgcgcaccgaaggtgttggcgcgtgtcaggatatactgtaattccaccgattcccgctctgtgagcagctcggtgacgtcggctctgtagggtttcgaccaaatcggcttccgacgtttcccgtccgtcgccaaaagcagggcggcttcaaaatcctccgtatagagctccgtccgtcctgaaatcccgtcaggcacaggcagcagataactgacacccgcgccgtaaaatggaaagccctgttcggttatatcccccaccgccagcgtctccggcggcttcgtcagcacattcccctccggggaaagggtcacgccgaaatgccccagcagataaagcgcctccagattgagagcgccgtggaaccggcataaaagggtgatggtattttggccgggccgcaggacttggggcgaaatctttaaaatacggaaacacggatccacccagaaatccccggaaaccgcagcagcatccggcgttccattcaccaggagatcgaattcctccggcgtttccatcgccagccgcagctcctcgggtctatcttccacgtaaaagtgaaagtcaaggcgaagcgagcaaagagccggctccttttcctcacccgtaaaccagggctgcagcatctgcccccctcgctgtgggagtcccaggcacgtccgtatttccttatccgcttccagaatgtcctttccgcaaaccggcggctcgtcatttatccggtaatccacaaagttcagcaggcagacgttcggctcatgcagccggtaagaaaatgctttgccgcaggggatatccgccgtcttccgaccgccctcaagggccggccgcagaccttcgtccatttctgtaatgaccagacacagctcggccgctgcctcaaaatccgtttggaaagagaggggatccccttgtgcaagcagggttctcgtacctgtccggacatcccatttctcacagtatccgccaatcgcaaaggccacggtcaccccgcggaaagcctgccagcggctgatgttcatcagaacagctatcgttcggtctccgtcacggcggagctgggcgtaaatatccggaatcgggcggccctctttgtctcgaaccgtcacatacggcttcgtctgaagcgtatccagaatgtgatcgaaattcgtgtagacggctggcaactccgcggccgcattggagggaatcgcatctatatagcagggcggggaatcgccaaagaccacctgtccccctttttgcgcgaattcgtaaagtaaatccaaagtggactttctcatgttcagcatgccggtcactaaaacgcttttatagacggcctttcctacccgcaaaaccggtatgccgtcctgttcctccacacggcccatccgatgtaaataatcttcgtctccgtaatcgaagtccacccttgcgccacagagcagatggaaagtgtcctcatagatctgttcgagtttctgcacctccggatccagcgtctgcaattgccaggaccacttggggtaaatccggcaccaaaggctttccaccggatacacaatcagaaggtcgcacagcggctctccctgactaagcagcacatgaagtcgggcgaaatagtcctctatgtaggaataatacgggtaccaagcggattggtacgaaatgctggcgggataatctcgttttccttccccctgcatgctataccatgagagatgatgacatcttaaattgatgccgaacagcgcctgccagtcgccgaccgccttatgcccttcgaagtcgaattgccagccggtagctccgtaaagctcactgagcagccagggcttgcccagctgtctggcggccgactgcagctgcttgacgatccagaagcagtaattgtgctccatcaggacgtccacgcccggcacgtccatatattcataggcccgcatgacggagcccagcatacaggtctgcgcggtgagactgtcctcatgcagcatatgcccggtaaattgtatccggttgagccggcaccagtcctgaatcggcgagagaaaattttctgcaaacagccgttggataagttccatatactgccacttcaccgggctgaccttttccccatttggccataagaatagttccggtaaaaaatcccgcaaatcatagccataggccgcatagaaatcggcaaacagagaatcggtatagggaatcagatactcgccgcccggattggaatttccaaaaccggccataaccgctcctcggtggggttcatcggtgaaaataccatagatctccgtcccgaacctgtccccgcaatgctcccggtatttttcatgcgtttcctgaagaaactgctccgtggcgctacgcttcatggtatccaaataggtagagccgttgcaggaggtttcctttaccatctcctccaccataaatttcagaaccgttctccgggggtgcggagaatcggggccaagtctggtcttttccgtaaaggaatagccgtccaaagagaccgtgaaagcggcaacggtattgtcgtcgtacacgaaatcattgccatcctctatggacaaccgtatgaacttcatgcggttgtccggatcctgcgttaccttgccgcccgcgatgccggagggccatcgatcctcgtcgtaaagccaggtttccaaccccagggattgccccttatcggcacacgcgttaataagctcgaaccattccttgcccaggtattccgtaaccaagccgatgcgggaatggcagaaatagccgcccatgcccatttccttgaaaatctgaatttgcctgagcagctcatctttttcaagcttgccgttccagctccaaaacggctttccgcggtacgccgccgacggggattgaaataggttttccaaattattcattggcaaatctcctcgcctgtcctttacaacggaacctatttcactctcttctttttaaatacgaaaagataaagtaatacgccgccgcccgccagcaggacgaccccgccggcaatcaccatatacgcccagacgggcaggccgtccgccgactcctttatcaccggcgccgcagagctttccgggcgggtggtcgacgtcgtatcgagcgcctgcgtggtttcgccggaagccggttccgaagcttcgtttgacggtgcatcggaagttggattttctaccggtttggactccggtgaggtagcggtcggttttttcggcttggtggttggggtcgccggcttcgtggtggtcggctttgccgttgtagcagagctctccgtctttatgtagagcggggcaagccgtgtgtgccagtgcccccaccaggcttcgtcgccggtgggcgtatacgctgcgccgatgtaattcgtgatgctcaaatccaactgcccgagcgtattcccgctcacgcctatgttgtgtgcatagtgggggaagttgcttcggaacgtcgtggttttttcaaaattgatgccgtccttggactccatgacgctcacataggaatcgtaatcccatccgtttaacagctgaaagccgataaatttccccgtttccgggcaatacttgacttcctccggttcgtttttgcagcggtcattggaaatctgctttcccggccagttgggatccttaagcggaaaaaccgacaccgagatattcccgtagctgttccagtcctgatcgtccttcgtctggtcgacataatacatatagagcctgtcgtccttgaccgtaaaggcgggcatggaacagcccacgccgtttccactgtagcgggtaatggcgtacggcttgccaccccagccgctgccattccatttttcataggggccttccggatttttggcacgggcgatgaacaggttgttgacggctttttctttcgagggatcggtccggaattccggcgaacccgtatatccaacataataatagtcgccgtatttgaaagcgccggggtcgcaggtagaccatttgtcctccgaatccagcgtaggatacagcaccactttccagtccgtccacgtcttgcccccgtccatggaacgggtgtattcaatgctgtcgtttccgtaccgcacgccgttggaaacaagtggcggcgcggacgcccagatgtcgattcggttgccgtcgatgaggatcgccgggccataccggtaggaatactgcacgctctccggcggcgtgtaaatattgctcccctcattcgcacagacaattttcagcgtgctgttctgcgtggcggcagccccctgaaacaccacaagggataccgccagcaggccggaaaaagccgccaaaagcttttttctattaaccataacgaattatcctttcgcgcttacagcattttttatatgccgaaccgttcgttaatctcggcctgcgccgtattgagaattgcttccatggcctgcttgggcgtcattttctgatcaacgcaggcggcagccgcgttgttttcaaaggaggaggttgaaagacggaaaatggacttgtaactccgaatcttgcgcagcatgcctagagactcgtcgtcccggacataacccgcgtgccgcttttcccaatccgccgccttcgtaaacgtgcggtttccaagagctaccaggatcttgccggcatcctccacctgcgcgttgttgctggcaagcccgtagtaccggttattcaaaagaatacaggtatagtctttttgtccgtcgcctttggggaaaggaaggatgccgtaatcgtctttcatcaaagcggacaaatcgttgatatccggtgaaccgttaccggcgatgtaaaacagactgttgccgcccatgaaagagttgatagcggtcacatagccgctgctgcctttcttgttgtacagtccggccttgcagtaatcctgcagccagttcagcgcttccagcagtttggaatccagtccgttgaacaccgggatgccattggccaggacaatcggcgaggtgccgtttgaaaagaccagattgaatatatacggtgtgaacgtggcgttacagccgtaaacctttccgctggactgcttataaaccgcttcggaggcctcgcggaatttggaccaggtccactgtcccttgtccaccagatcatacagattgccgatcttgtactgggaagccaacgccttgttaaaatagacgacgctgtatcctacatctttctcgagtcccacgccatagcaggtgtttttatacgtggcgtttgcgatggcagcctgactccacccattcgttttcagaccgacggatttcaccttggacagatcggcgaaatagccgtttttatacaggctgttcatttcaccctggatttcatagatatccgccacgatctttcctcccgcggtggcggtggcgacatccgtcaaataactatttgcatccaaattgaccactttgatggtacacttgtattccttctgaatcgcggcgattgccttgacgttcgcctgggcgattggatcgctgttgctggccttgtagttgttgggccagaaagtccccagcttgattgttttgccctttaaatccgtaacctgttcgctgaataccggatccttaaacggatccacgccgttcagaaaacccggatcgaccatttgcgcggaatcgctggtttttgtagggacagtcaccaccgtttgcgtcttggtggctccgcttccattcttgccgccggtcgtcgtcccatggcttccaccggacgcatccggactcatggaagaattcgattccaatccgggaagcgtggtaatctcggaacccggttcggtttctcccgatacgccgctgtcggtcgcgtttcctccggaaacggccgacgaggaatcgtcggcaggcttcgatccccccccgcaggaacagagtgacaacagcaggaacgcagcaatcaacgcggataaaatttttctggacataattctcctccttctatttctgttagtgcgacatggcttcaagaatagactgctataaggcgtttccgatttgttacacgtgtaacattaataacataataccatttttctctacaaaacgcaagcggttttcgtaaaaaacatattttaatttgcacacggctgctcggctatctgtgtaccgggccggtagagtcccggatgaacagttcggtgctgacggtgacatcatccaccgtgttgtggcggatatgacgatgcaagacatcaaacgccagtttaccgtattccagcttattgaacccaatagaggttagagacgggctgaatttagtggatatatagatatcgtccatacccaccacggagatgtcgccgggaaccgattttcctttgtcggaaatcgcctgaatggcaccgtaggccatcaggtcgttcaggcacaggacagcggtcacctcaggatgctccgccatcagcttctgcatgagccggtagctggaatccatatccgggttgcgcgtagcgatttctccgacaaatatcggctcgctgtccggcagcatcttttccatcgcggaaaaaaacaggcgatcgctgggatcaaacgtgttattacgggcaaaggtgctgagcatggcaatgcacgtatgccccatatttttcaaatgcgccacagccttttcaatccccagcgtatgatccacataaatatgagaaatatcccggcaatcctttaagataatgccgttaatcagcacccgcacatcgccgtcgaccatactgcttatgatttcatgatacctttgatccgacatatagggcagacccgtgataaacacgccgtcaatccgccgggcaatcaagtgctgaatatacttttccgtctcgcgctggccggtgcagatactgaccagataatcgttatcaatggccgcgttttcaaagcccgtaataatttccgcaaaatacgggttggacaggtcgttggccaaaaccgccaattgcttggtttcgtttttcaccatcgaccgcgccaccatgtctgcggtatagttgagctccttgaccgcatcccagacctttttagtggtttccggagacacgctgcggcttttattcatgacatacgacaccgacgcctcggacacgcccgcccgaacggcaacgtctcttctggtcacacgcatctgcaatcccgcctctttttaaaatactaacacaggagaattccttgctagccgacaatgcccgccctgtcaatagattctacaaagaatttctgaaggacgatatatataagcgcaatagggagaacggccagcacggcgccgatattgacatagttggctacttcaatcggtttgccggcactctgagccaaagcgctcacattttttgacagaatgttgacctcatccaggaacagcggggaaaaaaccgtatccgtccactgccaggccagagccagaagaaaaacggtcgtcataacagccgtggccgccggcagcatgattttcgtaaacgtccgtagcgtaccgcagccgtccagataggaggcttcctccagctccttgggcatattccggaagaactgacgaaacatgaaaatatacaggccgtttttgatccccagaccggtcatggacaggattaccaggggccacgccgttccgatcagcttaaacacgccgagaaacgccttgaacttcagatacagcgggaggaggatggtctgggagggtacaatcagagaaaagatgaccaggaaaaagcagaggttccgtcctttaaattgaaaccgggcgaacccatatccgacaacggcgcaaaccaaggtctgcaaagcgcccaatgccaccgaaatcagcagcgtattttgtaaagccgaccaatagctcatttccttgacaacgtgccggacatttccccaggtaaacgttttcggcagaaagcgaaccgtgggatcgataaaatcggaataggttttaaacgcgttgactaccttaataaaaaacgggtacaggatgatatagcacagccccagcaggatgaccgcccgcaccaacttccaaagcagagaagtaaccgcttgcggcgtcagatgccgcgctttccaccggttccatttcttgcgtccggacgccgtggcctccgcgggtacagacgataataaagaattcataatttccccctaatccaaatactgtatgcgcttggacaagaggccgcagataattcccagacaaatcacaataataaggaagaacatccaggacatagcgcaggaatatccaatcccccggctgttggtaaaagaattgtccagaatatattgcagcacctcgtactttggattggtaaacgagtcgatgatggtgtaaacgatattgacaagaatcatgggcgtcagcatagggaacgtgattttccagaactcctcccatttggtggcgccctccaccttggatgcctcaaacagagagcttggaatcgtctgcagggcggaaaggaatatgaggatttgtacaccggaggaattgaccacactgtaggtgttttctacggcatagaggattacgccggtcagggtgctgtttaaattcgccgattccagcaggcttttcaaatcaaaaaaggaggcgaagttgcctgagaacgccgtggaaatagattcgccgttgttggtggcggagccgaaaaaggaagtggccatattgttgacgtcggcactggctataatgcctgtggccaccagcaccgggaggaaaaagacggcgcgcgccgctcctctgccgatgaacttctgattcaggatgttggcaatgaaaaagctgaaaaacaggatgacgaccaaatcgacgagcgtgccctggacagccccgtaaagcttcggcagaaattccgtgtcctctgtcagtgcggctatgtagttctgaaagccgacatattccctggctaccgagtcaaactgaacggtggcgaattccagcgaataggaaaaggattccaccagcgaggggagaaaaataaagagcatacccacgagaaatggacatatgaacagatagccagcgttattccttttagccatcaggctgccggcccgtctggaagggccgccatgattacgtgtgcgcatcgtatcccattccttctgttatcgattcgttcacatacaaaaagtccattccggctatcgtatacccttcaatgacagcgtcgtcattgttgtaatttatcagtacacggccgccgttttcataggagacctgcacgacgccgccggtcagccgtttatgctccgttatcacactgtcgctgatctcccgaaatagggcgttcagacgggtatatgtggagataatctcttcttcccacgtatccaccgctacggaataataatccgagcagctggtatccgccagcagcagcggatcctccgtcatcagaacatagtgcagacccgcgccgctctcgatgtttttcagcagggccttttgataactgccctgctggttcagcgcgacgccgctgtactccatatagccgtgcagcaccatgccaacaaaaggaatcgcatagctttccatgctcatttccgaagatccaagtgaaatatcggtcaccgcccgcagatatttcagcgtatacgcgttcccgccgtccgccagtaaagtatacccgttatttaccagcttttcaagcgaagcgacggtaatgtttttactttcctcccgtgtcacctcatgtctctcatcgtaattaccggacagataggagcatagggaggaaacaaaaagggtatttgctccgatgcgcgcgccatcctcatgaaaacggtcgatgatagcgccatagctcaggggattaaggagatacgcgctgtcatccgggtcacggcgaccgctggacggagaatatccgctgagaaccgccgtgtcgttgctgataaagcgggagatttgcgtgctggtattcaggccgtttccatttcggtaaaccctggtaaaatccacgcccaaatacgcgcggccctgtgtcccgtcaaaaaattttgtcaacgaggaaagcccctcggttcctcccagggatttttcgatggtggcggtatgaggcacccgaaactgcatgccgccgttgatcgcccccagaagcagggcgttaaagctcgccacattgcgctccgccaattgccgcccaaacgcttggatcccctcaaaggtagacgccgcggtttccacattcatcggaataaatccgaccatcttcctttttgtgaccgctcctaaaaaactcacatcgagacgcaaatcccgtttctccggcagcttttttatagaaccggtttgtgccagataggtgcgatagtaccgggccatgccggaatagccggcgttttcgccgtataggaaatgataccgtaccacatagggagcttcgggttcctttttggaatacacccggtttgccaccacattctcctgctgatccagaatatcgtttgatgcaacgtccatggtatagtaggtaaagtagggggctgccgtattatacgaggaaagtgaattcacggtctttatccgcacgccgcccatagcgtcgccgctctccacaatgccgaaaaccccgcgattcccgctgcgtataccgaacacgggaaacggcgaatagggaaccagcgtcgaagcgtcgttatggttgacgccgaaatcgctgccgtaaaacggcagctccgtttgcgttaaggaagcgctgctgccatttctggagctgttctcaataaccgcgccgctgccgtcggggatcatgagatagccctcttcctgcgccgtcgtggaaaacaaattgctcagcagataaatttttgtcagcgtatatccgctgttcttgacatgcacgatatgggacgtgtcaatctgtgctatgagatctcgctcctgcagccgatacaccaccgggatctcgaaatacgcctgcgcggccccggcggcattgacggcgccggcctgtgcttcctcccgggatatgaacgactcgtcaatgctcagcgcggcggaaacctcctccagaagagaacgctgaaccgacgtcaaatacgtaggatcgcaaacatacaggagccccagcgacgcgagcccggaatatttcttggcgtatgccgccttgtcggcgtcgtccagctcgtcgtaaacaatcgcttgatacaaattttggaatctcgcgaattgggaggtcgagattcgctcctccccgatagcccggtctgccttttccgcaagctgatcgtagcctttctggctcatgacatagcaaatcgtttgtttttccgtgttggttccgaacgcataggtgatagtaagagaatccggctccgcttttaccgttacctgattcagcccgtcgtcgtcaacactgttgggatagctgctcatcatattgcgcgcgctggctccatcgtaatattcgacagccacctgagaataggcgtcggcctttccttcctcgctcagatctgtatcgtcctcataaaccgctcggttggagaaaaacacgctgcccgtgtccttgtccagtacggcgatatcataataccggccaagatacaaggtcaaatgatcgttgctgaggacttcttccatcgcagaaagcgcctcaagctctttctcgcccgctttaaacgcgccgcttttcgcctcactttgtaaatcgctgacaaattgactggcatgcggcgcatagacggacttggcgtcgccggcagaaatcgcttccccgccgcagccggccagcagcgtcagggcggccagacagccgatggccgacacggcagccgagcgcttcttcgtgtgtggcatccgtttacctcctctcaagacagtctgagcttaagctccgcccaaagcgtaacaaaaaaaccggacatctgctggattaggttgaaaaacagcagggcgatataggccatcatacacatgcccaatagaatgaaaacaatcatcagaaccgatttggcaaacgtgtattggtgggtaaccagtgttcccgtaaacagcaggaacgccatccagacatagccgatattcaccagcattgtataaaaagaagcctccgtcagcacaagcatataactcaacggaatgaggatacactgaatcagagtcaccggcaccaaggcgtaggccgtcgcctttaaaatatcggtaaaccgcccctcgccgtcatacaagctggtgagacaccagcttgcgatgcaccataaaaagaacagccccagcgtcgtggccacgcttttatagatgctgaaattcacgccgccggcgggattgaacagatatgaggtgcaatagccggacaaaacggagacaaggatgtaaagggtaagcagaattccagccgtacgcaggctgcccttgcgttcgtgtttgatctcccaatagcccttaaacgggtgtacggttacatacaaggaataccgcaattctttcagcaaagtacccataggctcactcctgactgcccttataatattttaccatgcgctttatcagggaatacagcagggccagtaccccaagtgagatgaggattcccattataacgggaaaatacgtttgcaccttttgttcccgaatgagagcaaccgtatcagaataccggttttgatcctcggcataccgaaaatacttgagcgccgcatcgtatttcccctgcttgagcatagcgtttcccaagcccacaaacgcgtacttaaaattggtgttttcccccgccagctgcgaccaaagcttgtaggcttcctcgtagtcgccgttaaactgactggcctccgcctgcaaaaccagctggccgtaggccgtcggctggaataccagcacctttccaagtccgctgtccagcaccagcagattgtccccctgataccgaatatccaccggcatttgaaaatcgctttttcggtttccgatatttccaaaaataaagagaagatttccgttgtcgtcgtaggtgaaaatatgccctctttgctgatccagcagactatatatcccattctggccgaccgccacaccgacgatgcgggagggctcttccttaaaatccaaatcgcccagcggcgcgtaaaagccgtttcttttcaggacgtcgtttcccatcgtgttgagcttttttattggcgtcacggtgccggatttatccttggatcggatggcgttcaaaatatcctcgccgtccagagagctgatggtagaccagagaaaatcctcgtcgtccataaaaatactattgtattccgtgggaacaaactgctccagcttcgccttctgcgtttccgtaaaaaaacgccgtaaaagcacggtcattacatcatactgcacccggggagaaccaatatatcccatgaagcggccctcactgtccagctggatgatgcccctgttaatattgcgggccactacgtacattctcccgatgctgtccaccgccagccgggagggcagaaaagcctcgtccccaccggtcagccctgtcatattggcaggtttttccaaaatcttaaaaaccgtcccgtcctcccggcattggaggatgcgtccgttttgagtatcggctaccagcaaatccccattatcatatacataaataccctcgggctgattgagctgaagcgtatcattttcgtatggaaaatccgtcaaaaccttttccagccgaaaatccgccgaatatatcaggatgcggttgttgtcggtatccgcgacatacagccggccggttttctccgacagaaccatgcactgtgcatgcccggcccgcagcccgtccgcgtctaccaaatcgaaagcggtcttaaacgtgtacgcatcgggaatgctcacgtcgtttcccttttcatcgtaggtgtagcttgcgttctcgcctatccccgtataggcgagagccggaaagcacgccatcaagctcaacgccagcagcacaagcagcgcacggccgcctttccaatacttcacaaccacacctcaatccttcatgcccgacgtggacatcgtctctataatattggactgggaaacgacgaacacggttaagggcaccagcatcatcagcaccgtgatggcgccgccgacccccgcccgggcaatgccggccgcctgcacctgactgagtgcataggacagggttttcagctgctcactgaaaatatacgacgagcttcccagcccccacaaagattgcaccgtgaaaatcatcagcgtgatccatgccggcttggccatgggcatgaccaacttgaaaaatttggttccctccccggcaccgtcgatatccgcgctttccagtacagaaagattcaccgtctgatccataaactgcttcataataaacaggccgagcggggcacctactgctggcaggatgacagcggtataagtgtcaataagatggagtctggacatgatgataaagctggggatcgccgtgacggccgagctaaacataagcgtggtttggatgacggaaaaaataaagcgggagcccgggaaccgataccgcgacaacggataggcacacatagaggccaatacgatatgcagcagcgttccggccgcagtgatgaataccgtgttgaatatgtaccggctgaaaggtatccaggaatccgacatgagggaaaacaaatcgccgaaatttttcatagtgggcttgataacaaaaaagcgaggcggaaacagccacagctcattggcgggtttcagcgacgttgaaatcgtgtagacaaacggcaggatcatcagcagccccataagtgcgagaaagagaaccaggacaatatcgccgcctaccgaacgagccactttttttttgaatagggtatgtgaaatcgacatcattcaagttcccacgcctttcaaaagtctgcgcaccgccatgttgcagaaaatcatcatgaaaaacaagagcgttgcaatcgtgcaggcatagcccatctcgtaccgtatagtgccgtaatccgccagatggttcataatggtgtggacggaataattggtgctgggaaatccgcagagaccggtaataacatcccccacgccgaaagagccggttatgctcagtacagcagagagaagcagctgcggcttcatcagcggcagcgttacaaaccacaactcctgccaccggttggtgatcccgtctatcgccgctgcttcatagtactgcttatccacgccctggaaccccgcgatgaacacaaggaaagaggttcccagactcatccataggataattacgattaaaacaggaaacatataggctggattttgaaagaactggataggcgcctgtatcacccccagcctccgaagcatgctgttgatataaccctgggcatcgccgctgaaaagataattccagataacaaatatgcccccggaaatagacggtgcgtaaaaaacgatggtgaaaaacacgcgcatgccacgcgacagatcgttgataagccaagcaaaaaagaaagagagcaaaaagcctcccgggccgacgatgacggcaaaagccagcgtgttcttaagcgcaataacaaaaatatcgtcatttagaaacaaacgaaaatagttgctgaccccgataaattgcggtgcacttagcatattgaaagacgtaaagcttaagcacaccgccaccacgacgggcagaatggtaaacagggtgaaaataagcagatacgggagcataaacagataatgcgtgcggtgcttccgcatggctttaaacgtattggaacaatcggatttgagacgagctttaaaagcatgtcttcctgcaaacattcgcatcggccacctttttctaaacgttgacgccccacatccctcactgcaagccgaattcccggcgtttgagagccatttcccggttgatctgattcacatagccaagcagcgtatcacgggcgctgacattttcgctgtatacggtggcaatggcaaagcccacattccggctggtcatgtacccgcccggcacctcgggaatcccccgggtagctttcagctgcttgagcagaacctgtttgtcgacagtgcgccaaggcagtctggcgagagcttccagattggcggtgttataccgcgcaccgacccccatgacgctctccagttccttgccgtattgatactgcgtatcgctgctggtcagccatttcatgaatttccaggctgcttccttatttttgctggcggacatcagcacacagccggatccagacgatggggaaatgttttgcacggcgccgtcctcgccagcgatgccggggatggtggtcatgccccaccggccgctgatttccggggcggaaatttgcagcaggttgtagttggtataatcttctatgccgataacgatttcccccgtgcggaagcgggtgacgaaattgtaggcgtatgggagattatagtcggtaaaaagccgcatgaaatagtggaaagcatccagatttgtcttgctgtccagcgccgtcctgctgccgtcctcgctgtaaagctgtccctgattctgatagaggaacatggcataggaattaaaattcggcatcagggacacattcatgttttgtccctgtatcgtgggcagggcgccaataagatcctgccaggtccggatcgaaccgatgtcgattccgagctgttccagaatatcccggcggtaaaacatcattagaaaggagaacgtttccggcaaggcatagatgccgccgcgataccggtaggggaccaaggcgctgtcggaaaaccgttcggccacctggtcgaaatcttccataagagataaatccgccaccgctccccgcatggcgtaattggccggatcccccccgctgacttgcagagccacatccgggcccaatcccgccactgtggcagtcagaatggtcgtcgccggaaccagctggaggttcaccgcggttccgtaagagggagagaattgctgctggatcagccgacggagtaccatcgcctgatcgcggccgcccgataggccgttgcccacccatacggttatggaggtatcgccggtgccgcccgaaaggttgttataatcgctgacaaaagaggacagaaatttctgaacaccgtctttcagcgagaggaaaaagctcacattggctgtcggaagtgctgcctgcggctcggcaataaacaaataatccagcaacagtggctgctttttcacatccaggagcaagttggcaaaggtactcagcgcatcgcggaactggctgtaaattccggggatctgcccgggagagcgtaccatttcatcgagctggtatgccagctgattcatctgcgcgacattggaatcctgcttccccgtcagatccacccaactggcggcaatttttttcagctgcgccgcttgctgccggaatacctcgattacgtcgggcatgtattggtcgatgttataatcccggtataggtcgggttcggagccaagcagggtcagcagccgccagcttgccgtattcagttcatcaaggctctgtgaggcgtcaagcagggagggcgcaagcgcccccagcgtcacctccagcgtaatcgtccgagagcccttgtccagataaaacaaatagggcgtatcgccgcctgccgcggttacctgccaactggaatcgaacgcaaactccatattttgtgcttcactgaacggaatctccccatcaatacgcagacttcttacacagggaacgtcacgcaaatagttttgcttaaaacgatagccgatgtgataaagcccgctttccggcacttcgattttccatgtaatccacgccccgggttcctgccagcgggttccgccaatcacattgattttttgttcgttatatatgtagggctcgttagccggggaagtgttgtccgcgctggcatacagcgcggggctcgacaccgcgctggtatcctccgcttgcacctttaaaattccgtctttcagcaccccctgtaccgccgaagcgccttgcctttgatatgccgctacagcttccgtatagttcggtacgggttcagcgggagggttcagcgtaacggatgcaatcgccatcggctccgctatcgattccagcgcgaggctgtgcgtcccctgtgtcaggtaaaactgcagggggccgtaaaagccggaagcatcttggagcgtggccgacagccactgcggctcttccttcagcacggtctgccgctcctcatcttctgtgctttcccgggcaaatactctgccgaattcaagctgagaggcttcctcaaaagggactgttccatcaataagcaagcgtctttgaacggctgagctggtcccctccatggggtaatatgcaagcgtgatcgtatataaaccggcctgtgaaacctctatcgtccattctgcccgtcccgtctcttccgtcagtaccacgtcacccgttttgccagcgtattcttttaccaaacgaacattttcgccgccgtgcagagaagaaagatccacatgtacactttgactgggagactctcccgtttgcattgccgtgatataagcgccgtatcctgtggccttcctggtctccccagcaggggatgtatctgcaatttccgcgaaaccggtcatgggaacgagagcaattgtcgtggcaaaaatcaccaaggcgcacaatcccgtcaaaaaccttttttgagagatccgcaaagcaatcaccccttattttcgtttcgttatacgtgtaacacaaaacaattatagactgtccgtacaacaaatgcaatacttttctttaaaaaatatttaatttattaatcgcccagcccgttctcctgaatgaccttctgataccaataggcgctgtctttccacgtcctgttttgcgtcgaataatccgtgtgcaaaataccgaaaggatacgaatagcccgccgtccattcgaaattgtcatatagggaccagagataataccccctgacgtcagccccgtcttcaatagctttgtgaatccatttaaggaagccttccacatactgaatgcgataagcgtcatgaaccctgccgtccgcccctactcgttcgttggcattatgtacgccgttttccgtaatatagatagggattttcaattgaaaatcctcacgcaacatggttatcgcatcatatacgcagcgcggatagtactccacacccgtttccaggaaattacctccgttgcgttccatggcacgttttatctctgctgcttgcgcggaaaccactacacggttgtagcaattgcagccaaagaagtcaatgggctggctgataagctctaggtcgccttccctgatttccggcatcgtgccgtcccgctccattttatccagcaaatacgccgagtagcggccttttagaaccggattcaaataggaaaggtacgattcttcgttttcccgcaatgcgatagcaatgtcctcttcgttttccgggcgcgcgggatgccggtgccaaatatcgaccacaataccgatttggctgttttgggagctgcacgcccggaaagccgcaacgccctcgccgtgagcccttagtatattatgattggcttgtttcccaaacgcctcgcttttgagcccaggcgcgaaaagccccgtggcataccccatataagtggcaattggttcgttaatcgtggcaaagagcggcacgcgatccgcgaattccttgaatagaagctgcgcatattctccaaaccacttggctgtatcccgattcagccaaccgcccaatgtttgcagttcatagggtaaatcccaatggtacagagtcatgttgggggcaatatcatttttcaataactcgtccaccagtcttttgtagaaatccaggcccttgtcattgattctccccttgccctccggcaatatccgtggccaggaaacggaaaagcgataactgttcagccccaaccgcttcatttgctgaacatcctctttataaagctcataatggttgcaagccgtttccggcaaatctccgttcgccgttttgccgggaatccgggaaaacacatcccatatggacaagcctttaccatccttctgagccgccccctctatctgggcggcacttgtcgccacaccccataaaaaatctttcggaaaaatacaagccattttaaacccctcccaagttgttacacgtataactatatcatctttaattggagaagtaaatagcttttgataaatcttataaggaccaacatttctttgattcatttttgcgctatacatccaacgacctcttgtatttacgcgtaaagcattgcatactggaaaggcaataaatggatggagaatatcccatgagcgttgtacatgcgcaccgcggtgcgtccacctatgcgccggagaacaccatgcccgcctttcgtttagctatggaaatgggaacggacggctttgggaacgacattcatttaacgaaagacaaggtgttcgttgtcagccacgacgcatctattgcccgctgttccgacggaaacgtccttatccatgagagtacgcttgaggaactgcgccgttttgatttcgggagttggttttcggagaggtttgccggaacgagtatctccacactggacgaaatgctggacctcaccagccgtatgaccgtattgaacattgaattaaagcccccgctgcctgccggccaggaactagatgaggcattgggcatcttatatgaggcgctgaaccggcatcattgcacagaacgagctatcatcaccttctgtcatgactgggcggcgcgtctcaaggagctgtttccagatttgcgcacgtgacttctatatggcgagcatctttcccccgaggaaaccgtggcgctggcggaacggtacagcgccgacgccgttcacccggcgctgaacggcgtaacgtcagatgtagtgaccgcctgccatgatcgagggcttctcatcaacgtctggaccgtggatgctcctgaagcaattgagcgggccattgcccttaaagtagacggtatcatcagcaatgttcccgaccgtgttcttcgcgccctaggccgcgacgttaaatgagaaactgacaaatgccaaccggcggacccgggagcgtttaccggccggcatttgttgtaatggttatcgcaaggagattaaaaacagtgatgggcttacgcgcggaaaaacttctaagattttttctaatactttctggaataagcggtctttaaacgggaagcgggtcggttaagatttacaggcgcaaaagccttgaaacccgcatgaatactaggctttacgtggcattacccgcccctcggtaatcttctgtgacaccccacccatgcgattccgattccaaaggccgggggttcgaatccctccgggcggaccagaaatagagcgtcgtgcgcgtcagcgtgcggcgctctatttttatccctgtccgccagggagacgaaccccctgggttctgaatccctccgggcggaccagaaatagagcgtcgtgcgcgtcagcgtgcggcgctctattttttatccccgtccgccagggaggcaaagctcccgggttctgaataccgaccggcgaacgaataacacaagccgacaagcttactggtaaacttgtcggcttgtgttatatttcttaaaaatcaaaaactacgattgcatgaaaagattgggatatggcttattcagacgtgacggatgtcttattggttttgcgaaggaaataga

SEQ ID NO: 982 - DNA, 3917 bp, Unknown
  16S sequences of unknown bacteria
cttgaaccggcgacctgctgattacgaatcagctgctctaccgactgagccacaccagcgtttcggcaaaagcacggggctttcgcgattagcctacttattataccataattttaaaaaaaatcaaatgtttttcagccctttcggcacaatcatattgatttttttcggaaggacttgaatttttacgtttccgctgatccccttttcgccgtcgaaattccaaatgacgttttcaggcacgaaaatttcgaattcggagccttcaaagcgcacgatctgcttttctttgaatttatatccgaataaaaacaggcgcgccaaggctatatatgcgcgtatccgctttaaaaacgtgggatttttcgtctgcttgacgagcgcgatctccagttttccgtcggcaaaactgccctttttgttgatgtgcatgcccgcgacgtaacgtccgttcatcaggagcacgaacacgctctgcgtattcaccgtttcgtttccgttacgcacttcgacgggaaatacgtcgaagcgcatattttttttgatgccttccaacccgtatgccattctgccgatgagttttttctggctctgcggcgtggtgtacgtcgcactcgtgaaagcccccgccgccaccacgtacatggcgtagcgctcgttcactttcacgcagtcgagcattacgttttccccgccgagtatgactttcagcgcccggcggatatttttcgggatatgcagagaatgcgcgatatcgttgaccgtaccgctgggaatatagccgagttcgggcatgatctccgcagacgccaccccctgcaacacttcgttgaaagagccgtcgccgcccgaaaagacgatggcgtcgtattttttcgccgcctcgcgcgccgccgcagtcatatcgccgcaggcgcgcgtttcatatacgtccacgatctcatatttctcgcggagtttatccacgacgtacttgatcttttttcggattcgccctttgccgctgaccggattgtaaataaaaatacaattcatgaattttagccaaaatccccgtaaaaattctctgatgacattatatatgattccgcaaaatttagcaagcgttcgcgaaaattgcccttcatttttgtaatttttgtgccgtttgcatataaagatcgctcatgcaggcatagattgcacgaatgtccgacgaggcaaacagcccgtcgctcacagccagaagcccgcacgcgctctccacgctttcgttcatcgcgtcatagcgcgccttggaaagcgttttttccccctccaatatcgtttgcagtcccgtaagcgcgtcttttgcgctctccatcgaacaaaacgccccctcgcggttgatgcgccccgcgtccaactcgtccgccgtcttgctcaaaagaacgatacagtcgtaatacacgcgaaaatacgaagcgatttcggcggccgccgacgcgtccgacgcgggaaggtaaaaaccgctcattacaaaggacagaacttcggcgttctgccctccgtcgacgagatcggcgcagaccgcctccgccgatctctttgtgcggtacacggaatatacgacggcgtaccccttgccgcggtgcaaaagatagcccgcgccgccgcccgaggagaccacgtcggaaacggacagcgccaaatcctcgcggtagacggtctgcgaacagacgaagtataattcccgccgcagcgcgacgcgcgccgcccgctcccccgccgcgacgaggatcgtcagcgcgagcaggcagacggcgagaaaaattgcgcacgaaaggcgcaaataaaacgcttttctttttttccgatttgttttataatgaatgcaccgcatacctaaatttatgacggaaggggtttatttatgaattaccatatcggaaacatgctcatttaccaggagttcaacgggaaaaatcaatgcccgctgtgcgccatccgcaatatcctggaaaggcggctgaccgagcaatacctgaacgaatcggtgatggaagattttcagcgccgcatggtcaacgaaaagggcttttgcctgcaccataccgaaatgatgctggcgcgccagaacaaactttccctcacattgcagcatattacaaggctcaccgcgctcaaaggccgtctggaaattaccgccgaaccgaagatcgcgaaagaaatggcggatttttttatcgattcggacagccgctgcgtcatctgcgacggcgtggaagtcaacatgatccgctattataagacggttgcggaaatgtttttcgccgaaaagaaattcaaggagatcctgcaaaacacgaaggggttctgcctggaacatttcgggcaactgctgcgttacgcttcgttcgcgcgcacgcggaaaaaggattatatctatacgctgaccaaactggaacaggcgagcgtgcagtcgcttttagaggacttgaactggtttgccgctaagcacgactaccgcaatgcggacaagccctggaacggcgcggaagattcccttttgcgctccgtcgtaaagatgcacggcgatcgggcgaaataaaatatttgaaattctttgcggaaaaatttatgatttcttaatcattttcatgtattcttacatagaaccgcaaagatttctccatttattgacaaaaacgaaaatgtcgtttataatttatgggtagtaagcggaggaaaaaccaaacaaatgcacggcaacaaacaagacaaacgcagcgttcgcacctgcgcagccatcgagagcgcgcttttaaggcttctcggcggccgcgacatcaacgagatcacgatcaaaaggctatgcgaggaggcggacgtaaaccgcactacgttttatctgcattataccagtgttttcgacgttttggaaaacattcgggaagagatcatcacgcgcattttgaaaaattataccgttcataaatttccccacggctcggaggcatacaccgattttctgactgccgtgcgggaagaaacggagcgcatgcccatgctagaagaatttctggcgaattcaaaagaggcggcgatgttcacgcaggatctgaaatattctttttacgaacggctgcacggcgcgctcgtgaaagaggcgagcgaggacaagaaagaatgctgcgcctatgtgaccgtgtttttgtgttcgggcgtcatagacgcgtatattctttggctgaaaaacggaaaggccactcctttcgaagtattgtgcaagagtttttccgccctcatcaagacggggcacgcctgctttatgccccacgaatgaacgagaggaatttatgaaaataaccatagtcgccgacgtgctcggcgaagaaaataacgggaccactatcacggcgaaacgcctcattcagcatttaaaagagcgcgggcacgccgtgcgcgtgatttccccttccgaagaggacggggaggggttcattcgggtacccaagatcaatttcggaattttcaattcgtacgtagcgaaaaacggcgtggaacttgccaaacccaacgaggatatgatccgcgaaacgatcaaggacagcgacgtggtgcatattctgatgcctttttttctcgggaacgtggcgatcaaaatgtgccgcgaaaacgggatccccgttaccacggctttccacgtgcagcccgaaaacgtgagttgtcatttcggcctgcaaaagagcgcgttcgtcaaccgccgcatctataaatttttccataagcatttttacgcctataccgaatacattcactgccccacccgatttatcgcggaggaactgaaaaaacacgggtataaacaggatctgcgcgtcatttccaacggcgtggacgaactgtaccgcgccgagcgcggcgaaaaacccgaacggtaccgcggcaaattctgc

SEQ ID NO: 983 - DNA, 2694 bp, Unknown
  16S sequences of unknown bacteria
agatatagggacttcagagggtaactaaaaaatcaaagagtttattgggtaatttcattgtaaaaataaaaagatgtagttttactacatctttttatttttacaaattttttctattttaatatgtctaaattttattgttatttttttgacaaaataatgttatttgtatattttttatcaaacttagttaactttttaattattattgacataaatgtctttaattattattataaaaatagacattataaaatagataggagacgttgtttatgaatagattaaaagataaagtagcaattataacaggcggggcctccggcattggagaagcaacagcaatattaatggcacgggaaggtgccagcgtaatgattggcgattataatttagaacaagcaaatgctgtagctgaaaaaattaataaaaatggcggaacagcaagcgcaatgttcttaaatgctttggagaaagaatctattaaaaatttaattgagcaaaccgttcaaacatacggaaaattagatatcattcataacaatgtagggggaacaaatcctcaagcagatttagatattgtaaacatggatgaaaaagaatggcacagaggatttcaattaaatatagacagcgtaatgtatggatgcagatatgcaattccatatatgcaaaaaaatggaggcggttccattattaatactacttcaatggcagcattcaacggagattttatgagaaccacttatggttccagtaaggcaggagttgtttctttaaccagatatgtagctgctcagtatggcaaacaaaatattcgttgtaatgcagttgctcccggtttgattatgactcctgcggcaattcatcatgtacctgattttatgaaagaattatttctgaaatttaacgcgttaccatatcatggagagccaaatgatattgcctataccgtattatttttagcaagtgatgaatctaagtttattacaggccaaaccatagaagtagagggtggtcattatattaataatccaacagcacctgatatggttgcttttgcccaggcacaacaataaattaaaaatgaatgtagaaaaaggtggcgaatatggtacaaacaaaacaaagaaaatggcattatgcattttttattctaattatgacgggcctgctgttgggtttctccagaggcggacttatgaacagcggcggtttatttttgactcctgttgcaaatgatttaaatgtgaatatgggagtactgacaatatattttagtatttcttctttggtgttaatgttagcgttgcctatactgggaagatttattggtaaaataaatatcaagacgttgattattgcttctgttattctgcaaggcggaatatttgcatgttttggtttactttccaatgtatggggattttatatattatccattccaatggcaattggaaccgcaattccgtgtcatattctgggacctgttattgtaaacagctggtttaagaaaaataccggattggctatgggtgttatgatggctatttcaggtggtgtttcagctatcttgcagcctcagattacatctttaattgtgaatgtaggctggagaaatgcttattggattacaggtgttatcggcgtagcagttgtagcaatcatcgcgcttttatttatccgtttacccggcaaaaaaggctctcttccttatggagtgcaggcagttgttgaacagggaaatcaaaatgcttctgaacaaccaaatacccatgtagaacaaggtattagtgtaaaatctgcaaagaaatcaatttctctttatgcattggttatctttatgttgcttttgacagcaattgcaagtttttctcagttgatttcttcatttgtggtttctaacggatttgacctttcatttggtggtacctctatgagtctacaaatgattggcgcattgattggtgcattgttcttcggagcattaagtgataaaataggcgctaaaatatcagttctgattgctttgtcttttggtgtggcagcatttactttattattgattacccctacaagttcggtaatggttatgatttctatggttctgtttggatttatgacagcatctatgggaacaatgggaccattattggtaagtgatgtgtttggcagaaaaaattatgcggcaatttattcaattgttgctatgggattggcaatcggcagtatgattggcacaccgttattcggatttttgtattctgcatttaacagctatattcctgttattgttttattgttagctatgattggactgtgtgcaggaatgattttcattgcatatgcctttaagaaacatatgtggaaaaaagaagcacaattagaagaaaaagaacaagtgttaagtgaacctatgattttaaatcccgaaatggctgaataatacaaaccccttaaagtaatttactttaaggggttttctattttaagaaatggtttgttccatagaaatatctagtctaattttgcagtgttatgccaaaattgaaagaatacaaaatattgtttgatgagatttgaaagtgaagcaataataaagaagaatataggctgatttatgcttgtatgtaacaatctcaaaacaaaaattggagggacactccttcaatttccaaaattttggttatcggc

SEQ ID NO: 984 - DNA, 4650 bp, Unknown
  16S sequences of unknown bacteria
tcgaggcacgccgccggggtcatgccgggggtgccggaatactttctcggcgcgagcgcgagaactctgactggtcttgacattctgatctctcctttgtataccggtacacatatttaaaccggatattcataaaagcaagaagattataccacgtttccagcaaaatgtcaagatattttttaaaaaaatctcaaaaactcttgacaaatcactgtggattgtgctataatttaatcggatgagaagaaatgatagagaaattatgtataccggtatacacatggtatacatgtacactgaatatccggaggaaaatatggaacagaaaaacggatatcgcgccatcgccgatgaacttggaaacgatatcgcctcgggcaaactccgcccgggcgagctgctcccgcccgaacgcgtgctctgtgaacgctggaatgtcgagcggacgactctgcggcgcgcgctggctctgctttccgacgagggacatatcgaaaagcgtcccggtgtcggctcgatagtcaaagaccgctcgaaggagctgatctccttcataacgaccggcgggagcgcgggtcaggcggctcaggtaaacgagctcgagcaccacttcatgtcgccggtctgcgactgcttctcgcgtatctgcgcgaagaacgggcggcgcgaggtcagcgtcacgctgaccggaaacgtcgaggggcggcttgagtccttccgcaacctgcttgactcgagtcaggcgctagtgctcgccgacaacatcccgatgaacttccttgagacggcgaagcgggtcggaaagccctgcgtgctcttttcacagcgcgataaggggttccgttcggtgctctgcgacaacgacagcggactctcgcaggcggtcgactgcctttacgcgctcggtcaccggaacatcgcgtttctcggcggcgacgagcggtttctgaactcgcgcgccagagtcgacggcttcaaacgtgcgatgcagtcgcacgggctgaacggagaggtgattcaatgcggctggagtgatgtcagcggatacgacggctttctgaagctgatctcgataaatcccgccatcacagctgtctgctgcgtcaacgaccaggtcgcctacggagtctgcaaagccgtgaataagctgggaaagaaggtcggagtcgacgtctcggtcatcggcttcggcgacacgaaatattcgagggacttcgaataccagatcacgagcgtgcggattccgcccgaacgggtcgccagagagctctggcgcgcgctcaggtgggagatcgagtcgccgttcaccgaccccgcgaccgtgcttgtcgaggcggagctgattgtccgcgggacgactggaaaagtacagaactgagagaaaaagaaatgaaaatacttgttactacgccccagggcgaaatttttgaccggcactttccgccggaggctatcggtcggctgaaagtgctcggcgatgtcagactgaaccagaacacaaagcagctcacgcgcgacgagctgaaaaaggagctcgccgacaccgacatcgtcatgactcactggggctcgacccaatacgacgccgggctgctcgacgccgcgccgaagctgaaaatcctcgcgcactgcgccggaacggtcgcgcatatcgcgagcgaggagtgctacagacgtaatattcacgtgttgagcgccaactcgataatggcgagatacgtcgccgagggcgtactcggaatgatgctcgccgcgatgcgcgagttcacatactacgactcggcaatgaagcgcggggaatggaatcgtcgggtcgaccgctgcaagacgctgatcggctcgaaggtcggcttcatcgggctcggaacggtcggacgcgaccttctcgacctgctcttgatgtttgactgcgaggctaaggtctacgacccctacattaccgccgacgcgcttgaccgctgggatttcgcctcggcggcgacctttgaggaggcgatgagctgtccggtcgtcacggtgcacgcctcccagacgtccgagaccttccacattataaacgaaaaggcgctcgcgctgatgccagacgatgggttgctcataaacagctcgcgcgggacgctggtcgacataaacgcgctgataaacgaaaacggtcgcatacgcgccgcgctcgatgtctacgagcacgagggacgcggacaggatgagcggctgctcagatgcgagaacctgcttctgctcccgcacatggcagccgctccggcgaaaagccagatgacgcacggaatcatcgacagcatcgagctgattctcgccggaaagccagcgccgcttgaggttccgttcgcgcagtatattcacatgacacaggagtaaacagcttgaaaataaattttcaggctgaacagttttgagactttcacgacgtggggtcgtgaattttgaaagccggacgagccgtctttcaaaaccgcctcaaaactgtaagcttgtacgaaaggtatagttgttatagacatgataaacacacgtgaagagatgaaaaattacgcgctcaaggtctgcgtgccgatgctcgaggcggcggctgaacgtcggctctcgggaaaaccctcggttgtcgttgacacgatcggctacataccgactctgcttgaggagctgttcagacccttctggggactcgcgccgatactgagcgaggaggacatttacctgaacatccgcggcgagaaaatcgcggtcggcgagtggctgcgcgaggtgcttgtcaccggcatcgacccggagagccccttctggtgggacaaataccgcgattcggtcggcgggcactcgttcgacttccagaacatcaccgagatcgccggactgctcgtcgggatgtatttcgcgaaggaaaagacttgggatctgctgacgccggatgagcagaggatggtcgccgattatatcgcaaaggcgtcgatcgggctctgcgtgcacactgccgagaacaatcacatctggtttccactgctctgcctgaccgtgctcgagcgattagggttcgaatacccggagacgccgaagctgatgcgcgagggactcgaccggctcgacacgatgtatgccggcggcggatggtactcggacggaccgttcgggcgaatcgactactacgaggcttggtcgatgcacagctacccgctgctctggtgtctgatcgccgacccgaagaagtacgattacgccgcgcgccgcgagaaatacctcgaaagaacgcgcgaatttctcggggacttcatcagattcttcgacgaggacggaatgtatccgccgttcggacgctcgctcgcttatcgtttcgcggcggtctgcgtgttcccgctggcaatactcgccggagtagatttcgacgcgaagctcgccggagcggtcacgatgcggaatgtcagctattttgtggagcgcatgctgatgccggagagcgggataattccgccgggcttcatgtacgagtcgcccgcgcttgtcgagaattacacctcgtcgggcggagcgtactggtgcgcgaagagcttcatgtgcctcgcgctcccggctgaacacgacttctggaagggaacggaactgccgtccgacactcaaaactatctcttcagcccgaaggacaagcggctgaacttcatgataagccacgaaaaggacgccggggtgacggtctataacaatcacttccagtattaccagttcggcaggtactgcaatccattcaacgacatggcaagctgctatgataagttcgcgtacaactcgctcgctggcttcgggctgtcgacgcacgacaacgtcagccgcgacaatatgatcagtctttcgaccaccaacggttctatgacctcgcaccgctggggcttcaccgatctcgggcgggaagacggctggatgattagcgttcacacgccgttctcgaacgacccggagacggtcataaagaccttcatgaagccgttttgcggatttcacgtcagaattcacctcgtgacgctctcgcgggaatattcggtcagcgagggcggattcgcggtcgggctctgggatgactaccgcgaatcggaggcggctgagcagggcttcattgtgaagacaaaaacgctcgagagctatatctcgaccgcgtcggacgcgaagctcggatactgcgagatgagaccgaatcccggaatgcacctgatggctccctactccgcttatcccgcctaccgcaccgatccgctcccagccggaaaatatgtctttgcgtcggttttcgggatacataagctcggaaagggctcacagcctgtggtaaagctcgacggaaatatcatttacctcgacatggagaaggtattcgagctttgaaggcacttcgcactcaatagcttcttctgtggacggctaagttcgccgcatgatgaaggacaaaaacaccgatttcgcctcctactatgcgtcctccgccccggcggctgaggagctgtacggtgaaatatataaaaaatatttaaggcaacaccgcacaaaaccaagggtcttgaaaaatcgtgaaaaaggtggtataataaattcatgaacaaacaaatgagcctgtcgttcatacacgacgaattaaaagaagtaaaa

SEQ ID NO: 985 - DNA, 11396 bp, Unknown
  16S sequences of unknown bacteria
tgccgttattcacacctgcggtgcgcataccgtcatacagcatagagcgagcagctaacacgggcaaatgaatccctccgttttctgaacggaaaaccatatttgttatctattttcttatctgtttggattcctttttacacaaaaatttccgaagtgcctattcggcttttttgttttgccactacctgatataatccgatctttctgttttcatacttacggcacttctttaacatctatttgcaccttttctcccggttccagtaactccggataccgtctttgcacacggcttttcttctgcgttttcttttgctctgtcagtactattcttttagctgcatataccattcccgaaaaactgcggctgtatcctttacggagcaaatcgctgtaaactccgtcccatccgtagcgtgcataatgctttttaaatgagttctttatctgccgttcttcattcggtgtgtgtctgttcgggtgactgtgcggtcgatgtgatttctctaacattgactgccatgttccatcgtattttttaccccatcgttttaatgttgataaacttactccgtgtttcaggcttgtttcactttttccgttttttattgcttgtttaactatttcttgcttcttgtgttatcatattcatgagaagtacttctttcttggttaatgttttgtagctaatccattataccatattttgaagttacttctctttctttttgggtcacatcattttaacacatacaattgatttccgtgtcttgaggcgaaacatattgacaaaaccttgctgttatgatagaatcataccgaaaaaaaccctgaattaagggtaaaattcttatggattataaagagttaaaaaagaatttcgacagcatttttgcagataacgaacaagcaaagaattttgcagaaaaccgctcaaaaatggcttggaaagaatttataaattcaggcgtttggggtgattgttgcgaaagcgtagcagaggttgacacttcacattcaaccctcgaaaatgcagcaatccacccgacagaatcggcaagctactgcctttcaccaaacgaaccgattaaacttcacatctttgttgacaagagcgttgtcgaggtcttttcgggcggaaggtcggttgctgtaaggagttatccgccattagaggaaaacaacggaatttcgcttttcgcaaggggtacagacgcagttataagttacgattactacaaaatgggagactaaaaatatgagctttcgaccgaatgataaacgcataaatttaggcgacacctgggcatgttttgacggcaaaaagatacacgccttcttccttcagtttcaaagaagcggtgaagaatcaggaggtacagaggttggtgcaatcggtcacgcaacaagcgacgatatgcttcattgggagcagctgccgacagcagtttgccgtggtgaaaacggctcttacgatgaccttgaacattggacgggttgcaccgtttttaatgacggaaaatattatgttttctatacctctcgttcctcaaaaaaccccgatttttccaacagcgtgacgatttccgaggacggagtaaactttaaaaagtacgaaaacaatccgctttttacccccgacgaaaaatactattttggggagaatgtccgccccgatattcgttttcatggaaactattacccaggtaaaaaggactatgactaccgtgattttgcagtggcttacgataaggaaaacggcgagtggctcggctactatgtcgtgcggctaaagggtgacaactgtgccgaaacagcggcaatcggtcttgcccgttcaaaggatttgcttaattggacgcaggagccgccatgctttgtgcctaaaagataccacgttttagaaacgcctgatgtgttttatatggacggcaaatggtatctgttatgccttagcggaaacctttacggacaaagacattgttctaaggacaccgttcagtatgaccgcattaccttctttgccgttgcggacaacccgagaggcccattccacgaggtctctgataatctgcttgttgcaaatatgaacagcagtgccgcttgcgctaaaacgatacttgtcggggacaagcgttttctgttttataccgaggtgcttgagggtgcgcctactgagtacgacctatttatgtccacaccgaaagaggttgcaaccgagaacggcaaccttgtgctaaaatggtataacggcgttgaaaattattattccaaaaaatataatttaaacgcccaaaacaaaatcttaaatgacgggctgtggggcactatcggaaattgggacattaaggacaataccgtaaaaggttactgtgaaaacgattggtgttgtcaaccgtttgatgtttcattaaagaactttgttttcgaggcaacggtatgctgcacggatgctgaaagcgccgcttttttgtttgatttaggtgatagcgttttcggcggcggtcactcggttatactcgattattcgcttaatcaggtacttattactgagtttagaagatttaatatattagacgctcacgattttaagtttcaaaaggcagaatacaatctacgtgtgtatgtaaatggttttgcggtcgagatttaccttgataataagctcgttttacaccaccttttacaacgcgaaggcggaagattagggttattggtcgagcgtggctcggcagagtttaaaaacaccgtcataaacgaattgactccgttttagagaggaataaaaatatgaaagtgctttctttcggagaggttttatttgactgctatcccaataaagactgcataggcggtgcgccgcttaactttgccgtatatcttacaatcggcggaatttaaacctatctattgtcggctgtcggcgatgatgtgctcggcaaagaggcagaaaaacagatttccgctttcggtacgttatcgcttagaaacgagaacaaccgcaaaaccctaaatgaaatcataaaaaaacaacagtttttcggatatttatgtcgatttaaatctcagaaaaccgttttattcggaagaaacggtcaggtttgcgctcgaaaacgcaacaattttaaaattgaacgatgaggagttgccgtttgtcgcaaaaattctgccaattagcaacacagacgaattgatcgcactaaaatccgtttcaagcgtatataataatttaaagattattatattaacaaagggtgcagactgctctttagggtacgactgtgtgaccgaaaaagcgttttatcgccctgccgaaaagtgcggaggttgtatcgacagtcggtgcaggtgacggcttcggcataatgccgaatttgttcctcccgttgcattaacgacagcattccgcttcagccgcggaacacgcagcttacttaatgcagctcgttaacgccaacgccataattatataccaataatgtgcgaagaacccgctttttcgtgaaatgcagcattttcggcgtgaaatgtaaattttaacataagcctgtatttaacaatccctcagccgccttacggcgtcagctccctaaccaccgggagcccttggtctgtacagaagccatctttaggcacatccgatatccaccgtccgaaatccgttatctgaacttctttcccgcaataacattaataagaatatatattcctataagcagcgctacagaggcgcaaagaatgatatacattccgccgattcccacgctttttccgaaaaagtccacgctgcagtctacgctttgcttaattgcatcgaccgtctcaggcgggaagccgatgtctgccatttccgcaaaaactccgcgcattgcgtgatttctcaaaagacttgttccgtatgttccgggcaaaaacgaaagcactttttgaagccccgtgccgaaattcgatatcggcatataagctccgcaaataaagccgtagcccgcgcttacaatcgttcccacggcagatgcctgcccgtcggtcgataaaaagaagttaatgcatgaggaaagcgccgttccgaacatcgtcagcaaaaatacatcaagcaccatgagcagaacatccgacaaagataaataccagcccgccgcacccagatataaaaggcaggcaaaaagcgcggctgcggtaattatcatcgttgatataagcgttgaaagataatagccgagccccagcgttccgaagcgcaccggagtcacggtaaggtcgtgccttgcgccgcttgttttatccttgatcattaaaaggttggagcaaaacgacacggttacgcagcttactgccagcagcgatgaaatcaactgcccgccgacgcagccgtttataactgcatccgaagccgacgcgcccgccgatatcagcgccgaacggaaggaatcgtcatatacctttttcaaaaaggtcgaataaagcacaagcaggattatcggcgtgataagtgaggaaaaaaacattcccttatccttgaaataaagctttgtattgcgtttcacaagcgaagtaagtcccgtcattttccgtcgcctcctgttaaaaccttacctgtgaccgcaaggaaaacatcgtccatttttccctttgtcacctcataatccctgaaaatttcgggatatttcattataagctcggtagccgccgccgtgtcgggtacagtcaccctataggcgtcgcggattgcctcatacggccgcccgagccttttgatttcggcttcatcagcgccgtaaacggtgataaaatcacccgcatatgtatttttaagcgccagcggagttccctcggcggctatttcgccgtgatccaaaatcacaacataatccgcgtccgccgcctcctccatataatgcgtagtcaaaaataccgtaagctcttcatttttacgcagctcgcctatgaccctccacaaaagattccgcgtctgcggatcaagcccggttgtaggctcatccagaataagtattttcgggtcgtgaatcagcgcgcgcgcaatatctatacgccgcctttgaccgcccgaaagctttcccacggggcggcgcagcagctcatcaaaatccaaaagcgcggaaagccgggcaagccgttttttaaaatccgcgccccttattccgtaaagcgccgcgcggctttcaagattatcccttactgaaagctccttatccagcacggaattttgaaaaacaacgcctataccgcgctttatgtaatccgaatcgcgctcggaatccctgccgcagatttccaccgttccgctgtcctttgaaagctgaccgcagattatgtttatggtcgttgattttcccgcaccgtttacgcccaaaaatgcgaagaattcgccctttttgaccttaaagcttaaatcgtttaccgcctttttatcaccgtagcttttacatagatgttcgattttaagcaatactattcccccttttcgatatatgtgccgacagcacaaccgaagcttttttaattataccaccggcttattgaaaaatcaagctttttgcatataataataagcgtaaaaagaaataagaaagcgatgacaccgatgtgttacaaaaaaatattgagaattaaataataaatattcggaggtatgacttatgtttgaaatgagaccttatgctaaaagaaataattccctttacaacccgttccgcgatatggatgaatttgagaagaaattcttctcatcgccctttggattcttcgacacgaatatgcttgatgaattcaagaccgacattaaggacgaaggcgaccgctatgagctggaagccgatctgccgggctttgacaagaaggatattcaccttgatataaacggtgatatgctcaccgtgagcgccgaaagacattcggagcacgaggaaaaggataaaaagaataaatatgtgcgttgcgagcgttcttacggctcctacagccgcagctttgatttatcgggcgttaaagccgatgagattaaggcaaaatacgaaaacggagttttgaagctgacgatgccgaagaaggaaaacactcttcccgaagcccgtcatcttgaaatcgaataagcgttatgcagtgatccccctgtcgggcaacagtccgacagggggatttgtttgtaagtccggcttatctatacatatctttttaaaatactcctcggttttcccgtttttgattcttgtaagcaagaccctgtagatattcaaaaacagctcggagtatggcgagctgttcctgaacccggcatcgcatttcgcgaccttttccatacgttattcccggtaatccttacgccaaacaagattgtcctatcggataagaccgacataatcaaagcctcgcatccgttcattattacattttcttaattgtccttcattccttaactacaatattgcggatccaggtccctcgcttcagcataacgaagcctataacgcacttaagaatttccgcaccctggcatactgtgtaaagcggcagaatcggcacgcctgtaaagcggctgagcgaaaatgccagcggcacgctcaccacccatacaaagcagctgtcaaaaagcagtgtggaaagcgtttttccgcctgagcgcagagtgaaatatgcggcgttggcataggcgttaaacggtattataatcgaatttatgcatattaaggatgtcgcaagcgaacggacatcttcatcggttttgtagatcagcgggaaaatgcccgagaccgccgccatcacaagaccgaaaaccgcgcatgaggttaccgaaaacgcaataagcttgctatcgcagtcccttacctcttcgggcgatctgcccgcgccgagcatttgaccgattattattccggtggcgctgccgagggatataaagcagaccgagaagagattccaaagcgctgaagcgatattattcgccgccacaacattaagcccccgcgtcgagtaacactgattgagcaccgccacgcttgccgaccacaatgcctcgttgacaagcagcggcatgcccttgagcgtgatttttttgagcagcggcaaagcgattcttaacgagcggtaaacgccctttatatagggatagcgcttaccgtgactgtgcagccatgcggcattgaccgcaagctcggtgtagcgagaaataacggttgcgattgcagcgcccttaacgccgagaaccggcattccgagctttccgaaaatcaaaacatagtttaaagacatattgaccgctaccgcagcaatccccgataccatcggcacaacggtctgccccgtttcgcgcattgaggaagcataagcgttattaaagctaaagggaacaagccctatcagcataaccgcaagatattccctgccgtaacgcagcgcatccgctcgctctgcgtcggtcgcctctccgttaaggtaaagacttataagcgcttctccgcgaagcagcagcaaagcaatacccgccgcgccgataaccgcgcaaatcataattttaaagcggaaggtctggcggataccctcgtcgtcccgctgtccgtaaaactgtgcggtaaaaatacccgcacccgcaaccgcgccgaaaatgcacagattatatacgaaaagcagctgatttacaaccgaaacccctgtcatctgcagtgttcctacacgccctaccataatattatcaagcaggttcacaaaattggttaccgcgttctgtatcatcatcggcaaggcgatcgtcaaagccattttataaaatgctctgtcgccgatataacgtttaatcattcaaattcccctttttgcgttgtaagatttattatatatgtttataccgaaaagtcaagctgttgcattaatatacaaattatgcatcctcaattgcatatttatctaaatatgcagatttatgcggataaattttaaaatattcaaaaaaatatcataaatatgcaaattaggtattgacaaatcgattttgcggtgctataataccgtcagactcaaaaaaagaaattattaaaggagacttctcttatgaaactcacaacaaaaattatctgcggcgtttccgctctgctgatgctcttaacctgcggcggctgcggcagcaaaaaggacacttcgtccgacacaaaaacaaacagcaattacaccgccgaggctggcaagctcataatggctacaaacgccaccttccccccatatgaatacaaagagggtgaaacgattgtcggcatagacgccgaggttgccaagcttatagccgataagttgggtcttgagcttgaaattgcagacgttgaattcgattccatcattcccggcgttcaaaccggcaagtatgatatgggcatggcaggtatgaccgttaccgacgagcgcaaaaagagcgttaatttctcggattcatacgctaagggcgttcaggttgtaatagttaaagagggcagcgatattaaaactatcgatgacttaaacggcaaaaagataggcacacagcaaggcactaccggttatatttacgcttccgatacacccgaaaacggcggctacggtgaagaaaatgttgtaggctacgacagcggtacggttgcggtcgaggcgctcaagagcggcaaggttgactgcgttataatcgataacgagccggcaaaggcttatgtagctgccaatacgggtcttaaaattctcgataccgagtttgccaacgaggattatgcaatctgcttctcaaagaaaaaccccgagctgcagaaaaaggtaaacgacgcgcttaatgagcttaaggcaagcggcgaattccagaaggtagttgacaaatacattaaagcaaactgattaaaaatacaacaaagctgttatcgggtgaaccttcacgtttcgcgccgtgccacctccctcgtcagagggaggctttgttgtacagaatactatttgtaaaaggagatgcttttttgttttcaaccttaaacgtaacggcatggtatcccaattggttaaacgatttaaaggatcagtttgaacttacatttatagacggcaagcgctacaagcagctgattaccggctttcaaaataccttaaaaatcaccttcggcgctctgcttataggtattgtaataggtattgtaatagccgcagtacgctccacttacgataaaaatgccgaaaagctgcgcaaaaagggcggtataggctacatattactcagcatactcaatgcgatttgcaagctttaccttaccgtcattcgcggaacgcctgttgtggttcagcttatgattgcctattttataatttttgtttcggttcgcgacggcgtgccgataggcattctggccttcggtataaactccggcgcatatgttgccgaaatattccgcggcggaataatgtctattgataacgggcagtttgaagccggcaggagcttggggcttaactatattcaaaccatggcccacataataataccgcaaatgttcaagtcggttctgcctaccctctgcaacgagtttatagcgcttttaaaggaaacctcggttgcgggctatgtaggcgttgttgaccttacaaaggcgggcaacgcaatagcagggcgcacatactcctactttatgccccttattacggtagcgctcgtgtatcttgtaatcgtaattgtgcttaccaagcttgtaagcattctcgaaaggaggctgaggagcagtgaacgctgacagcgtgcttattaaaaccgaggggcttgaaaaagccttcggcaaggtgcaggttttaaagggcataacaaccgaaattcataagggcgaggttgttgttataataggaccctcgggttcgggtaaatccacctttctgcgcaccctcaacctgcttgaagagccaacgggcggaaaaatttattttgagggcgttgacattacagatccgaaaataaatataaacaagcaccgccaaaaaatgggaatggtttttcagcagttcaatttattcccgcatatgacggttttaaagaatatgaccttagcgcccatgaagcttttaaagctttccaaagccgacgcggaaaagcgtgcaacagaattgcttgaccgcgtagggcttgccgaccgtgcgaatgcatacccgaatcagctttcgggcggacagaagcagcgcgtagcaatcgtaagagcactttgtatgcagccggacgttatgctgtttgacgagcctacaagcgcgcttgaccctgaaatggtaggcgaggttttgggcgttatgaaaaatcttgcggaggacggcatgacaatggcggtagtaacccacgaaatgggctttgcccgagaagttgccgaccgcgtgctgtttatagacgaaggtattattatggaggaaggcacgcctgaggaggttttcgggaatcccaaaagcccgcgccttaaggactttttaagcaaggtaatataatataaaaaacggggctgtcgctataatgcggctgccgcgttttttattatttcctctctatcacaaccgcttgggaatgcagggcttcatatgccctttcgaccgacgatttcggataagcggtcttatcctcctgccgcgtcgggtcgcagaaaatataattatccgaatcgtatcctataagcagcaggcagtgctcgggccttatccaggttatttttttacccttaaattcccatgactcccccttaaacggctctgccatttcaatagttccccaaaaaatcacgggagtgcccgccgatacatattttttgcaaagctcctccgcggacagtcccttcacctgcttcgcatgaaattcggtgcccgcaagcgctttatcaagcgccgccctaatcactggagcatagcaccctctgccgctctgcgaacgagggtctcccccgaaggatttttcgggatcaaacggcggctctgtgcatacaaggtaatcatctataaaatcatccaccgaaatttcaattcccgccgcattcaaagccattacggcggttacgccttcgcagcctgtaggccagttatccgtctgataaatgtgtttggtatttataagcaccctttcgggcgcatcgtgctcgatttcctcgagataatcctcgcagccgcaaaacgaaaaaagcaaagctgccgccgaaaagaccgctgtgacaggctttaaacaattaatttttgaaaaactgcgccccattttattaagtcagctcctcaaattttccggcgaccgcattaaatgcggcgcccccaaagcttatttaatgcctgccgaacaattcaaaagcaccttaacccagcatgttggtgtaaacttttgaattgttcaggtgcaaggtttttgcgcaattttgcgaaaaacc

SEQ ID NO: 986 - DNA, 6711 bp, Unknown
  16S sequences of unknown bacteria
gtgcttctcttgtaatacaaaaacaggtatccattcaccggattgattttccgatgctggatacctgtatcatggatagctttacaacgatcacccgcctgggtggatacatcattctgttctcaattattgctcagatgctgacactttttcatcttcctgttcccctgaccgcagctattgctgctcttctggagatcagctccggtacgcatgccctcagtgccctgcctcttacttccactcccatacgcacagcccttgtctgtgccggagcttccttcggcggcttatgtacctgtgctcagatcataagtgtcctgtcagacacagatcttgacttgaaaccatggattactggccggcttcttcttccgcttctgatgtttcctgcggtgctggttcttctgtctccggggccagttctgcccggttgctggtaatggtattataaaactgctggaaattatccatcattgcagaatagtgactgttggacttttctaccacatcctgcagcatggtctgcatatttgccagcatatcatctgtatactggatggctcccagacgaatctcattggcatctctggtagcattgttcaaaatctcctgggcctgactggtagccatctcgatcacctgattagcctgctcatatgcctgctgcatgatctcatgctcattgaccagctcctgattctgaatatttgcctgtgcaataatagcctctgctttctgctgtgcatctgccaggattgcatccttatttgccagaatcttctgatagcgtttaatctcctccggagtcttcatgcgaagctctcttaacagctcctccatacgctctctgtcaacaacgatcttgtctcctccaccaaacagcggacctttacaactgtcaatatagtcctcaatttcttcaatgatctgttcaattctgctgttactcatccccagctactcctttcctgccttctgtcgcgccagacgtactttttcctgaaccttctccactacaggttccggtacgaactcgctgatatttccatcacagaaagcaacctcttttactgttgtggagcttaaatatgcatattccagactggttgccagaaacatggtatccacatctgcattcatcttccggttggtctgagccatctgcagctcatagtcaaaatcagagatcgcacgaagtccgcggactaccagattggaatccgtgtgttttgcaaaatctaccagaagtccagagaaagacattactttcacatttggcagatccttcgtcacttcctttagcatctccactcgttcttcaatagtaaaaagcggagtctttcctccattattgagaacacctacgatcagctcacttacagttttggacgcacgtctgataatgtccagatgtcccagtgttaccgggtcaaagcttcccggataaattgctcgagtcatttgttaatccttatcctctcacgctatgcatcatttctctgaatgaatacatgctgatttgttttgtattttttatatttataagcatggaagccagctgcctccagccacgagaaatccgtctccagagaagcctcaataacaatgactgtatattcatctgccagagaacttctggtcagatactccacgacctgccgttccagtccctgatcataaggcggatccataaaaatcacatcaaatggtttctgtccttccatccggtgaagggctgtcagcacatcacatttctgaagctctgcccggtcgatcagctttgtaaactgaagattttccagaatacagtcagcagccttgctgtcctgctccaccagcactgcatgggatgctccgcggctcagtgcctcaataccgatggctccgcttccgctgaacagatccagaaaccggctgtccggtacatctgtctgcaatacattaaacagggtctcttttgtcttatctgtggtaggacgtacatccatccctttcacagttttcagcggcatactccgtgccgttcctgcaattactctcatcttatctgtccatttccataaataatatattttccagaagtcagggcatcaagtcccataggccctcttgcatgaagcttctgggtactgattcctatctctgccccaaacccgaattcgtatccgtccgtaaaacgggtggacgcatttacatagacggctgccgcatcgatctcatttaaaaacttctgcgcattggcatagtcttttgtcacgatagcctccgaatgtccagtattgtagcgattgatatgtgcgatcgcctcatcaatatttttcactgtcttcacagacaggatataatccagatactctctgccccagtcctcttctgttgctttcacaagtccttccgcagctgcacatgctttctcatcaccacgcatctgtacatgcttctcatccaggcgcgctttcaggcgtggcaggaatgcatccacgattttttcatggatcaccagagattcacatgcgttgcacacaccgatccgctgtgtctttgcattgaaaataatatcaattgccatatcaaaatcggcactctcatccacaaaaatatggcagttgcctgtgccagtctcgatcaccggtatccggctgttctctaccacactgcggatcaatccggctccgcctctgggaatcagtacatccacatattggttcagctgcataaatgccttgactgtttcgcggctggtatcttcgatcagctgtactgcatcttccggaatatccatctctgccagtgctgtccggatgaccttcgtgatcgcacagttggacaggaacgcatcactgcctccccttaagattaccacatttccagccttaaagcacagagaaaatgcatctgcagtcacatttggcctggattcatagatcataccgatcacgccaagcggcactttcttccatccgatcatcagaccattgggccgctgtttcatggaagttacctctcccaccggatccggcaatgcagccacctgacgaataccttctgccatgccggcgatccggtctttggtcagcatcagacgatccaccatgcccggctccatgccattctttttagcaatttccacatcttttgcattttttccaagaatgtaattctgttccttgataagcgcatctgctacatgaagcagcacttcattcttcttcgtcgttcccatgatccgaagaaccggctctgcagctttcgcccgccttccaatctcttccagagttctttcactggtctcttccggccggatgatccgcttttcagtcaccagcatctgcggcagaatatcatgtgcctcaaatggaacctccggaaatacctgaaactcgaatgccagtgcaatatgtacgatgtccggatgcttttccagatatctgtcatagtagccaccgccataccctacccggtgacagtgttcatcaaatgccacacctggcatcaacatcaatccattctcatcctcacagatggggcagtccatcttcggctccatgatgccaaagcttcctggatccagatcatccagactattgatataataataatccatgataccgtctccatccacacggggagcagccacttttttatgatccttccatgcacgctccatcagaagacgggtctcaacctcccgcttggcatccacataggccagcaacaggtctgtgttctgatactgtggcagacttacaaaggtctccacgatctttctgctattctcatggagtgtcccgagttctgcctctgctctgcgttttttgacttctgccctaatttccttttttcccatttttgtcatatttttcacccagatttacgatcttgccgtcatgttccagaatatcaatattgtcaagctgacttctcacattctcacggatagctgcgagaaattcctgtctgagaagctgctgctccttcttttcttctgctgtcaggccttctgccttagatttatgtgccagttcattgattctggctatcttcttatcatccatcatcctgattgtctctcctttatttgtccctatacggatggctcatccagatagtcgatcagataaaaatcttccgtacgattctctttgaacagcgttccaaccggttctccatccacgatccgatggatcacacccatatctgctccgttggcgatgaccatatccgctccggcagaggtggccagcttcgccgccttcagtttggttgacattcctccggttcccacatcactggcagaacccttacccatcttctcaaaatgctgatccacatgatccacataatcaataaactttgcatccgggttcttattcgggtcatccgtaaacagtccgtcaatatctgacagaagaattaaaagatccgcctgtaccagtgctgcaactaccgcagacagggtatcattgtcaccaaactggatctcgtacgtagagatcgtatcattctcatttacaataggaatggctcccatatggagcaatgtatcgaaggtattccgggcattgattctgttctctccattcaccagcgtattcttggtcatcagaacctgtgatgcgatctggttgtactccatgaaaaatttctgatacatcatcatcagtcttgcttgtcctatggatgcacatgcctgctttactgacaactgtgaggggcggtccttcataccgatggtcttgcgtcccactacgatcgctcctgagcttaccaggatcacttccttgcctcgattgtgaagatctgtcagttcccgtaccagcttctccattttgatcaggtcaatggaacctgtctctgcatgtgtcagagacgaagatcctactttgactacgatcctttttttatctttcaatcgttctcttaatgtctgattatccatattgttgtctctcttcccatatatagaatgtgtatacacattcctacggtttaatttacaacatctcgggcttgttgacaatgctaacttgtataattttcaagaaaattgtatagttcttcttcatttttaatgtattttccatgttggacttccttttgcacgtcttctggcagaacttccatgatcacatccgtatattcgtagatttcccgttcagggagctggtagacagccacataatcattgtgatctaccagcagaaattcatactgatctgaagaatccactcctgtctcttccgctgtcggtactttctcggccacagattcgcccgtctctccctttgccggaaccatctccaccagttcagtgcctttctgttcctctggcggcgtggcactctttctgcctgatacaaataccatggcgatcaacgcagccacaacgactgctgtgatcaccgtcgtccacatcatttttctcgacatcataaaacctcctttttccatatagtatgaactggaaaaaagaggtttattctacatcaggtgaagctttttcacaattctgaccagtgtacggcctttcggaaagccaagcagttcctcttccgtcagacctttcaataccagcaaagcaactccatagacgatcacggctgcaatacatgctaccagaacagagattgcattgctcttacacagtacatacaagccatgataaactccgaatgcggccgctcccatcagggcagatgccaggagaggcacgaaaaaggtccttcgtacttcctgccgatagcgcatatattttgcgatagatctggagttcagtacgcacatcaggaatgcaaagaaaatatttgcccagaccactgcatgaatgttcataccggtcattaccagcactaccagcagcaccacatggatggccagggagatggctgcatggatcaccggcagacgcatcttgtccattccctgtaaaataccattggtcagtgtggacattccgtataagacaacggaaatgcttcctgtctgcagcagcaatgcagagatacttaaatgatcttttgctccaaagagaagctgaagaatcggagatgccagtacagacagacccactgcacagggaatacagatcaccatcacaaaacggatggcattctctgtctttttacgcatttctcttctgtccttcgccactctggctctggtcagcgcagggatcgtggaagacgccatggcggatgccactgcgatcggcacattcgtcagcagcttatactcaccgctgtaaataccccacagttcatcgatagccatcgactcataattcttataggccatcaagtgtttgaaaataccttgatcaatgatgccgctgatattgtaaacagcggtacttaaaataaccggaaggatcgttacgatcagaagcccataaatctcccatacggactctgtctctccatgcctgtccgaagccactctgcggctcatgacccgctgatagaccaacagaatgaagatcaggaatatgagacctacaaatgcacctgctccggttcccagcgtacttcctgccgcaccgtaagcgtaagcagctgtctcggttcccagaagatgatcaatcttcagtccatagtggaacaacagccatgcagctccgatgctgacagccgcattgaccacctgctccacgatctgggagactgcagtaggaaccatacttcccagaccctgaaaatatcctcttaagca

SEQ ID NO: 987 - DNA, 29291 bp, Unknown
  16S sequences of unknown bacteria
ggctgctctgatgacagctggcatgaccactgttgccttcgctgctgatgcgttcccggtatttgtaaataatggcggccccagcgcaaagaacgacgtgtatgtagacgtaaacgatgatggtaagtttgaactgggtgaaatcaaagatacctttgaatataagggtactattagcctggatgaaattcccggtgataagaaagttgccatcccgctgtatctctctgagactggtgacatgattaccgataaggatgatgtcaagggttataaggtaaagtctacttggtctgtcggcgacctggatgagaaggctgctatcgagctggttaagattgctggcgagtatcgttatgctgtaaccttcactctgcctgagtctgctctgaccaagtacagcgatctggctggtgatatctctgtttacaagagttcttctgacctgaaggatagcaatgctgcctatgataacatcactgttcatttcggtgctgagtatggttaccagcaggactacctggaagaggtagaggatatcatggacgaggctgaaattgttatcttcaaggataaggatgctcctcatgatggcctggaaggcgagtacaccctgaacttcggcgacctgatggaatttgaggttgacgtaactggccagggcaagctgaacctgaagaacaacgtggacttcaacaaggagttcgctgctatgtacgactacgccaacattgatttcatcaccttcgagaaggagcccaccttcaacaagaacggtgttgtttacctgtacgctgacgaggatgctttcgtatacgaagtaactgctgacggcgctaaggaaatcaagggcctgaagtgggacgaggactacgaggcttggacctggaagaccagaactctgaagagctacgctatctctgatgtagagctggacgagaagaccgttaccgaggataaggacgacaccaccaccgatggcggcaagaagaaccccgacactggtagataagcttcgcttatccacctgcgagcgatttgctctgcaaatcggtcgtggtcttcgggtgggtcagaattgacttacccacacaatgcttcacactgacgggcaagtgtcttgcttcagtcagttagaagagcgtcaggtctggtgctctccaacctatttcatcatgcctgatgctgcatttccatcctggaaacacaaatgcaaaagatccgctgtgggatttccccggcgggtctttttttatcccatcggcatgtacttcccgggactgttcataaaatttgtattgtatctgcctgcccattccgatatactgaaatcaggaatctgtttctgaaaaagggggcacgggtatggaaccactcctgcaggaaaccctgcagagccgggatttttccggagaggatcttctgaagatccaggcagaacactgtcggtttgtttcctgtgttttcgaggacgcccttctggaacactgccggttttccgagtgcgtgttccggttctgtgagttttccggaaccatgctgcgccagtgcgagctgaccagctgcacctttgagcactgccggttttttgccagtgatctggtggactgtaaaatgctgggcagtgtgttccgggactgcaccgtgacagccctgcatatttccggcggcaactgggcttatacagccctgcggcagatggatctcagccataatgatctgtcgggcgtgcggctggatggagcggatctctccggctgtgatctccaggactgcgattttaccggctgcagcatgcgggaagcggttctggcagaagcagatctgcggggtgccgatctccggggagcggatctctggggggtggacctgcgttctgcacgcatccatcgaacccggattgatctcacagaagcagtgcgtctggcagaacagtccggctatctggtagaagtataggaggtaatgtctatgaataaaaagcgttttctcaccctgctgctggcaggagtcctgtcccttggcctgaccgcctgcagcggcggagacgagcgcggcagttcgtccaccggggaccagagctcttccagcacagcggaggaaccttcttccggaacagagaacagcagcaaggtggaagggttcacactggatacccccaccacagccgatgaagcagcggagtatttcaaacaggcgctgcttgccggaaatgtggacgcgatccagaaggtgaccagctgcatctatgaggactgggacgatgtgacctttgacagcatcgaatatcagaccattgcccaggacccggtaagctcccggtatcagttcaccttcactgtgagccagagcgattgcgaaaccttccccaccggcacctatgagcgcattgtggaggtcaccaatgtgaccgactattcggaaaccccggtggtgaccatgctctatgacaagagctggaattactatgagctgttcccctatgatatggagcagccgggctatgatgtatacagccagatgaagcggtttgtggacttcatggggaatatggcgtttgcttccccgtcggagctcaccgaagagcagatggtggagtatgccatggtgaccatttttgacgattacaacggggaacgggagctctattcggtggacgaagtgagcaagatggtagagaccctctttggcgtgagcggtgtggatgcttccaagaccaagttctataacgaggaagagggcggctgtgagatgctgggccgcggcggtatgtggtattatacctggaccagcccggctgtacaggatgcctctaccggacgctataccctggacatcaccttctattccgacccgctgcgcacgatcaaggagaagagcatgcgctatactctggaaccgaatggcgatcattataagttcatcagcgcagtggagatctgagcaggctgaaaggcaaaatattccggtttggaatccggaaaaacgctttatttttcagcatgaatagtatataattgtttcagtaccctgaagatgctttctttatggaaaggaatatcacagaaattctggagggaaaaagtatgaaacgatttgcagcaatgatgctggcggcactgttggccgcaagttcgacaacagttgcatttgccgcaaagaattatgattatatcgggttcggcggctgggtaacgctcgactatgacgccatggatggcggcaatgttctggtaccgggcaacacctacaccttcccgatcctggacggcagcagcagtttcaatgaagagtcggctgacatctggagcattaccgcttcggaatatgtgccgctggacgatgagggaaagcgcggcaccgagaagttttcctcggtgagtgtggataagggttcggacggcaagtactacctgacagtaaaggtgaaacagaaccgggatacctactactcggagcaggaagcctatatccttctgaaagtcaaggaaaaagggctttccaatgatgataaggaaatcaatacctctatggcaaatgagctgcgggctaacaccatcgctttcagtgaatatgctggccttgattcggatgtgcgtgtgaatctgggtaacctgcaaaaatactcctcagtatctccggttgattttgaggacggctttattgaaggtgaaagcgcagacagcatcgccaacaaactggaatccgaggatcgtgtgacttattataccatctcggtagaggaatttgagattgcttccaccgactatgatgtcattgacgacgatgagtatgatgtggataactcgatgccgctggtaatggcaggcggcgatgtatccaagtcgaacctttccttcggcaataccgcagagtatctggcgaagttctcctcttccaaggagaagccctacaacctgtcctactccactgttaccaactcggatgtagcaggcgccaaccccaatgcggatctggtctgcatctccttcccgggcaccccgatgttcgctgccaactcctatctggtaatcaaggataaggatatgaagtacctctatgaagtggatggcgatgaactgatcgagctggaaaccaccacacaggatggctatctggcataccggactgaccgtctgaccagctatatcgcttcggaccgcccgctgaagaacgcggtttcttcttcggataaggagaccagctcttcttcgtccagcagctcgacctcgagcagcaccacttccggcggcagcacatccagcaagccgaacccggatactggtcgataaattactctgtaatttatcgacgcagcgaatttggcattaacatgccaaatgtcgtgcaagtgtcattgaaaggcctttgccaaggcctccggcacaagttcagaatgatccaggcaggacttccttttggaagtcctgcttttttattttcccatggaatggcgaatttttatggcatgaaaatgattacaaaatggtaacaaccttctattgagccggcccggctgctccggtataatagactcatcgggcagatcgcccggaatatgcaaggaacgccgggtcagcccggcagcaacataagggaggaaatcgaagatgagagagaagaagatgctgcgccggactgctgccggtatgattgccgccgtgctgatggctggcgggatcagcacagcgtatgccgcagagaccccgggactgtccctggggaacgatggagcggtggcagcggagatcagcctgctgcagccggacagcacctattacttcccggtgcagtatacccgggaggatggccgtctggtgcaggtgcgtgcttcagaagcagatgcgctggagctggaagtgcgttcgggcgaggcactggacggggcggagatccgcacctggaacggacggtgctatgtgcgtctggaaaccgccggggatatccgggacggcgaacgctacaccaccgagcttaccctgcggtatgaccggggcggggacgaggagacactggacttcgctgttacagcgggtctgcgtgcggcgagcctttcgtcggtacaggccggggaacccattccggtcagaacctatatgcccctctacaccgtagcccagcagatggaactggcccggctgaacctctggcgtccggtgacctttgtgggagagggttggagctttaccggcaccctcactgccaaggggacagtggatttctcggtgacccgggagagcattccggcagtggaacggtacctggacggcgcaccggcagcctatctgggcttcccgggcggcggcaactttgaaaacggaaagctgaccatcgacctcagtcagttccgggaggaatttgacggcactgtctatgcctaccggtacctctatgggcggctctaccggattccgtccagctatgatgccgaagcgaataccatcaccctgtcggtgaccaacctgggacggtatgtcctcaccgatgagaagatccccgaagccaccatcgtggactgattttcgctgcaaataaaaaacacctctgtgggaacccggttccttacaggggtgtttttgtgtgggagtggtttatcgctttatcacaaaaatagatcgaaatgtatgcgggtttgtcaatagttgccagtgcccgggtgtgttataattggtatatagcattcttgcggaaacagggaggagaaaccaaatgggaggaatggaagcctgcatcgatgtccggcgggaaatacgggtcctggcctgggtcgccggtgcggaagtagtgctggcagtgatgttccagttctatccgcatggcccgcagctggggacagatccgctcaatctggggtatctgttcgggcgctggatgtgcgcggtggaggctgtggcactggtgcggcaggtaggccacatggatcgcctggcaaagaaactgtccggtctggacggctatctgctcaccgagcagctcagggtggtggaacgggtacggagggacggcgccatctgcctgcgggcagcggtatttgggctttatccactggtgttcctggggatcgagtacctggccttccacagcctgagatcccttgcgggttatctgctcagcctggggttctatctctgctatgaggcggcacagtttcgatttcgccggaaaatccggggactcatgaacgctctggaaggaggcggattctgatggaacagcaaattcgggaacagatcgcccatctgcagagggaatcccggttcctgcggaatctggcaggcgggattcttctctactcgattgtgacttccagctttctgaaagttccgttcctgtcgccgctgggattcctcttcgccgttttcctctatctcagtgcccgggatatttatagggacgccgatgcccagcagccggaaaactggagcagtccggaacagttcctggaggtcagccggcagatccgggaggaaagcgtctggaaactccacacacggctgatcctgctgcttaccttttatgtgatcgatatgatcagctaccccaccatcgttctggcagtcaatatggcagtgacgctggcactctgtgccctgtatgagtggggactgcgccggtttgaaaaacgcaccggcatctgaaaaaacaaggaggggatttgatgagtcaaatggaattgcatacggtacctgccctgaaaaaagggatcatccgcctggcactggctgctgcggtgcagcttctgtttgccctctggttttatgccttctgctgtggcttgctgagcctggggccgctgcgtctcccctatggagtaaagggatatgaattcggcggcatggtctgtgtgctcaccgcttttatgccggtgcggacggtgtggaacctcaacgaggcggtggacgaggccaaaaaacacgagcccctggactttgacgctctgcttcaccggatggcggagatctgccgcaaggcactccgggagctccccagagccctggtggtgatcccgctcctcttcctggtggagtggatgcaggccggcaccctcaactccattcccatggcagtggtctatgccctgctgatcctgatggactttctcctgttccggcggttccttaccctgctgcagaccccgttccggaatggggacagagcggcggagggtccagcaccggacggcaatctggttctccggagccgggaacagaccgatgatctccgctccctccagaacggcgcccggaactttatgattctgggggctgtggaggcggctgcagtggcagttcctttgctgcgcgcgggctttgagttcaagatggttacgctgaagcccacaatcctggccaatgtcctgacgctgctgctctgcttcctgctgggtgtgagtatgatcctggatgggtggaagatgttccggtgcgccgggactctgaatgcggacgatgggagagagctgctccggcagaagctgggagacctggcggcactgatgaagacggcccgggaacagctcatgatgacgacgctcctctccccggtgatgctgctggcggatgtgttccgaagcgagtcggcggcggcgctgccctggttcgggctggcggtggtatactacctgctgtttgagctgctctggcggcggtataaaaaacaggtggatcaggtgatggcagaggtctgaccagttgcagagtaaaaaaaggcggacacagctgtgtccgccttttttactctgaaaagggatcagtcggcagggagaaagtcatcccagaatacctcctggagcaggaactcatccgaacccccggaggtgcccaacatccagtaccggagataccgaccatcacccaattggggaacctgctgcaatgcggcctcattgtgcttccagctcaggtcggcgcataccaccgcatattcctgcagatccagttcccggatctgggtttcgagtgctttgcggtggtactccgcaacggaatccatgtcatcggctgtgagggtggtcaggctgtggagggtgtattcggtcatgtagagcccctcctgaaagttcttttcctcattttccgcggcaatgcgcaagctctcatcctcccctacccgggtcatcaagctttcaaagtcggcctgggtgaggtccagataccagccgtagacctgggcctccagctggttttccggggtgtcctccaggatcagggtacggtcctccgcagtacagacccgatctggttcttggctcggggcagtcagttccgacgggtcgatgtaccgatcccggatcagatcagcttccgtgctggaaatgctctgggagctctcctgggaggagccggtcggggtacagccggatgccagggcagcaagcaccagaatcatcagtatcaggagcagcagctttttcataacgatccctccttgtgcagtcggtcaggctggacttcttctcttcattatagcacagggagtcgccctgcagcaatcaggtcacagtggcagtcagcggtggaacagcttgccgaaccgatccaggaaagtctgtttcggcggctcataggccgggaactccggcaggtgctccatgaaatactcctgggaggagagaggtggacggtccacctgggtggcgtccacatattcgccgctgggcagcagccggcgggctttgacattatccgagagcagcacttccaggtagtgggagagccactgcttgagatcagggtcctccaccggacaggcgatctccacccggcggttctggttgcgggtcatgatgtccgccgaggagatatagagctgccggagttctccatcgccgaagcagtagacacgggagtgttccaggaagcgtcccacaatgctggtgatggtgatgttttcggtcttgccggggattcccggcagcaggcagcagatgccccggacgatgagttccacccggaccccagcctgggacgcctgggcgagcttgtcgatgagttcccgctcggtgaccgaattgaccttgatgatgatgtgtcccttctgaccccgggcgatttcaccgtcgatcatgcgcagcagatggtccttcatggtgaagggagccaccagcagcttctgataactgctgtacaggtcgcccatgagcatattctggaaaaagttcacggcatcttcggcaatgaccgggtcggcggtgagcagcgcaaagtcggtgtagagggcagcggtcttttcgttgaagttgccggtgccgatctgggtgacataactcagccgtccgttcttttcccggcgggtgatcaggcagattttggagtggcatttgtagccttcgatgccgtacagcacccggcagccggcttcctccagttccttggcccattcgatgttgttctcctcatcgaaccgtgcccggagttctaccagcacggtgaccgacttgccgttttccgccgcggtacacagatgctttgccacagcggagttgcctgccagccggtagatggtcatctggatggacagcacctgggggtcattggcagcttcccggagcagacccaggaagggctgcatcgactgatagggatagaagagcagggtatcccgctgctggatctggggccagaggggatagtccttggagagatagtcgggataggccggggtatattccgcatagtagagggagcggtcacacttgtccagctgataggcatacttgagcaccagcggacaggaacaggtataggtctgctgggaagtgagcttgagcttctgttccagcagcttgcggatctcaggggcatcgccctgcatttccagccgcaccggagccagacggccccgcttgcgcagcgccttgaccatgtagtcccggagatcctcgccctcctcgtcatagagcccggcttcggcatagttgatgtcggcgttccgggtcaccgaaacaacacactgctcggtgatgtgataggccttgaagatcttccgcagctgggagaggatcacttcctcagtgcggacatactgggcattctccccgggcagcaggataatgggcggcagggattcaggtacttccacgatgcccagcagggtgcggtcccgtcccgagagcatggcggcagcatagagccccttgttccggagatgggggaaggggtggctgcggtcgatgatctggggagagagcagcgggaagatccgatcccggtaccggtcctggatataggtgcggttcttgccctccagttcctcgggcttccattcccggacgcccttgttcttcagctcggcagagatctcggcaaaggcggcgtcccggtagcggatcagcggacgcaccgcttcatagatggcttccagctgctgctggggggtcagaccgctcttgctgtcggcctgtttggggaaggtgagcttcaggtcggtgaggcttcccacccgcaccatgaagaattcatccaggttgcttgtgaagatggagaggaaccgcaggcgttccagcagcgggacatgggggtccatcgcctcatccatgacccgggcattgaacttgagccagctcagttcccggttctgggtatagcttaaatcccaggttttatcagtttttgacacagatatccctccctgacgccgtaacggctgatgtagagctgttccttgcagagcttatgggtgacagtggtcatgacgatcacgccgggcagaatggtatgcacccggtcaggacagtttttgaggatcagtttccgggcggtattcttccggtccagcagcatggcggcagtgcggtccagttctgccacagtgagcagacggttgctctccggcttttccagatactgattggcgatcttcagcacagcccgggcagtgccgccgatgccgcagataaagggcgagggcttcttgggcagatcagccttgcgcagcttcttgcgcacggccgaggtgagctcgtcgatctcaggacggctgggccacagctcggacacatagcggttgtagaggttcagcgagccgatgtccaggctctgggcggatacgatcttgccgttctccagccggacgatctcggtactgccgccgccgatgtcaaagacagcgccgcctgccagcggacaggtgagcatggcgccgatgcagccatagcgggcttccagttcccccgagagcacctccacttccaggccggtattctcccggatggcggcgaggacttcctcggtattgcggatattgcgcagggaagcggtggcaaatacatgcatcggcaccgggccgaactgagccagcagccgctggaagccccggagcacggaacaggccacctcaatgccctcccgggtgagtgagccggaacggatatagttgaccaggccggccatgcgtttttccgagaacagcgcctggaagccgccctgttcctgtacatcatagagtgtcatgcggatggtgttggagccgaggtccaccacagcaaaattgatctgcggttcggtagttctggtaagttccatagttttgtaatccctcattttctttgttcattgtatcggcagcggatgtccgacaggatatatttgtgttaaatatgggtaaaatgggaagatactgtcaaatcccggcgaatggtgcaaaaaacgcaaaactccgcagagggagtgccgctgcggagtttcctgcaatcatgggaagatggaattaggcatcatgctcgcagtagaagcacttgcaatgagcatgggtatcatcagtatagacaaatctctgcttgagaccggtttcgatggtggtaatgcaggccggattcttgcagaccggaggctcgggaacaaaatcaggttcctcggcgcgcaccggagccagctggttcttgacacccagcaaggtgaggatcagggccatacgcacatacatgccgaactttacctgcttgaagtagcaggcccggggatcattgtccacttcgggagtgatctcattgacacggggcagcggatgcagcacgatcatatccggctttgccagagccatcttggcggggtcgaggacatagacatccttcaggcgctcatattccgccatatccaggaaccgctcctgctggatgcgggtcatatacagcacatccagttcgccgatgacctcctccaggctgcgtacctcccggtagtcctgatggctgggctccagcacttcggtgatgatgtgccgggggatctgcagttcctccggggagatgaagatgaagcgtaccccctcataccgggacagagccttgaccagcgagtgaacagtgcgtccgtacttgaggtcgccgcagagaccgatggtgaagcccgagagtttgcccttgagggagcggatggtcagcaggtcggtgagggtctgggtggggtgctgatgaccgccgtcaccggcattgatgatcggaacaggagaatacatcgaagccacccggggagcgccttccttattgtgacgcatggcaatgatgtcggcatagctgcccactacccggacggtatccgctacggtttcgcccttgctcaccgaggagctggatgcggaggagaagccctccaccttgccgcctagacggagcatagccgcctcaaagctcaggcgggtacgggtactgggctcatagaacagggtagccaggatcttgccgcggcagcattccgcataggcagcggggtcccggatgatgtcgtcagccaggttcagaacccggtcgatctcagctacactcaggtcggtggaatcaatcagatgacgcatagataagtttctcccttcgttttacggtgtttgcggcgggaaaataaaaatggcagacccaggttgtgcacagggactgccgtttgactgcttgagcggccgatgcttccccgcaagtgaagaaacatggcgttattttccctttttagcctctctgtgctagattaaaggttgttttgatttgtttcattatactcccagtttctgcccctgtcaatgccgacagaccagttccgggaattttgtgggactgcataaatcgaaagcggaaatttcatcagctgttgacactttatcaggcgaaagttatactgaaaacagacagaatctggatacaagcccaccgctgggccggtggggaaatgataaaggaggcaggatagtatgatccggtggctggaggaagagagcggcgagggacggtttgagagtgcctttttccgcaatgatgagaacgaaggagaactgatcgtttacgcagacagcagcaatcccgattacagggaatgctccgagcggtgtgtggaggcgttcaatgccctgcccgaagcggcagtccgggagatctgcgggcagcttgcggcgtgcgcggaggagggcggcctggacgaggcagacgggctttccgatccgcaggatattctgcggtactgctggtttgcggcgctgtatgtggatatggcaggagcggaggacgaagtgggctatgtcgtggagggcgaaggcgactggggcgagccggtgggatttgctgtgaagggcgaccgggtcacctatgtgggccccgattatctggaggccatggagaacccctactaatggttctgctgccctgatagatcgtttgcaaagtcagaaaaagaggaggcttggattatgaacattctgggatatggcattatggcatatttgtcgattatctatgaggtcttcaaagtgcttttttatgtgctgggaacactctgctttatcaagtacctgcaatcgggcaataagccccgcccaaaaatgctgcgggacggtgagcctgccgagccgcctgtggagccgtccgctgaataaacccaccgccctccggcactatgcggagggcggtttttgttgccgtccggggaaaactgtggtatggtaaggggaagaaagcaggtgactgaccctatgcagtatgaatccatcttccccgcccggttcctcgcccggcccaaccgtttcaccgccctctgccgactggaggacggcgccgacatcgtctgccatgtgcgcaacactgggcgctgtgccgagctgttccgtcccggctgccgggtatgggtgcagcacaatccctcccccacccgcaagaccgcctggaccctcatcactgtggacaaggacggggtgctggtgaatgtggattcgctggcgcccaataagctctttgccgaggcggcgacaaagggtattctggtgccggcctccctgagccgggtggaacagatgcgctccgaagtgaagctgggctcctcccggctggactggcagctcaccgggccggaggggcggctctggtgcgaggtcaagggcgtgacgctggaacaggacggcactgccctctttcccgatgcgcccaccctccgggggttgggccatgtggagaccctccggcggctgagatctgagggggattttgccatggcggccttcctggtgcagatggagggcattcgccggttccggcccaataccgcagcccagccggactttgcccgggcactccgggaggcccgggaagccggggtggagattgtctgctgcggctgccgggtcactcccgattcagtggagccggcctatctcataccggtggggctttgaaaaacaaaaaagaccgtgcgcttcccgttctatcggaaaacgcacggtcttttcatcattccggacaggagcgcacggtgcggcgcaggtaccaggcggcaaagaagtccagcacaaagcagcacaggcacagggtacagcacagggctccgaagagggaaatcctgccccggctccaaagcaggcggacagcgctgacggcataccaggaggaggtgagcaaaagcaggtagtcacagaacgccatgagcatcaccagcagcggagatacgatggtgaaaatcgggactgccatcaccaggatcagcacgccgcccagcaggaagattcccagatagaaggggatatgcgccagcttgacccacagggctgtttttgtcagagcagcggcatccccggcccggcggagctgtcctgcccggcagaaactgcacagatagaccggcacagtgagcagggtatagagggtcagaaaccgggaaaaggcatcggcatccggcagggaaaggctgatgagaatgagatagggccataccgccaggatgatgggctggtactgccagaaacggcgcatggggaaagcctcctttcaaagggtgaatcataccgcggcaaaaacagcccggcagaggccgtgacctccggcgggctgtttggaaatcaggggcaaatcacccggctgtgatggcagcagtcctggcgccgatgaaatcgatgagcgccctggggtccatctcgatctgcatgccgatcttaccggcactgaatacgatggtatccaggggaaggcagctctcgtccagcacggtgacaaactgctttttcatgccgatgggggagcagccgccccggatatagccggtgagcttgttgatgtccgccacatggatcatctccaccgacttttccccgacactgcgggcagccgctttgagatccagttcggctgccaccgggatcacgaatacatagtgttccctgctgtgtcccactgtcaccagggtcttgtagaccttttccaccggcagaccggtcttctgggcgacagtcacgccgtccacagcagtgccgtcattttcataggtatggaccatgtaggtcagttttgccttgtccagcgcacggatggcgttggtcttttccagtttttcctttgccatgagtcaggcttccttttttaatgagttagttcttgaggctctggagcggagcgggaatgtgtccgccccggttgatgaatacctccggcgaattgcggttgaccttgatcaccgggccatatcccagcagaccgccgaaggtgagggtctcgccctccttgcggcccacagccgggatcacacgcacagcggtggtcttggagttgaccatgccgatggcggcttcgtcggcgatgatgcccgagatgattgccggggtggtatcaccgggaatgatgatcatatccagccccaccgagcagaccgcggtcatggcctcgagcttttcaatggagagggcgccggtggtgacagcgtcgatcatgccggcatcctccgataccgggataaaggcgccggacaggccgccgacccggctggacgccatgacgccgcccttcttgactgcgtcattgagcatggcaagggtggcagtggtgccatgggcgccgcactgttccagacccatctcctcgaggatatgggccaccgagtcgcccaccgccggggtgggagccagggacagatccacaatgccgaagggcacgcccagacggcggctggcttcggtgcccaccagctgacccatacgggtgatcttgaaggcggtcttcttgatgatgtcggcaatctcgtcaatgggcagggtcttgtccaccttggcaagggcggcacgcacaacaccggggccggatacgcccacatggatgacacagtcgggttcacccacgccgtggaaggcacccgccatgaaggggttgtcctccggagcgttgcagaacaccaccagcttggcacagccgatgcactccttgtaggcagtgagctcggcggtctccttgacgatctctcccatgagcttgatggcgtccaggttgaggccggccttggtggagccgatgttcactgacgagcagacattttcggtttcatccatggcacggggaatggagcggatcagttccaggtcaccggcagagaaacccttgtgcaccagggcagaatagccgccgatgaagttgacgccgacggtatccgctgcccgctggagggccttggcatacttgaccggatcgccgccgctggcagccgccagcatggcgatgggagttaccgaaatacgcttgttgatgatgggaatgccataggtgcgttcgatgtcctcaccggttttcaccaggtcctttgccagacgggtgatcttgttgtagaccttttcacaggagcggtcgatgtcgctgtcagcgcagtccagcagcgaaatacccatggtgatggtacgcacatccagacagtcctcatcgatcatcttgatcgtttccagaatatcgtttacattcagcatggtaataagtcctcccggtcagatgcggtgcatcgaattgaaaatatcctcgtgcatgacatgaacaaccagacccacatccttggtcagggcattcagacggtcggacagttcaggcagcggacagctcagcttggaaacatccaccagcataaccatggcgaagatgtcgtcctcaaagacagactgggtcacatccaggatattggcattggtggcagcgcattctgtggcaacagtggcgacaatgcccaccatgtccttgcctacaacggtaattacagcacgcataaataaaggtcctccttgaaaagcggtgagatgtgtggcgaatatagaagatattgtaccattctgcaggaacgcggtcaagaactttcaaattcagttttccagctcccggaggagtgtccttgcgctcatatcagacggcaccgaaaagtccatggaagaaagaccgaagtcggtgattgccgccgcctccggagcgaccgaacgcttgaactgtccgcccacaaaccggcgcaggaaggtggcaagccaggtgcggagctgttcttcggtatagcggtcatcaaaggcattctctgcatagaagagcagctttttgggcgagaatccatattttacaaagtagtagagatagaagtcatgcacctcataatccccgaggatctcctcggttttctgggtgatggaaccgctttcatccggcggcagcagctcgggactgatgggggtgtccagaatatcccggagaatggcagtgagttccgcatcggtgctctcctctgccagcatggcaacaatccggcggatggcggtcttgggtactgtgacattgacattgtatcccgccagggcatcgccgccgaaggtgcaccagcccagtgcctcctcggtgaggtcgccggtacccactgcaatgccgccgatctggttgccgagatccagcaggatctgggtgcgctcccgggcctgggcattctcataggtgacatcgtgccggtccagtggatggccgatgtccgccaggtgctgccccaccgccgggacaatggaaatatccatggtggacatacccagcttccggggcagatccagggcgttctgatgggtgcggtcgctggtgccgaacccgggcatggtcaccgcgaggatatgatccggggacagacgcatgagctgggccgcccgatggcagaccagcagggccagggtggaatccaggccgcccgagatacctaccacagcccggtcgatgccggtattggaaaggcgggctgccagcgaatggctctggagttcgaaccactcccggagggtgcggcgttcggcttccggttccatgggcaggtagggggtggaggagaagctgcgcagggcatagtcatggggcacagccgggaagcggtaagctgccggagccggcgcggcgggcagggtatcccgggagcggcggacaatgtccagatcaatatcgtagcagagggaggcggactgaccgaactccgcctggacgcttacggtttcaccgtcttcggcgataaccgcaaagccccggtagcagagcggatgggagctgtccgacccggcgccgcagcagaggacagcggcacagcccagttcccggctcaggacgctgagagcctgttctgcccggtcagcgctgcccactctggcaggctcatagcagggcagcagcagacagtcgcagtccccggcaagggagccgtactgaagcgccttgccggcatcacagccggggagcacccgcagccgggcgccgcctgcctcaaagactgccgaggcaggcaggaagccctcggggagcggcccttcggggacggagggcggcagtacaaagcccagcagttctccctgccggagggcagccatggcggaaacggtcacaccgtggagcgaaaccggcagtcccacaaagaggagcgaaggcagttcccggagatcctctgccagacgggagagctcctggcggcagagatccagcatgaacccctgccggcgcagtgactgggcggaggggggcagcagaatatccgagggcagcaggatcacatccggggagtgggcgcctgcctttttgatctcctcggtgagatatttccggcagcccgcaggacttcccgggtccacccgtccggtgacggcggcaatacgaatcaggttcagcataatgatcgctcctttctcaaagcgggagggttaaattctgtcttttatcttaccacaaatcagttttgccggaaatggatacagcgtaaattttgggcacggaacaaaaactttttccggcagttttcccatgcaaaaaggcagggaaagatttccctgtctgattttatgcctcagagaatattcgtccgctggatgtgcggcacaacccatatcatggaagagaaaagccacttttcacgccactggttctatggtagaataagagcatgaaacggcgcagtcaatgcgtttgtaaggagttgaatcattcgctatgtatatcaatctgtttgacagccatgttcattcggacaattcccctgagggccgggatctggtgaccgctctctgctctgcggcggtggacaagggaatctcgggcatctgcatcaccgatgcctgcgatatggaggagtttgaggagcagaaatacggcaagcgtctgatgtattcctgctttgctgcccataaggcacaggatattttctcccagcagctcattgtcaccaacggtgtggagatgtgccagcccctggctgaccccgaccgggcagtacaggtgatcggtgagaaccggttcgactttgtgctgggctccctgcacaagacccggaaatacggcgatatgatgatgctcaactatgcccatccggcgctggatctgcaggatgtgttccgctcctattatgaggagctgctggaagtggtgcagtggggtcatttcgacagcctggcccatctgggctatccgctgcggtatctgaagccctataaccgcacggtggatctggcacagatcgacgatgtgtttgccgagatcatgaagagcctggtggctcagggcaaggcgctggaactcaataccggcggcctgcgcatggagatcgaagcctttaccccgtccaacaagtacctgcagatgtacaaggattacggcggtgagatgatcaccatcggttcggatgccgaatgctgcaacgacatcggctgtgacatccaggccggcctggaactgctcaagagcgtcggcttcaaatacttcactgtttacaagaaccgtcagccggttatgctgcggctgctctgatccgggaggaccccaatgagtgatacaaaaaagaagatcctggtgggcatgagcggcggtgtggacagctccgcggcggcgctgatcctccggaatcagggccatgaggtagcgggactcacctttgagctgtgggacagcgaggacggcacctgcggcacccagaacgatgtccgggacgccgccgaagtctgccgggtgctggggattccccactttgtggtggatttccgcaaggagttccgccagcaggtaatggagcgctttgtgcaggattaccgtcatggactcacccccaatccctgtgtggactgcaaccgtaccatcaagtttgccgcctttgccgataaggcgaaagaactgggctatgactatatcgccaccggtcactatggacgggtagactatgacccggcagacggacgctggcatctgaccatgggggacgatgacagcaaggaccagagctatgtgctgtggtcgctgacccaggagcagctttcccggatggtgctgcccctctatccctaccgcaaggaacagatccgggagatggcacggcaggccgggcttccggtctttgccaaaaaggacagccaggatatctgctttattcccgatggggattttgcctctttcctctgccgctataccggtgaggagccgcccaagggcagtttcatcgaccgggacggcaaggtgctgggcacccatgaggggatctggcggtacaccatcggacagcgccggggactgggcatcggcttcggacagcggatgttcgtctgcggcatcgacccggagcagaacacagtcaccctcacttccggcgagggactgttccggagcaccctcaccgccggggaagtgaatctcatcgaggtggaagaccttaccggaccggtacgggtcacagccaagatccgctatgcggcaaagccggcagaagccctgctcacccctctggcagacggacgggtgcaggtggtatttgatgagcctcagcgggccattaccccgggacagtcggtggtattctatcagggacgccgggtattcggcggcggcaagatcgaacgccccctgtaaaacaaaaaatcagcgtcccctgaccggcagcacggtgcgggggacgctttttttgtttggggcagaaaaaatccaccccgccggacggagtggagaaaggcattcaggcgaacagggacaggaatccgaatacgccgctggaggccagccacatgatgatgccgctggtgactacgcccagggagatggcacagaaggccggacggagcttcatctgcagcagggtggcgatgaggcagccggtccaggcgccggtgccgggcagggggatcgccacaaagaggtagagccccagcagttcatagctgcccagcttgccgatcttgcggttgccgatgtcgatgatcttctggaagaagtgtcccaccttgggccaggtggcgcaccagaacagcacccgccgggcaaagaccaccagaatgggcaccggcaggatattaccgaggaccgagatcaggtaggtctgccacatggggattccccaggccattcccagcgggatagcgccccggagctcgatgacgggcaccatcgaaagaaagaatagaaagagtttttttgtcagcattaaatgccagccctccttttcaggataaatgcccggtagaaccggtctgccacaaacaggattccccgcaggttcaccaggagcatggcaaggagtgtcagcgactcccaaagatacagatatttgtcattctgcatgagcagccaggactgaagccccagaagcagcgaattgagcagcagttttttcagatccaggtcgatgcggaacagccgccgggtatcgatggcccggataatgaagatgaatatatagctgatggcagtggcgcctgccgcgccgttgagcccgtagaccgggatcaggtagtagttgaggattacattgagaagtgcccccaggaaaatggtcaccatagccatgatattcttcttgctcgccatatagaaggaggcaaagtaggaggagaagcagctgaacaccaccgaaaccaccagcagcggggtgtactgccaggcttcaaagaaggcatcagacaccagcaggtgcatcagcggcttgatgagcagcagaataccgcccgccgccagaaagacgatggtctggtagcttttgaagatgttggagtagaactgttcccggtcatcgctctcccgctcgccgatggcagagagctgccaggcctgggtgaagatcgccgagatcaccgagataatggtgggcagcttgtaggccaccgaatagatgccgttctgggcctcacccatataataggtgacgaagaaccggtcggatacattggtgatgctccacatgatggtagctgggatcagcggcagcgaatagatgatcatctcccggaccgtttcccggcggatgcccttccaccagcgcatatagcggtagagccgggcggcgatccacagaaagaccatggataccacattggagaggacaaccgagaggatatatccgtacataccccatttcattaccaccaggaacagcacattgaagaacacagtggaaagggtattgaggataccattgaaggcaaagagccgcaccaggcccatggcccggacaaactgggccgatacgccctgcaaagccgcagccagcacatagatgtagatcagggcggtgtaatcggagatcatgtcgatttttttcatcaccggccagaagatcaggaagatgccgaagcccgccagcgatacccagatgccggtggaaaagacgtcccggcgcttgtaggaatgatccatgccgaagcggatcacaccgtcattgatggagacgatcaccagcggcagcagcatattggatacattcacgaccacatccatggcgccgtattccgctgtggtgagcaccgaggtatagaggggcatcaaaagaaataccagcagctttgaaccgaaggtacccagggcaaagatgatggtattggagatcagggtggtatatttatttctggcgtcggacatgagcctccgtccccctgtcagccgaaaaagttctctaagaatactataataccatttttctcggaagttatcaacaaagcgtaaattatgcacgaattggcagattgactttcggttcagcacgggataaaatggaattgcaaaagttttctgtattaaacagatgaagtgaggccgtaaaggaggtccttgtgatgaaactgcgttcgctgtgggcagcccttctggcagctgccctgttcctgaccggatgcgcgccgtccggttccccgtctgaaccggagaccagcggctatgatctgaccgggctcaccaatgaatatctggcgcccattgccatctccggcatcggggcagtgaactgggaagacccttccgaactcagcccggatcagctgctcagctactatgtagtctgggccatgccggtggagcgcaatcttgaggagcctgaaaaagttcccgccgaggagctggaacagaagctccaggaacggttcgatgtatcagcagagctgctgcgccagtccgaatattatgacccggagaccggcctgtataccccgggatatgtggggagttccgcccggtatgaggtgaccggagcccgggaagaagatggctgtctgctgctcgactatgaatattacagcccggcggatgacaagacggtgatccgccagggaacactgaccctggagaagtatggcgatggataccggtatctgtcctgtgtgaccgaaccggtgccgtcagaaccccagtcccagaccggtgactgatgcaacgcccagaggaggggaattctatgccaagagctctgattctgctgccattgatgcttgtgatccagggggcgatcctctacctgctgctgcggctggtgtggaggcttttccgccggtgggaccgtcaggacagggaagaccgtttctgatccgcaccgggaagcggtccccatacagggactggaattttatttgacttttagtgccgtccgttatacaataatcttgtagtgatcggacaagttctgtccggctgcgaaacttttttaagaaaaggaatgatttagaatgaagaagcaggtttctactccgaacgctcccgcagcaatcggcccgtactctcaggctattaaggctggcaacaccatttatgtatccggccagctccccatcgaccccaagaccggtgctttccccggcaatgacatcgcttctcagaccaagcagtctctggagaacatcaaggctattctggagtccgagggctacaccatggctgatatcgtaaagaccacctgcctgctggacagcatcgctgacttcggcgctatgaacgaagtatatgctaccttcttcgctgacgctgctcccgcaagagctgctttcgaagttggcaagctgcccaaggatgctctgatcgagatcgaggctgttgcttacaaggactaaccttgtgccgtttctgatattctaacgatagaataaccggatcgaccgcaaacgggcggcgggcttttgcccgtcgcctgtttttatatccggctgtataactaatatcaaaggagagtgtttttccaatgcgttatattgatatccgcagtgatacggtcactcagcccacacagaagatgcgggatgccatgtatactgctgtggtcggcgacgatgtaaaccgtgatgaccccactatgctggaactggaagaactggctgccaagctggtcggtaaggaagctgccatgtttgtaccgtcgggcaccatgggcaatcaggtttccatcatgacccatacccgccggggtgatgaggtcatctgcggcgaactgagccatatcgtgatccatgaagtaggtgcgccggctgtgctgtccggtgtgatggtgcgtaccatcaagactgccgattatctccgtccggaacagctcctgcctgcgatccgtcccgatgatatccacatgccccataccggtctggtggagatggaaaaccccaccgccatgggtcgggtggtgccgctggacatcatgcgtcagaattatgagctggctcatcagtatggtctgccggtgcatctggatggcgcacggctcttcaatgccgccactgccctgggctgtgatgttaaggagatcacccagtactgcgacagtgtgatgttctgcctgtccaagggtctgtgcgctccggtgggctccattgtagcgggcagcaaggagttcgtcgaccgtgcccgtaagaaccgcaagatgctcggcggtggtctgcggcaggctggtttcctggctgctgccggtatcgtggcactcaccgagatgaccggtcgtctgcaggaggaccatgacaacgcccggtatatggcagaagagcttgccaagatcccgggaatccatatggatctctccactgtggagatcagcatggtattcttcactgtggataaggatgctgactggatcgctgctctgcccgcccggatgctggaaaagggcatcaaggcatcgggcattgaggacggacagttccgctttgtcaccaaccatgatgtgacccgggaagatgtggatcatgtgattgcctgcatgaaggaattcatggctctgtaaccggatcagccgatatttttataaaaactcccctgccgggacactcaggcgggggagttttttcatgcggagggcgccgggtagggtacgggggaatggtaacaaaagattgtaacgaatttgcaataaaataggatacccctaccgggaacaggcaaaaatcagatagaaaattagcgaaaacgactaaaatagatagagatacggggtatattttattatcaaattttagtaaattacaaaattgtaacaaaataaagacaaaaaacgttgacaagtgagccctggcaggctataatgaaaaccagagatcgggaaggtcaactggagagggccgacccggctcgtatacaaacaattttaggaggaaatgcaaaatgaagaagacacttgctcttgttctggctgctctgatgacagctggtatgaccactgttgctttcgctgatgcttccaacaataacagcctggaagttactctggttgatgttaccgacggcaactatctgtacgttgacgctaacgacgatggtcgttttggtagcgctgatgataagttcaccaccaacaatggtactgagcatctgagcggtactatcgctattgccaagcccaccgctgacaatgttcccactagcgttgatctgtctgttgtaaagggcggtaagaaggttgctatcccgctgctggatgagaacggaaccaagattaccgagaaggatgatgttcgccgcactaaggttaaggccgagtggaaggttggcgatctggaagagaagcctgagatcgagttcgttaagatcggcgatgagtatgtttacgctgtaaccttcactctgcccgaggctgctgagaccaagaccactgatctggctggttctatctctgtatatgagagcagctctcagctgaaggatgactacaatgataaggaactggttaccctgaactttggttctgagtatggctacaaggttgaggaattcgacaatgttgctgactggaacaaggttgaggttgtagacttcgatggtatcgaagatgttgagaccatgtcctttggcgatgacttcgagttcgaggttgatctggctggtcagggcaagctgaacctgaagtggaacagtgacttcaacaaggaattcgctgctatgtatgattatgctaacatcgacttcatcaactttgttaaggagccttccttcaacaagaacggtgttgcttacatctacgctgacgaggatgcttacatctacgaagtaactgctgacggtgctaaggaaatcgctggcctgaagtgggacgaggactacgaggcctggaccttcaagaccagaactctgaagagctacgctatctctgatgtagagctggacgagaagaccgttactgaggacgattcttccagcaccacagacggcggcaaggagaaccccgacactggtagataaatcctgacggatttatccacacaagttcaaaggtttgactttctgtctgaccaagttactatgagcggaagctcatttaataaaggcgaagctgtttctccggacagcttcgcctttttatttagcgccggcctgctttgccagagccggcgttttttcttttccgttaaatggaactgcatgaaacaaatggaattgaattatatatggtactgcgatgtcgattgttgttactattttgtaatttatgaagaaattccgcggagctttaaggctcaattaaattacaatttgccttaactgaaccttaaattacagatagtttactaaattctaccttaaatgccccacaactaatagaaaataaggaaattcctgtgcgataaatgttaataaattacgaaatgattacaaataaacaacaattaccattgcattttgggattgtttcgtgtattatttggagcgtagggaatcacctatgaactaatttgaaggaggcaactcaactatgaagaagatttttgcagcaaccctggctgccgttatgacagtcagcctgacatcggtagcttttgccgaaacagaggcaaagggctttgtcctgggctataaggaaggcactactcctggtactggtaccaccgtttatgccgatcaggatgatgacggcaactacgatgaaaccactctggaagccctgggcaccctggaggctggcactaagatctatgttcccattctgctgtggaatgatgacgataccagcggtactcccggtaccgttgaaagcggtgagctggttcagcccacaagcgatgacatcaagggctacaaggtctatgcagactggaaggtcggcgatgtagatgatgatccggagatcaagtatgtgaagttccagaaggaaggcggcacctatggctacggctacgctgcagtagtttacattcctgagaccacttctgccaaggactttgacctggctggtactctggctattgccaagaccagctccaaggctgatgatgctatcgatcagaacaagttcgactttggcatcacctacgtttccagcgctaagatctatgaggacttcgatggcactgagactctggaggacggcggcggcatcgtagagttcgctgacgactgcggtgagatcgacatcgagttcggcgaggaggcactgttcacagtcaatgccaacggccagggcgacctgaacctgaagtacaacactgattacaacagcgactttgctgcaatgtatgactacgccaacatcgacttcctgaacttccctggtgagccttccttcaaccgcaacggtacactgtacatctatgcggatgaggacacctacctgtacgaagtaactgctgacggcgccaaggagctggatgcagtttgggacgaggactacgaggcctggaagctgaccacccgtactctgaccagctatgctgtatcggatgtagagctggatgtcaagaccaccactgatgaggacactgacaccgatgaggataccagcaccgacactggttctgactccagcaccgataccagcgagaagccgaaccccgatactggtcggtaaatcgcagacgatttaccgacgcggcga

SEQ ID NO: 988 - DNA, 23283 bp, Unknown
  16S sequences of unknown bacteria
attatatttatcctataccaaatatactgactttattttagcacgttcctgttttatttacaaccaaacgacatatgcattatgtattttgcacatttgtcatctttgattccgtgattttttatgcagtttcacataatattaaaattttgttcataatttattcataattgattggtatactttagataaatcaaaggaaacagacaattaacaaacgacatacagataatttttttcataatagccccggcatccgtattgccggggcactcctcatttttacagtatattttaacagggtttatatatgggtgggaacacaaaagacagcgctgtcagttttacctgatctgcgctgtcttttgatctacagccccggatctccttcgatccgcttcattgcttcattcaatgtcatcatcttggcatccagccgggagatgatcgatgagcactcctgcagctcccgttcaaaataatccggtgcatttccttcatatttgtagtagatcttatgctccagacttgcccagaaatccatggccatggttcggatctgaagttctactttggttggaaccttggcgtctcctaatgctaccggaatggacaaaagcatatgataactcttgtagccgctttccttgggctggctgatataatccttaatgctgatcacttccagattatcctgccgtgcgatcatatctgccacaaaatagatttctgagaaaaacgaacaggtaatgcggattcctgcaatatcattgacatactcgatcatatcctcaatattcagattatgtccgtttttccgcagctttttcataatgctttccggcgtcttcaggcggctcttcacatactcgatcggattgtatgagtgcatatggttcagttcactgttcaacacctcaatccggcttcccatctgcgtcaacgctgactgatagataaacatggctgtctcgaacccatctctgtccgagcgttctcttatgtattcctgaatactcatttctactgccatattatgatttctcccctgatattattttccttctcttaccgtctcacaatactttattatatcatatgttatctgctttttttgtcattttttgtaagttattcataaatttttcattttatcaatggaattttattagttattcttatgaaaatcatttctttactttccagccagaaacccttatactgaaaaacagaacgctgagggcagcacgcaggaggacatatatgtttcgcgtatggggaaaaatttttaaagataatcatatgttaagagatactgttgtctgtgatgacagtgatgatacaagaactcataaggttatgcgggcattggaagagatgtgttacacctttgaccttgggaagcctatctggctggagtccaacatccgggattttcaacgtcacgccaagacccggtttcaccaggacagttttgtggaagaaattgatttcgactatctggaatttcaggtaattgaagaagattaacctgagccctgtcaagaaaaggactgcaatgcagtccttttcttatacattcatttacctattgattcaaaaagctctggatcagttcccagatggaagatacgaagttcgtaatgaagtttcctactttttccttatccacagtgattcccagagattccagcttattataaagctcctttgcctgcttcgccagcttgtccggatcaatatccagcttgctcagcttcaaaagcagatctacgatctgggatacctgctcatctgtcagagtaattcccatctcctcagctgcctgacgcaccagatctgccagcttgtccgggtcatccagatggttctctgcgatctgctgcttcagatatgcgatcagatcagagatcttctcggaatccagatcctcactaagctgaccagtcaacaccagctcatcagccgcagtctccagcacagaatcgctaacggttgtaccgctgtaagtctcatacgcttttaccgcaccaacaagtgctgccgtaccactcataggacttggtgctgccacgatcaccttggcatcttccacacctgcagtcagcaacgcattccgatacatggagatcgtgcagtagttaatgttatgcgtttctacgttgagtcctgcaccactctcctgcgggatcagcagtacagaagacagagaatgagttccaaccaccgatgctcccagagatgcatccagatactgatgctccatatcattggttatatagatcgtctgataagaagcagcctgttctgccgtgatccccatctgtgcgtagacttctgctttctgtgaatctgacagattcgcccccagcgccagcacaccagtctcagctgcggacacctgcatacatcctgccatcagaagcatggacatcagcagcattccaaaccattttctcatgtttacctcctgtttcttcgttcaatggtatcacaccaatgttcgatatcatgtaagacctgttccttgtcaaggtcattgagcagttcatgtcttgcatgcgggtaaagcatgcaggtgacattcttcatacctgctctttttaacattttttcaaaacgacggacaccttttccattgccacctaccggatcttcatctcctgacagaatcagaatcggcagatcccgcggcatcttcaccacccgtcttgaatccgttgcttcttcgatcgtacgcagaagcgcctcgtaagcattcaatgtaaatccaaaattcatcagcggatcctgaagtgtgtggatcagcacctgcggatcccggctgacccagcttcctgtcttccggttatccgggaatttccggacaaaccctgaacaggtcatctgatccagaaacttgctatgccctttgggaccgatccgcatcatatcaagatatgtgacaagaagccctgtcttcaccagcagcggattctgctggccagtccccataatcactgctccatctacccggttgccatgatagatcagatatctgcgcaccagataagatcccatgctgtgtcccagcataatataaggaaccttcggtgcataggagactgccatacgacggatctgttccatatcccgaagccacagaactgctccctgttctcctacatacccaagttcttcggagtctttcacggaatctccatgtccaagatgatcgtgtccgatcacaaagtaaccattctctgccatggccctggcaaactcatcatatctctcaatatattccagcattccgtgtacaacctggatcacacccttgtaagccttatctgtattgtaccagcggaaaccgtgtatcatatgaattccatctactgaatcaacataaaattcttcccttgttaccattctcttcccttcatttctgcatgttttacctaaaaagtatatcacacattttccgtgaaaagacggacttcacagaattttaaggattctttagctttttataactgtgtggttacaaaaatatcgtaaatagccttgatcgctttttcaaaatcttcgttacgtacaccgacaataacgttccactcactggatccctggtcgatcatctttacgttcacattggcatgtgccagcgctgcgaagatacgtgcagccgttccacgattggatttcatggcacgtcctacaactgctaccagtgccagatcaccttctacttccagcacatccggatgaacagctctctgaatgccagccagcactttctgctcatgctcttcgaactcgtcctggtgaacaatgatactcatagtatcgatacccgacggcatatgttcaaaagaaatgccctgtttttcaaactcttccagaactttgcggccaaagccgatctcggagttcatcatatctttttcaatattgacagctacaaagccttttttacctgcaataccagtaatggtatagaccggtttgtggcaggtgcttgccacgatcatggttcctttatcttccggcttgttggtattacggatgttgatcggaatacccgctttgcgtaccgggaagatcgcatcctcatgaagaacagtagctcccatataggaaagctcacgaagctcacggtatgtaattacatcaatggtctccgggttctcgatcagacgcgggtcggtcaccagaaatcctgatacatctgtccagttctcatagagatctgcttttactgcttttgcaacgatggaaccggtaatatcagatccacctctggaaaatgtcttgatcttgccatctgcataagcaccatagaatcccggaataactgccttttccagctctgcaagctttttctccatcagcttgttagtggtgtctgcgtcaaattcaccgtgtttatcaaagcggatcacctctgcggaatccacaaacgggaatcccaggtaatttgccataataatgccattcaagtactcaccacgggatgctgcataatcacttcctgctttttcctcaaactgctttgcgatcacttcaaattcatgatccagtgaaagtttcagattcagaccgccgatgatctcattgtagcgagccttgatctgcttgagctgaccgctgaaatcctcgccgtttgctgcagaataatagcagcgatacagcatatccgtcaccttcgtatctccgttgaaacgttttccaggcgcggacggtaccacatagcgacgagtctcatctgcacggataatatcgccaaccttctggaactgacctgcgcttgccagagagcttcctccaaattttacaacttttttcatcactctatctcctcgtttgtttatcaatttacgcacgactatcttttgattatatgtgcaatatcattggaaaacaactgttttttgcaaaaaacgccctgttttccatgattttctacactttgacaataccttttcttcgcagcgcaggcgcacattgccggatacaagatcctccagttcaatgcagtcgtaaaatccaatattcatgccagacatctgtatgagcgcatcggcttccatcttctgggaactgttccaggcggcttccgtctgaagagttgggaatatgatgatatttgtctgtattatatagaagtgtaaagcaaaaacttattttaaccaaaagggatgctgtctggatttttcctggtagcatccctttatttctatcataatcttatctctttgtcatctgcaagaacttaccaactgctttacaaactccgtggccggattctgcagaatctcttcaggagctgcatactgttcaatctttccctgatcaagaatcaacacacggcttccaagcttcaatgcctcttcaatatcatgagtgacaaagaggattgtgattccacggtcttcatgaatccgacggatctcctgctgaagctgtccgcgggtgatctcatccacagccccaaaaggttcatccatcagaaggatctccggtctcgctgccagtgctctggcaattccgacacgctgacgctgtccaccggacaacgttcttggataacgacctgcaagtattggatccagtcccacctgcaccagcagttcttccgccagcttccgacgattcttccccttccattggtccataccggaaatagacggcacataggcaatatttttctctacggtcatatgcggaaacaatcccacactttgaatagcatagccgatccgacgccgcagggcaatgggatctgtctgcgccacgtcctgtccctgaaccatcacacacccctgatccggcgtgatcagacgattgatcagacggagaagtgtggttttgccacagccggagcgaccgatgacagtcacaaactctcccgcctcaatactcaacgaaagatcccgaagaaccggctgaccggcaaatgcttttgaaatatgctcaaactgaatgatcggctgtcccatcattcttcctccagtaatcctttctctgtcaggtacgcacgagctacatcctgctcatcttttccttctacttccacctgatagttaagctgtgccatctcggtatcactcaagatgccatccatctgcataagtacctctttcagtcccgggaaacgctccagcgcatcatttcttacaacggtagagcaaaaatagtttacctgaagatgtttatcatcctccagtgtcactacgttgttgtccggattggcaagctgtgcatctgtagtaaatgcattggtcacatcgatatctccgctggcaagcgcctgatatttcagtccgatatcaatgtccataaccttcttgaagttcagtccataagtctcgcagagaatcgggaatccatcctgtctctcgatataatccgggtttccgccaaaggtcagatcccccgccactgctgccagatcgctggtagtcttcaaattgtatttgtcagccacatcaccgcggacagccacggtaaaggtattgttaaatccatattttccgatccaggtcatgtcgaagttctcttcgtattctttcttaagatcttcaaacattgcatcatcatccacaccttctgcctcatgcttcagcaccagcacccatccgctggaagtgtactccggataaagatcaaactcaccgctctccatggcaggctgaatattattggttccaccacccacgccttttgtgatctcagtcttgtatcctgcctgctcgataagcatggaaagcatctctcctaagataaactgttcagtcatgggcttagtcgcaatatgaacgactcctgcatctgcagttccggttgtagatgcatctgtagtctcagttacggactctatattctcggctaccgtctcatcggttttattgttggttgcacagccagtcagtgaagcaatcataaccaccatcagtcctgctgcaagtaaacgtttatactgtttcattttttcagcttcctttcttcttttcatattgttccaatgccccaagggcaagatcacagatgatcgccagcaatgcgatcagaatacttccagctgctgtcatagctggattatagatcgtgattccgcggtagatcgccacaccaagacctcctgctcccacaaaagaagcaattccggccacagagatggtcataactaccatatttctcacacctgccacaatcacgcctgccgccataggcaatttcactcgcagaagcgtctgtaattttgtgcttcccattcccacagccgcctcgatgatatcaggatccaacgaggtcaatccggcataggtatttcgcaccatgggcatgatgccataaagcaccagcgcaatgactgcagttcggtttccgattcctgtaaatggaatcaggattcccagcagggaaatagacgggatcgtgtagagcacattgcagactcccatgatcggcgatgcgatccgctgatgttccgagatcagaacaccgaccagcagcccgatggtcccggacaacacaatagccgtcagtgccagtgcgatatgtcccagcagaagttccgcgaaccagtctgcccgctccacatataaagttaagatttctttgatcacgctcatggcatcacttatgcaggcgttttaccgcatctgccgggcaaacctttacgcacagaccacattgcaggcagtgattccatgcgatcgtatatggctgaccttctgtaatgcacttctgcggacaggctgctgcacaacttccgcatccgatacaattttcagtgatctcaaagccattatgttcctcttcatctccaccataggaaaatgtctcccggctgattggataattcagcagatcaaaccattcgccatggccttcataaatatgaaatgcatccagaatatagcgactctcgcccggatatacctcattcatgcccgggttctgttcaaatactttatctacccattttttatctacgatcttcagcttaccattaaatttcaaggactggcaatccggacacatggctgccaatacaatctctccgctctccaccagctgtttataaaatggcttacctttagatgtcactatgtacatgccatcatcttctgccagcatcacattaatgatacgggcctgcggatgtccttcttcatctactgtcgctgcggtcgcaatctttactttccggaataaatcaatgtatttacgtgctttctcattcattttgcttttcctttctcagctcttccaagctgttttcatagacatctgccagtgtccatttactaagttctacttcaaagttcttctgaatctcttccagtgccccatcaaggctcttgtgaatcgttctgccgattggacagagaagatttggattctcatggaaacggaacagcacttcctcgctgttggtctccactgctttataaatatccagaaacgaaatatctgtgagctttttctccaacgtgacaccgcccggtccacgcttaatatcaatcagccctgcttcctttaactgtcccataatattacggatgatcaccgggttacttccgatacttccagcaaggaaatcgctggtcaccttctggctctctgaaaaatacgccactgcagtcagcagatgaacggcaatggtaaattttgttgaaatctgcacaaaaacctccttcgcataatattcatgaatgcattcttgttctcttcgcgttgtaatatatcacattacaattatagttgtcaacagttttattacatcaaaacgtaaaaaacagaattccagtgagtattttagatttgctgagtgttctgagttttgtttggcttgcttcagtgccggatacgcatttggtaaagataaaattgcaccatccacgaaaatgaactgggctggtgcaataagatttcttagatatgtggttctgggaatgctataacatcatttggcgtgcaatcaagaaagaagtcgatactggaaaatatttttctttttcatggttacccataagggactataatctatgattggaattaccaccttatgggttcattttttaacagtaatagttgatgtaaaacaaacattttgttataatacacacatggatgctaccagaaacggtaggcggtttgtccctcgcttcagagggcattgtgaccctctaagtatacatatgaccttatgttaaggatcaaatacaaaggaggggatgccaatgagtattgcagatttacttagcgtactgagctttggcttggcttgctttagtatcggatatgcattcggtaaagataaaagcacaaaaaaataaccgcccggcctctcaaactgtgcggttattttttaactaacctttgagggacaaaccgtctatcggtagcaccctttctaattgttatattagcacacagttctctatctgtcaatttttccacgaatcctatattatgtacattctagcgtatcctttttctttgaaagcaacaaaatccccaatagctgcaactattggggattttgttgtccttacggactactcactactttttgcctacacatatattagcatatgcataagacaatttcaagtgttccatttttttatttttctatacaggctccagtattttcatttacttttcttgctgtattagacaacagatacgctatcaccgcaacataatctctcagagagcaaaaaaagaccggaacccttattatctcaaggattccggcgcccctgccaaggagtcgatgcgacaggatttgaacctgcgacctctgcgtcccgaacgcagcgctctaccaagctgagccacgcatcgatgtgttttgtttttgtatcgttcgcatcgaactcgtttagtatatcgcaccttttcacttttgtcaacaataaatttcaaaattttttaatttttttgagagcgcaaaatatattattttacgccctcaaaatcttctgtttatgccttgataatttctgtatcttctccattggaggcaatcagtttcttataccagtagaaagattgtttcctataccgtttcatcgtgccttcaccggcatcatttctgtccacatagataaaaccatatctcttcgacatctgaccggaaccattagacaccagatctatcggtccccaccatgcatagccaaacagtttcactccatttctgattgcatttctcatggcagtcacatgttctttcaaatactccattctataagtatcatttaccgttccgtttaccagttcttcttttaatcccagtccattttctgcgataaaaataggaacctgatagcgctcatacagatccaccaatgccagatacaatccatccggatcaatcgaccatcctgacggtgtgagctttaagtatggatttgttttcccagtatttacaatattagaatctccacggtaggactgatctccttctacttccttatcagaggtattcgtctctttctgaacagattcaatataatccttggaagcaattcttgaacgataataagtaaagctcaggaaatcaaccggatattttttgatgatctccatatcttcatcggtatattcgatttcgatgtcattgtccttgaagtattcccatgcataacccggatattcgcctcgcacctgaacatcagagaagaaataaccacgctgtttttccttatagacaaccaatgaatcttttggatcacagctcatcggataaatggttttgtactcaataaccgatcctatcttagcctccggatcaatttcatgcaccagttttactgccagtgagcttgctacaaactgatgatgggaggcctggtagatttcccgcaaagtatctgtcttcggatccattcctgcagtcatccactccattttgtgaatattatttccaatctcattaaaggtcagccagtacttaacgatgcctttccagcgggtcaccattgtttttacaaattttgtgtaaaaattaatcattctccggtctttccatccaccatacttatcagcaagatgaaggggcatctcataatgagaaatggttaccataacttccattccgtgttttctgcactcttcaaatactttatcgtaaaattccagtcctttctcatttggctctgtctcttcacctgtcggatagattcttgtccaggcaacacttgtacgatataccttgaatcccatttctccgaattctgcaatatcttctttataatgatggtaaaaatcaatcccctcatgtgtcggatagtatttggcatttctatccggatatccgaatactccatgaggctgtacatctgctacggacggaagttttccatcctccatataagccccttcatactgattggcggctgttgctcctccccacagaaatccttccgggaatccttccggaacctttacatttttactgcttttcatgtctgttctcctccaattataaagttttactgatacgtcgctatgggatcttttccccgtcttacataaccgctctgtataatattcatttctcgatccaaccccggaaacaataccataatcgtcagatcaagatcttcatcatgcagatatcgcggatcaaagctgataatcttatcccctggtctcacatggcttccctgctccacatattttgtgaatccttttcctttcagtcggacagtatcaattccgatatgtacaagaatctcaactccatctgtgttggtaattccaaatgcatgcagagtcggatacatcatcgtaattgttccttcacacggagcgacaataagttcattctgcggatctattgccgccccatcacccagcattttctgtgcaaatgccgggtctgctaccttttctaattttttcaatcttccatcaaccactgaataaatttcatttcccttccattcagtttttttcttgaaaaaatttaacattacagttcctcaccatctttatacaaaataaatgttgctacaaacgaaactatcagtgatgctgcaacacctgcaaggatcgcgccgatcgtctgttcaaatattacaactcccagaatacttgaatatcccatggaaaatgcttttgcacccataacaccggctacgccacctcccacaaggccgcctgctacaacacctaccatcggggttttatatctcaggtttacaccatacagtgcaggctcggatacaccagaaagaagtgcaccgattccagcagagattgcagtagttctaagatccccattcttcgttttcagtgccactgcaaagcaggagccaccttcagaaatattgtgaagaatccatccaggtctgaacacattatcgtaaccagttgcagtgaaaagttctgtcataggtgctaccatcaacatgtttacaccaagcataacaaggaacggatgagctgctgcaataattccaggtgcaagaccgccaacatgtgcttcgatccaggtaacgccaacaacaatccagcttcctactaccacacctgcaggtcctaagatcagaattgtaatcggatatccaatcaggaacacacacagtggagcaaatacagatctgagtacacccggaattactttatagaaaaatctctccagatatgcacagagaattgcacagaatatcgccggaagcagggaattggagtaactgatcaattttaccggaagtcccagcatcgtcaccgcttctccagccgataccatggctgtaaaatcaggatacaaaagtgctgctgaaatagtgattgcaaataccggattcgacttcaatactctcgatgctccataagcaatcaaaatcggcatgaaataaaatggagcctgagatacaaagttaaacaactgatatgtggtagatgcgcttgcatccgcattaaaataagagatcaacgacagcacaactctaagcataccagctccatacagaacggtaataaatggtgtcaatgatgcggacatgaactgaatacatttgtcaaaataatatttcatattctttttctcatcactatttttcaattctaaatcttctacatgattttcctggacttcttctccttcgtccagattgtaattcttcaggattgcatcatataccggaaacaggttttctccaagaattacctgaaactgtccagagccatagacagatcccagaacaccctgcagctgtcttagttctttttcgtttgcaagtgagcggtcttttaacacaaatctaagcctcgtagcacaatgagatactgtgtgaatgttctctgtcccgccaactttaccgataatttctgctgccaatttttcataatcaatctttgccataacaatctcctttctggctggttttcttttgttccacagttcgcaagacatgaaccaataaatatagcttttcatcttctgttggaacataatcataagtttccgaaacatactctgctattttttcaacacattggcttgctgcttcattttgattctgaagacttttgtaaatggaatccggaatattatctgtccgggttttcctgtcaaataaaatacctctcataaagaatttcaaatgaataatgaaccttccgtaatccatggattcctcatctaatttcagccccaaagtcttttctacaatagaaatgatctgcccgactcctttcataatctgtaaagaatcgtgattatttctgttttctgttgctgagatcaggtgaaatgcaatagatgctgcttcttcttttgcaagttccacatggagagtttcattgatcagtttaattgccttttttcctaccgcatactcttcccggtaaaatcttctcacttcttcatttaccagaaccggaagggaaaatccaaccttatactgattgatactaaaattaatatgatcagccaaagctactacaagattcacattatacttgctgtttagatcttcctgtgccacatcaataatcttctgcgtcagttcaatgatctcatatggaatctcctccaatgtatgaaacaggtaatttgaactgttcataagaagatatgtctttgcaacttcatgaggaagaatattatcgtcctggcattttcgatatcccagaccttttccaatagcaactatttcctgtccttttccgttctcagcaatcacaatgttgttattaatgactcgcttcacagttaaattcttttcaaacatagcactgctaatctacacctcccttctgaacacaaaaaaagcaaattccaaataatcaactgtttctcacaattgcatttagaatttgccttaataactctgattaagtaacaagcctagtatgttttaatatggataaagtatatattattttacctaatctgtcaatactttttttgatttttccgtcaaaatatacaactattcctctttactatagctggtccagtagtaatagaagatatgatctttaataatataatatggcacgccgcctgcttccagattggtgatcagggacggcacaggagcccaggtacggaagaacaggcaatcgccgacgttgctggttccgtttacaacagcctgtgctgcattccagcaggattcggtgacaatatttgggatatcatcatcctgctccgcctgcaggaccagatcaaatcttccggagcctgccggttcaaactgtctggactgacgcagtacactctccagagaattgggatacaatgcacttcgtacacggttcataattacatagccaacagccagctggccttcgcttccctggttgcctgcctcacagtagatcatggtcgcaagaagaagcatctcataatcacttaatgaaatctctccacgggaaatcttcgggtcaccggcaatgatggtcaccccttccatatcagccgccgcttcctgagcagccttgatccgggccgctttctcctccgctgctgctttcgcgatcaattcattcaaaagctgtgtcttttgcttcaccagctcattcatatcactgatctcgccctctttctgcgcgatcatatcattgtaactgctgagcttggagcccgctgctttctgctgagaagctacttgctgcttcttcttttccgtctcctgcttcatcagatccagagcctctttttcatcggacagctgggcatactgttcctccagcgcagccttactctcctgaaaatcctgcaggcgctgcctgtcatagctcatcacatctgccgagaattccatctggttcagcatttctgacataccgccagacagtgctgccgtcagatacaatgtcacggaagctgccatagaatcctgtccattctcgtacatgtactgaattctcttcttcatatcttcatattgcttatcaagctccgcctgagccgcttctacttccgcctgcttattttcaacctcagcttctttatctttaatatcattattcaacacagaaatctgttcattcaggcttcctgtctgcttttccagattcttaagataactctgtgtctccgcctttgcattattcagatcattctttgccttctctgcatcactcttcgctttttcggcgtcttccttttcctttttggtctgatcgatctgattctgcgtctcctcgctgactgcgtaagcaatgcaggtcgaagagcccacgaccagcgcaagcagcatacacactattcttttgctcatggttggcagcagcctcttcttcatcgtaacatttcctcttctacttaatcccagtcgtaatttctcagatgtccggtcagttccatattgggaaatccgttctgacgcagtgcctcataaactacgattgccacagagtttgacaggttcagcgaacgggttcccggaagcatgggaattctcatggaagtttccttattgtcatgcaggatctcctccgggattccagcactctcttttccaaacatcagataacaatccggttcaaaatgaacctccgtataagctctcggtcctttggtcgttgccatatagatctttgctccaggattcttctccagaaactcttcataatcagcatatctggtcacatccagctgatcccagtaatccattccggcacgtcgtaattctttttctccaaggcgaaatcccagcggttcgatcagatggagtcttgtacctgttgccatacaggtacgaccaatatttcctgtatttgccggaatctccggctcataaagcactacattcaaagccatgttatttatccttttgttcttctctcagacggtcaataaatttctgcattcttcccagtgcctctttcagattctccagggagtatgcataggaaatacgcaagaacccttctccgcaatctccgaatgcagttcctggaaccactgccaccttctcttccatcagaaaacgagaagcgaattcttcagaagtcatcccaaactctttgatacacgggaaaatataaaatgcgccataaggctcaaagcactccagtcccatctctttgaaggcatgtaccagataccgtcttctctggttgtaagcttctctcatcattgccacatcgtcgtcaccgttccgaagtgcttctactgccgcatactggctggtggtcggcgcacacatgatcgcatactgatgaagcttcgtcatctgctcaatgatctttctcggaccacaggcataaccaagtctccagccagtcatggcataagccttggaaaatccattgatcaggatggtgcgttcctgcatgtcaggaatggatgcaatactgacatggtcttctttataggttaactcactgtagatctcatcagacaatacatacaggtctttctcaataatcacctttgcaatcgcttccagatctttctgctccatgattgcgccggtcggattgttcgggaacggcaataccagcagttttgtcttgtctgtaatatgttccagtagctcttccggtgtcagacggaactcattttccgctttcagttcaatgatcaccggtttaccgcctgccataatggtacacggttcataggacacataactcggctgcgggatcaggacttcctcgcctggattcagcatcacacgcatagccatatcgatggcttcactgccgcctacagtcaccagaatctcatgtctgtcatcatagtccacatgaactctgcgtcggagataattggcgatctcctcttttaactccttcaaacctgcattggatgtataaaaggtacggcctctctccagagagtagataccctcatcgcggatatgccacggtgtatcaaagtccggctcgccaactcccagagaaatcgcatccttcatctcactgaccagatcaaaaaatttacggattcctgaaggtttaatatttacaatcgtatcagctaacggatttctcatggggtcaccaacatcctttcatctttggtcggatttaccatgacagaaccatgatctttatattttttcagaatgaaatgagtcgctgtacttaagacggactcctgggtagacagcttctcagatacgaactgagccacaccgcgcatggtctttccttcgatcataaccataaagtcaaatccaccagagatcaggtagacacagtctacctccgggtagttgtagatacgctcagcaatcttatcaaatccaagtcctctctgtggagttacttttacctcgatcagtgcggtcaccttctcagaactggtcttatcccagtcgatcagcgtgtgatatccacagatcacaccttctttttccatctgtgcgatctcatttgcaatagttgcctcgtccgttcccagcataatagccagatcttttaaatctacacggctgttgcgctcaatatatgtcaaaatcttctctctcattttaagcccctctctctttgatcattcagaatcacatgtccacggctctgaatgattactcatatatcttatataattcatcggtctttggtctttccaggaaggcagtatcctccccgttcaggatttttttcgcttttccttccacaaaacgaccgatcacggccgcatgaatcccttctttttccagctctctgaccagcccgtgtccgtcgggcgcagccatcagcatacaaccactggaaatcagcagatatggattcagtcgaaaagcttcgcataattctacggtttcctgacggatgggaatggatttcagatccacttccagaccgatgccggatgcctctgccatctcccagagtgctccgtagataccgccttctgtcacatcatgcatggcgctgacgccatgcttcaccgcgactgcagcctccggaactactgacaggtattgatcaaaggattttaccgtctccacaaaagatctggaaaaacggttcagcagctcctcttctttttctctggcaacaatagaagttccctcgataccgatccatttcgttgcaatgatatcatcgcccacatgggctcccccagtagtcaccagtttgtctttctgaacttttccaacgcctgtcacagagatgaccggctgattcacgaccgctgtgatctccgtatgtccgcccataatctgaatattcagcttaccacaagcttcatccacttcctgcatcagggtacggatcagcggttcgtccgcgcttggcggcagcaacacagtcagcagcattgccaccggctctgcaccggcacttgccaggtcatttgccgtgatctggactgcaagtgaccccatatttttctctgtaccggtgatcgggtctgtggaaaatacgaacacttctccaggtgccagttccatagccgcacagtcctcacccacgccggctcctaccagtacctccggtctcttcgtatgaatctgtttgaaaatggagcgtttcagtacgctctccggtactttaccaatttccatattacgatctcctattgtgcaggtactgccgctgctatattggcatctgccagagcttcatcctgtgcggcaatcgctgcacgcagattctccgataaagtcggatctcctgctgttccgtaagtcaccactcgattagtgcctttataagtactcttattaacttttatacggtctgtctccacaccatttactttcacgatcttataaagctctgccacatatccggagcttcccttgctgctgaccgccttgtatccgattccctgtccggcatcttcctgaagaatcgttgtcgccggggtctcgctgaccatctgactctcaaacgaaatggtccggttcttgtcacgggtctcttttccgtaaatattaaatgtgatcttcttatcagatgtggtatatccctcaatatagatcgggtattctgtcgaattcacaaacttaaaatccttataggttccggcaattgccgcatcttctgacagatctacataatgaaccgtcatggaatgcggagacctctctgtcacattcagttctgcacgcagaacagcattatacagagtcgtggacacctgacagataccaccgcccatactgtcaacaacttcaccgttcagataggaacctgccatagcataaccattagcctcggtaaatggtgaaactgtctcataagcagagaactcttctcccggatacagaacggttccattgatatgactggcaccgctgctcacatttttacaacgattagaacctgaagtagaaaagctggtcgtaaagcttcccagcagatctttaatatttgccagttcttctgcgcttccctccggttctgtgacctgagtctcgagattcagcacttccgtattgtcagaagtccagctgttttccagataatcagagatggttctgactgcggaatccacattcagttccagtccttctgttcctgccacaaaattaaaagctccgttttcacgggtcagggatgcattctgtgctttcttgtcgtattttgtgcagttgttctccacataggtgcggaccgtatcctcattagtctgccagctcaacggaaatgtcttgccagaatgctgcagatccttctgatctttgtaacgcttcacaatatttcctgcatggccgactccgatggcctcatccaccagatcctcattgtcaaatgttacgccaagatcagacagctttgcttctatcacattgtcaccgatcccaagcttgatggactgcccgcccagatttttttcataagattccagtgccgccagtgcttcttctctggtcataccagacacatccagcttgtcaatgctgacgcctttcaaaatcgtctctcctgcagcgcagactgtcatggagcttgtcatggcaagcagacagatggccaggagaaggcttcctttccattttttcataatctctcctcctcatcctacatagcgtaggtaaaaagcggaagaatcatcgcaataatcacaattgcaataatgactgccgcaattttccttctgtttttatgatcgtaaaaattcatcatatcctcttctctctttcctttcgctctctccccgggatccttccatattgaaggatgatcttatcgatcatacgggaagcctcacttcgcgtcatatcctcaatgcggatattcgtttctattctatgatatttcagcaaatcattcaagtaggctttttgtgatttcgcaataggactctgcttcttagccgaatataccagcggataaagggtaaattcttccggagctgtctctttgaacgcttcccacatatgccacagcagaaaatgtgtggatagcgcatcatccaatgcccgatgggaattgcctggatctacctgataataagcacacagatccggcagtctccgtgacggaagatctggtagcagctttcttgcaatcttcagtgtatccagagcttcccgttcaaaagtcagtccctgattcaccgctgcctgcttcaaaaatccaaaatcaaaggacacattatgtccaagaatcggtaactccccacaaaattccaggaattccgggattgcctgctctggtcgcttaccgcttaatcgcatctcatccgtaatccctgtcagttctgtgatccgctccggcacttccactccggcatcaataaaggtctggtaggtctcttctacttttccattgaggatccgtgcagctccgatctccagcaatcggtctctggccggattaagacctgtggtctccacatccactgcaatataatctctgatcatcccagcacctccacatgtgcatcgttggtcagcggatttcttctggcataatcaaacagtacaaacaccggctgactatcccttgtgaaaatctcaatatgcacctgctttccgtaaatcttttcatattcccgcagctgttctttataaggcgaccgatccgctgcaaatgccggacggctcttcagacgttctctggcatacagatcaaaaatcatacattgatcgtagaccggatctgcccagtctttttcagaaatgaactctcgcaggatctcataccgcgccatccgtgaatggctgatcttgctgtaaccttttcgatcataaaattctgccagttcctcaaaaaatgcaaatggcgatccataatttttcaaaatttcttccagtgtcttctcgtattgatggctgttgtagtaaagctctaccatctcttccacccctttaaggagcaacagatctttatagggaagccagggcgttgacaacacctcgtaaggcgccttgtcatggcagacaatgccatattgctgtgccatacgatggatcttggttccccgaagcacttttaaaaaccccagctgaagctgctctggctccatggcaaatacatcatcaaatgatttatgaaagctatccagatcttcccctggaagtcctgcgatcaaatccagatgttggtgaatatttccaaagctcttcaccttcgcagtcacatttctgaccagatcaagatccatcacgcggtcgatctcatgaaccgtctccatattcgtagactgcacaccaatctccagctggatcaaccctggcctcatctgctccatgatcgccagttcttcttccgtgatcagatccgctgcaatctcaaaatggaagttcgtgatcccattatcgtgatccaggatccactgccacagatccacagtccgcctgggattacagttaaaagttcgatccaggaatttcacctgaggcacctttgcctgcaggaaaaatcccagttccttcttcaccagatcaaggcttcggaatcgaagcttcttctccagagaagacagacagtacgcacagcggaacggacaacctctgctggactcgtaatagatgatcttatgagagaaatcttccaggtgaccatagacaaaaggaagttcatccatattggccggagcaccatcctcattgatctgaagttctccatgatcattccggtaagtgataccggcaatcgtctgaaaggaacctgttccttctatatatagtgacgcaagtgctgggaataccgtctcaccctctcccctcatgacaccgcgcactttcggatattccataagaaatgcttccgcatcataggacacttccggaccgcccgcccagatctctgcctgaggcaatactttggacagttccgtaatcagttcgcccaccatgcgccgattccagatataagtagaaaaggcaatcacatccggctgttttttataaatatccgccaggatctcatccggctgctgattgatcgtgtactcggcgatctcgatctgatcgccgtacttggccgtcaccgccttcagattatagactgccagattggaatgaatgtattttgcattgattgctgtaagtaaaatcctcataatttatttctttcttcttaatgatttttataaatcctttatttgtacgccacaatttggtcacattttcctgttactataatactcgtaacaggaacacatcagtatttcattcataacactttaggggacttgagaaagtccccactccctcgaaaatttaagcccgccagggttttttcttttttcccggataattttcaaagctgtcgcgatgcgttctctatgacacatataacccgaaacagtatgataacataaaaaaagagattccgctatagcaaaatctctttcttaactcagagcacgagacgggattcgaacccgcgaccctcgccttggcaaggcgatactcc

SEQ ID NO: 989 - DNA, 4923 bp, Unknown
  16S sequences of unknown bacteria
cctgaccgtcataggaacgtccgccgccctggcttcttccctgaccgtcataggaacgtccgccgccctggcttcttccctgaccgtcataggagcgtccaccgccctggcttcttccctggccgtcataggagcgtccaccgccctggcttcttccctgaccgtcattggagcgtccaccgccctgacttcttccctggccgtcataagagcgtccaccgttctggcttcttccaccactttgcgcgcggtcactctgtactcttgcacggtcgccctgcggtctgctgccctgtacacggtcgccctgcggtctcgcgccggtgctctgcggctttgcggacgtctcagctgcctttaccggtgcagctgcctttgtctccggagtcttcgctgtctcagccaccttttccggagccttttccaaagtcgtctccttcggcgtgttctctgcctttgctgccggctttgcgccctgcttgcctgtgccctgcggtttcggtctcgctcctggctttaccatgccggtcttactgttctgaggacggaacacctgtataatatttttctttttcggcggctgtgcccctgcctcagtcgcctccgttctcttctctgcatctgtatccttctgcatctgctcatcctccttcatctttgccgatatttccctattctctttccgaagcccctctgcaggctcatgctctctgatcgtcgccatttttatgccctccgtttccattttttatacctgcctgttccagctttttctgtatggaaccggaaagcccctgatccagcacagccaacgatgcacggaattcgcatccgatcgctgcccccagtgcttccttttctccataaaagtaaatgggggtctcataaaactcgcacatatttcgaaatttcttcgcggtattttccgacgcctcttcggatacaatcaccagaaaggctctttgggactttaccgcagtctctgtctgaaactcaccggatgcgattttacctgccttcttcgcaatactgataagcgataatacgctatctcttttcaaaagcttcaatctcctttttcaggctctcatatgtctcctccggcaccttcaccttcagtgaccgctccaggcctttgttctttacggcctgttcgaagcagctcatggaacggcacagataagcgcctcttccatttttccttccggtcgtatctaacacaatctggccctcggcggttttaagaacccgcatcatatcctttttctgtttcatttcctgacatcccgtgcacttgcgcagcggaatcttctttgccggtactgccatacttactcctgatcgtcgtctgcagacgcatcctctgtcacagactcagactcctcttctgttccctctgcaacctcctcagagctctcatcgcgggaatcctcgtcctcattctcatcctcgtaataatcctcttcgtattccagaagatcaccggattcacgtgcctgcgtctcactcttgatatcgatcttgaagccagtcagacgtgccgcaagtctcgcgttctgtccttccttgccgattgcaagagagagctgataatccgggacaacgaccttcgccgtcttctcatccggatctgccagcacgtagataaccttggccgggctcaaagcattctcaatcagaagtgccggattctcatcccagttgatgatatcaatcttctctccgttcagctcgtcgactaccgcattgacacgtgcaccgttcacgccgacgcatgctccgaccggatcaacgtccggattgttggaccatactgcgatcttcgtacggctgcctgcctcacgcgcaatgcttttgatctctacgataccgtcgtgtacctccgtcacctcttcctcgaagagccgctttacaaattccggatgtgtccgggatacgagtaccttcggtcccttcggcgtatcctttacttccagtacatacaccttgatacgctgggtcggatgatatacctcgccgcggatcatctcctcgctgttgagcatcgcatctaccttgccgaggttcacactgacgttacgtccgacataacgctgtacgataccggtcacgatatccttttccttctcataatattcctcgaacagcaccttgcgctcttcctcacggatcttctgaaggatgacattcttcgcattctgcgtcgcgatacgtccaaactccttggacttgatatccacgcgcacgatatcgccgagctcgtatcttggatccttcatgcgtgcatctgccaggctgatctcctccagatcatcttccacgacatctaccacccgcttttccgcataaatctcgaactcacaggtcttcggatcaatatttactactacattattagcctcatttcttccataatgattcttgcatgcctgcagcagtgactgcttgatcgcgtcgagcaatgtatccttgctgatatttttttccttttcgagcacttcaagcgcctcgaataactcgctgttcattttcttatcatcctccctgtatgttaaaaatcaaacgccagacgtaccagtgcaatatccgcacgggcaaatgtcatctcttctccgccttccagctccagcacaatcttttccttatcatatgccttcaggataccggtgaagtctttctgatgctggatcgcccgaaacgtctttacatctacttcttctccgatgctgcgtgcaaaatccttatcctttttcagcggccgtccgagtcccggtgagctcacttcgagaatgtacgcatcctcgataaaatcatgctcatccagcagatcactcagtgctctgctgaccagttcacagtcatccacggtaattccgcccggcttatcgatataagcccgcaaataccagttgccgccttcctttacatactctacatccacaagttcgaactgatgctgctcgatcagcggcatgatcagctcttctgtcttctgctcgtagatctctctcttgctcattcacaatcctcctgccggttttcctgaaacatgaaaaaggttttttcacaaataagagtggaccaacggcccactcttacattcgtgttttatctatttcgttgccatcatagcactattttacggaaaatgcaagggctattccgaaaatctttaggattgcgagagcatgaaatgcgaagcaatccgcttcgctacttgctcatgaacgcagtcgtttcgcgatctgtcagtgggagctttcaactcccactgacataagcatccccctcacccgccgcttagtgctctgcgcacttgaagcgggggactcgcttgattcgggtcaagcggatattcgcaatccatccctgcagctctgctgacagggcctagcttcgctacttgcaggatcataagaaatcctcccgcaagcgggtccctccttatgatatgtcataaccgaatgctgcttcgcagcttatcaggagtggcttgcaccactcctgatacaagcaagtcccaatccactgcttattgctctgcgcaatcgaaacaggggacttgcttgattcggttaaaaaatcccccggcgggattgctcctgccgggggatatgcgaacagccgtccgcatacttgtctgaatacaaataattatgaattcatcaagcctttccgtcactgccaagtacattgacgatcttgtgagctaccatttccttaacagcctgacgagccggcttcaggtactggcgcggatcaaagtgatccggatgctcagcaaagtacttgcggattgttccggtcatagccagacggatatcagagtcgatgttgatcttgcaaacggcaagcttagcagcctgtctcagctgatcctccggaatacctactgcatccggcatatttccgccgtactggttgatcatcttaacgaaatcctgcggtacagaagaagaaccatgaagaacgatcgggaagcccggcagtctcttaatgcactcttccagaacgtcgaaacgaagtggtggcggaacaaggatgccatctgcatttcttgtgcactgatcagctgtgaacttgtaagcgccatggctcgttccgattgcgatagccagggaatcgcagcctgttctgcttacaaactcttcaacctcttccggacgtgtatagctctcatggccagactcaacgactacctcgtcctcgataccagccagagttcccagctcagcctcaacaactacgccatgtgcatgtgcgtactcaacaacctgcttggtcagagcaatattgtcctcgaagctcttagaagaagcgtcgatcatgacagatgtgaatccgccatcgatgcagctcttgcagagctcaaagctgtcgccgtgatccagatgcagagcgatcgggatctccggattctcagctacagcagcctcaaccagctttaccagataggtatggttggcataagctcttgctcccttggaaacctgcagaataaccggagacttcagctcgccggctgcttctgtaataccctgaacgatttccatgttgtttacgttgaaagcaccgatcgcatagccgccatcgtaggctttcttaaacatttcagtggttgttactaatgccataattcatttcctcctttagtgcttatgacctagtctcggtatggcttgcgtcgccaaaccgatcatcgttattctaccacagatttttcctgttgacgagacaaatttttcagattgataaagttttattttgtgaattgttctgataaacaaaaaaattaaaaaaacttcaaaaaagtattgacagtctccgaaatccatagtatagtattacttgcttgcgagtcaggcagtcaaatgcgatagtagtacagttggtagtacgccaccttgccaaggtggaggtcgc

SEQ ID NO: 990 - DNA, 4556 bp, Unknown
  16S sequences of unknown bacteria
tatatatgaaacggggggcgcgcatatgcgcgccccccgccgaatgttccgaattatcaataatttttgcgtccgatgagaaaatcgatgtccacgtcgaaaaagtccgccaacagccagaggctcttgatactcggctcctttttctgtgagagccattcgctcacgttgctctggcgcatgcctatggcctttgccagagcgtactgcgtgacgcccgactccttcatcaattctttcagccgctccgcaaccaagattttcaaaacgcatccccttttttattgacattatatctcaatggtgatataattattcaaaatatctccttagagatatacaaaagaagacaaacgggaacgatgcgtttcggtatgggtaaaaaaagcggggatccggaaacttccggatccccgctttttattcagagcccgaccgccgcagcgatggcacggacagtctcttccagtcccaacccgtcacacgcgactgtcgcgtccgcatatttttcgtataggggcgcgcgctcggcgtacagttccgcgagcgtttcgccctgccgccgcatgacgacgccgcgccgcgcgatatttttcagacgcctttctacttcggcaaggctgagttcgagatagacgacggtgcccagttctttcaaatgtttcatcgcacgttcgccgtagacgacgctgccgcccgtggcgacgacgcaacgctccgcccacagagccccgttgacgttctcttcgatttcgatgaacttttccgcgccctcgcgttcgatgatctcgcagagaaggcgcttttgttggttctgtatcagaagatcgctgtcgataaatccgtagccgacggttttggcgagaaggacgcccgccgtgctcttgcccgacgcgggcattccgatcaaaataatgtttttcataacaaaaaaattatagcgcaatctgcggaaaaagtcaaccgcccgcgaaaaacgtgcaaaaccgcgcgaggtatggtataatgaaagcatgaacagacaagagatcctgcaaaaactgcccgcgctgcttttgccatggtacgatgtaaacaagcgcgaccttccctggcgcaaaaataccgacgcataccgcgtgtgggtttcggagatcatgctgcaacagacgcgcgtggaggcggtcaaggaacattacgagcggtttatgcgcgaactgcccaccgtgcaggcgctcgcagcgtgcacggaagaaaaacttttgaagttgtgggaagggctgggctattacagccgtgcccgcaatctgcacagcgcggcgaaagagatcgccgcgctcggggagtttccgtccgatcacgaaaagatacgcaaactcaaaggcgtgggcgcgtatacggcgggcgcgatcgcctcgatcgccttcgaacagcccacgcccgcagtggacggaaacgtgatccgcgtgctttcccgactcttggcggacgagcgcggacaagacgttttaaaagacgttttcgaaaaggaactcgcgcccgcctaccctcccgcgcgcaggggcgactttacgcaaagcctgatggaactgggcgcgacgatctgcctgccctcttcgccccgctgtatgctctgcccgctcttttcgctctgcggtacgcgcggggacgcgctgcccgtcagaaagcgcaaagcggagcgcaaaaagacggaaatgaccgtgttcgtcttttcgggcgaaaacggcgcggggcttttcaagcgaacagacggcgttttgaagggactttggcaattctataacgtgacgcggtttctcggcgccgacgaggcgcgcggacacttgctatcgctggggctgaaagagttttcgctctcgcccgcgcccgtttcacacaaacacgtttttacccacctcgaatgggatatgcgcgcctacgccgtgcagacggaagaagtccttcctttcctgacttatttcccgaaaagcgaaatcgtagaaaaaatttccgttccgtccgcctttcaatggtgcatcgaactgatataaaaaggaacgccgcatgcggcgttccttttgtatttatcggattattcggtctgcgtcgcctctatctcctcttcgaaagaggaaacgggtgcgctctcttcttttttcacgtttttggcggaaggctccttttttttcttgatcttgcgccgttccccttcgggcatctttttgttttcccaataattcacgctcttgccgccgttggatccggcgtacagtttttccatcgccgcgacggtgcgctgcatcagatccacttcctgttccttggaaaagagcatataatcgggatagataggctcgccgatggtgatggtcgcgcacggttttttaggcagaaacaagcggtacagaccgcggcgtttgcgccaactcatcacgacgggaagaatgggaacctgcgcctcgcgcgcgatcatgaacgcgccgcggctgaaatcgcgcagtcccgcataatagttgacgagttccccttctgcatacacgtgcaataaacgttttttcttgacaagttctttgacttcctgtaaaaagatgggcatttcggaaaccttgtccgccacggggatcacgcccacgaagtgcaggatcccgcccgccacagggatatggaaattgcttttcagcgacgtgaaatgcacctttctcgggaacattgccaacgcgttcatcgtgcaatcgagcgtatgaacgtggttggacacagagatcgcgcccttctttttgagttttttcagatttttgcggccgcttattttcagtccgtacacgagtttgttatagacgaaaagcagcggaatggcgatcccgtaatagaaaagcgaagaaaagaaatttgcgatcttcgagcgtttgccgaaaaatttgcgcattttcttgtgctctttgccttccacgcgctttttgttcttgtgcgttttgatcgcctcggtaaacatttcttccgcgcgttcgaccgaataatccagacgatagcggctgccgtggtcggcgtatttctcccccatgcggcggcgctcttcttcgtgttcgatccagtagtcgatcttggcggcgaggtctttttccgaacccgccttgaaaagcgaacgttcgtcgagcgcgaactgcggcgtcgcagattttttggaatcggcgatgacgggcaccagcccgcaactgaacgcctcgatacaggcgatcgcctcgatctcgatatccgcggcgtgtacgtacagatcggaagaatgaatgacttcgatcagttctttctcgggataaaacccgaacgtgacgggatttttcagatattttttgcccagccgttcgagttttttgcgcttgggccccttgcccgcgagcgtcaagcggatcttgtccgcatatttggaacgggcgatggcgcggatgagaacgtcctgccgtttttcggtagcgtagcgcccgatcatgaggatatcgaaaaactccttaggctcggtgcgcggcgtttcgggcggacggaaatcagccgccacgccgttggaaatgacgtgcagtttcgccttgtatttatgtttcctgagttggtcggcaatgaagaccgacgggcaatggatatggtcgaaatacttgtaaaatttgcggcggaaccaggaatagatccatctggggacaagcctgctgcgctttaagccgcaattataagtaatgttttcgggttgcagatgaaaggcggccgtacagggaatacccatttcttttgcgatcttcctgccctttttttccaactgaaagggaagataaaagtggacgacgtccgcgccctcgaaggcttcgcggaagaccgattccacgggcttgccgaaacggatctgctgttttgacgcaacttttgtggcgatgggtaagatacgctcggggacctcgtattcgccctctccgcgcgcgcccgttgccacgacgcgcaccgtatgacctctgcgcttgaattcttccacgaaacggtaagccgtcattaccgtgccgttcgtcaactggtcatatatatctatcactacgacgatgttcataaaacccttctcaagttaatcaataagtataagcatacgttacactttccttaattataacctttttttatgactttgtcaatgttcgccaacaccttcttcaacatttgacgaggaaaacaaaaaaaggcggggcaaaaattgccccgcccgaagttcccgtcaattgttgcaaggattgcagccgttgcagggattgcaactgacgttcacgcagccgttcaacgcgtactgacggttgtaatattcggcgtcgttgcagacgttgcagccgcggttgcccgcgcatctgccatagccgcatctgcattcgcagacgcatttgcagcatctgttgcagccgcccgaacggggctggttgcaaccgcatccgcagccgtcgcccgcgcgtccctgattgcagccacagccgcagccgcccgaacggggctggttgcagccgcaaccgcagccgtcgccggaaatacgcagcgacgcggtgtcaaaaccgttg

SEQ ID NO: 991 - DNA, 32759 bp, Unknown
  16S sequences of unknown bacteria
ctattggaaagcaatgtaaaccttttttaccagaagaaaatagacatgaaaaagggctttttacaattgttttagtgtaaaaagaataaaaaaaacaatgctacaaaaactttaatttttgaagggggaaattgttagagatgaaaacaaaaagatttttagccgtactggtaacgtgcgtatttgcttttgtggtttgtgcagttccggcaatggctaaagtaattccaacagtaccaggggagaaagcatctgtggcactggaagtgcttaatacagacggtacagattgtgagggtaatattaagcagactgctgcacaacagtcaggtgcagatcagagtatgacacaacaaggagattacatcacatatcaggctgaaaatccagagggttacgtatttgatagctggactgtaaatataacttgggtaaaagaggatggtacccgtgaagttttaggggctgattatgcagatacaacaaatcaaaaagcgtttactgccgcagacggaagtacagcatataatccaaatgacgcaaccttgagagtgaactatgtaatgccacaaggtttggaagaaaaagatcatttggaatataatgttaccgcaaactttaaaaaggatccaactaccgtagcagtaactgtaaactatgtttacagcggtttatacggtgcagactttatctacacagaaactcaatatttagcacaaggtagccatacaattcatgctgatgctgctcaatatgaaaacaaaggttttgaattggtaaatgctgcagcaaattcacaagaagtgaatgttacagaaaaagatggacaattggtagcagatgttgacgctgttaactttaatgtaaaaccaaccattgatccaaccgaaatgtcctttagtgtaacctatgttgacctagcaggaaatccaattggagctggcggacgtatttggtttgatgacatcggcgtgtatgacagagaaaatattctattgccatacggatatagagctattccacctgctcatcctggcgaagattggttctatccaaccagtttggagtacattaacggtcaatggcaagtaactgtgcctgacctcgaaattgtagtggcaaaaagtgtagcaaccgttaacattcaatttgctttagaagatggtacactattgcctgatttagcttatgaaaaagcttattttaatgtaggcggaggcattgaaaccgttgaagcaccggaaggttatgaaattgttggtgaaaacacttatgctgtagatgttacagaggatgatttactgaacttggttgctgacccaactgaagtaacatttacagtaaagccggttgcaaccacaccgggaaatcctgaaaatccaactgatgacggaacaacaactccaacacaagatggcactatgggtggaaatccaactacaggcgatgctactccttatgtaattttggcagtaactgttgcagcagctgcaggtgttatggtagtagcttttaaaagaagaaaagcttaataggggtttataaataaaaggggatacagtagtaactgtattccttttttgttttattaaaaaatgagaaagtataaatcatatccttgaaattaaaataggatatgatatgataacattaaactatctattggagggttgaaaaggtggaacagtctctttttcatagcaaaactgcagtcattgttgtagatatgctcaatgattttgtaaaaggcgagttgtcttgcgaacagtcagaagccattgtaccgccgatacgtgctttgttatcagacgcacgccgtgaaggagtacccattttttattgcaatgaccatcacattccggacgtcgaccctgagctgaaattatggggacaccatgccattgcaggaacagaaggggcaaaaattgtttcggaattagcgccgcaacacggcgactatgtgatattaaaacattgttatagtggtttttttcaaacagatttacaattactgctgaattcattgggaattaaaaatttgattattacggggttatataccaacatttgtgtacgtcatacagcggcagatgcattttgttggggatatcaaatttatgttcccaaggattgtgtctgtgcatttactccagaagagtatgaaggggatatcgcatatttaaaaacagtttatggagcaacaatattgtcttctgacaaaatcacataaatgaaatcgaagaatagaaaaagccgacctgttttgtagcaggtcggcttttttcagcaacggattgtgaaaaatagagatttttgtgtttttttatcgcgcgttttttgttgagaaaacggctattttatgagaatatatgcattatattacagttttataaattacacagaaaaatgctttattggtattgcggtatagcatgacttcctgtaagatattggtaaataatggaatgtaattttttgacagtattccatattgaatgtagataggaggtcacgcttgatgaaaaaaagggcaattgtggttatggtgtgtgcaataggttttgttgcttcgtttgtaatcataggatactttggccttaccagtacaggtatgatggaacgtatgtatgtaagtcaaagtaaacagcttgtgattggaaaagaagaaaatttggctccgataatcctttgggacgaaattggaacgtatacctgattcgggctaggcaatcatggtaccatatgttgacgtatgagaaatttcaatttgtatggatgccgtctaactaaaaacaaatatcatatttgcaggcagaaaaaggtgtatattgcagcttatgaaaagaaaaaacagatgcaaccactaaattttccatatagaggccagtaaattggcagcttgctgtaattcttcgggtgtgtgatgtgcaaatcctaacagaatggtatgcgccatgggagtacgattctttaaatagtagggagagataccttgcaagcaaattccgtttgcttttgcgcttgcaattaattctgcttcagacattccgttttgcacctgaagtaaaaaatgcaaacctgcattggctcccataattgtgatttggtttgcaataggagaggcttttaaggcggaaacaaaagcgtctcttcttttgcgataggtgtttcgattgcgattgatatttcgttcaaaatgaccgcctttcataaattgaaacaatgtatgctgttcaaagcgggatacagtaggggaatagtgagagcaaagtgtttgatatctttgaagtaatgctggaggcaacaccaaatatgcaatacggaccgagggagcaatgctgcgtgaaaatgtacctatataagccacttttcccgctgtgtcaattccttgcaatgacggtatcggttttcctgtaaatttcagttcactgtcatagtcatcttcaatgacgaagcgatttggtttttcatcggcccagcgcagcaattccaaacgtttgcctatcggcatcactactccggttggaaattgatgggaaggcgtcacatatacaatatcagctttgctttgtccaagggctgcaatatcaattccggtttctgttacgtcaatagcttccactgttctgccgcaattggtaatggtttgatataccttgggatatccgggattctccattgcaaacaggctgtcagaatcaaacaatacatttaatatcataagtaaatattctatacctgcgcccacaataatttgtgcagctgtgcaatgaaccgagcgatacttgtgtaaatagtcggcaatggcctgacgcagacaaaaatcacctttctggttgccggggtagattaaatccggttgagaatacataatttctttcgaaagctttgcccaggtagcatacggaaatgtttccacatctacaaaattggtagaaaggtggaactggtactcgttttgaatatcgccggtttcagaaatggaaacggaagttacaggctcctgccgaacggttaaagaagcctctaacggatttacataaaatccactgcggggaagagcgcggatataaccttctgtaaccaacatttgatatgcggcatcaattgtattctgactcactcccagatagtctgaaaacgctcgtttggaaggcagcttctcattttccttataaataccttgttggatatcttttaccatggaaaggtagagttggtagtataaaggttcttttccttttgtatgaacgttcattgcagacctccaatctgatactattaaaaatacttaaactgactatttaataggaatcagttttcttttataatcatactcaaatacaatgatatttgcaagacaaatataaaagcggaggagtaagataatcatgaatcaacaattggaacaaaacagaaagctaacggagtctttcaaaggcggcgttattatggacgttaccaatgcaaaagaggccgaaattgcacaaaaagcgggagcagttgctgttatggcactggaacgcgtaccttccgatattagaaaacaaggcggagtggcacgtatgagcgacccgaaaatgattaaagagattcaaagcgcagtatccattcccgttatggccaaagccagaatcggacatattgccgaagctcagattttagaagcgctgcacattgattatattgatgaaagtgaagtgcttacacctgcagatgatatgtaccacttaaataaatttgagtttaaaactccatttgtatgcggagcacgtaacattggtgaagcattaagaagaattggagaaggcgcttgcatgattcgtaccaagggcgaagcgggtacaggaaatgtggtagaggctgtcagacatatgagaaccatgatggcagcaattcgccgtttgcaaaatatgccttgtgaagaactgatgacatttgcaaaagaaaatgacgcaccatacgatttggtggtatatgtagcacaaaatggcagacttcctgtagtaaactttgcggcaggcggcattgcaactcctgccgacgctgctttgatgatgcagcttggcagcgaaggtgtattcgttggttcaggtatttttaagtctgcaaaccctgaattaagggcaaaggcaattgtcactgctacagcaaactataataatcccgaaattttggcagaagtaagtgaaggtctgggagaggctatgaagggattggagatttctgaaattcctcaggacagtctgtacgcaaacagaggctggtaaatcaatgaatcgaataaaacaaatttgttccgtcatattatgataataaaagaggcatcaattgatgcctcttttatttatatagaaaacggtatattagcgaaccggcgtataattgatttcagatgtttgctctgtggcttccaacttaaaaataacaggtcttaatccatcattgcagctgcaaatagcaacgccgggttttctaatccagtctccatagtaaaataattctttttcagctccgtgagataatgcaaatgcatactgatatattgctttccatgcttcatcgcaaaatccttccggttttgcatagtcagcataaaatacctgcccttcttttaacatggggcacgcagtcaaaccgtctgctccgtattcttttgccagttctttgtctaatgtggttttcaatactgttatttttacttttttcatgccttatctctccttgttgatattaagtgataaattccagcaaatttttgcccataaattgagtccattcctgttctgtgaggtttgcattttgagtgatatcatgaataaataaagagaaatccatttcccgttttacagaaggatacaataataaaggaaaatcactgccatagagcaaccgattcggaccaaccattgaaataactgttttaatacttttgatgtcgtacagcaagggatttgccgcagtgtcatagcgtacattttgaaataattctttgtagcgggggttcatctcataaaaaggaagaccgcctcccatatgcgccaatattagttttaagttgggatatctttttaataattgaggaatcggcgccaatgatgtcgtatcttttccgggataggtatgtccaattggttctccgcaatgaatgcacacaggcaaatgataatgtactgcgcactctaagacatccagaaactgcggtgactgaaagtcaaatccgtttgctccagggcctaattctccaattccgcaaaagccaagagagacgcagcgttctatttcagaaatggcttcttttccgaacatagggttaatagaagcaaatgcctttaagcgctgtggatgatttttgattgcttgtgccatgtaatcattgtgcagatacatcagttcaatatcattccaataccatccttgcatgaccaaaccgtatacacctgccagctcagcacaatgcaaagcttcttctgcatttgcccatgcttcttccgtacccgtaccattttccgattttttggtcaacataccaaagtatgggtcacgtgcggcataggtttcccaatgttcatatatttccgggggaaatatatgaacatgactgtcccaaatttgaaatccattcatgattggcattttcctcctgtattttatagtgatattataaatgatgattcatacgctgtcgatatccgaaataaatacaaatactttggaataaatctgagcgttgtttcaagatagttctgttttcatggaggcttattgctgtttgcgtttttcatgataatggcgaggaaacaaaaatcaatagaaaacgtgaaatttttccatttttagggctttgatagaatagtgtataaaccggaacaacaggggacattgtgattttttttattggcttaaattggctcgaaaatacttactttttgaattatattatgctatactgtaccaagaaaaagcagattatgttgtagaaaacggagggggtttatggcattctttgataatttggaaaagacattatcaaagaacaatctgctgttcaaaaaactaagaaaatgacagatatttccggaataaacagtttggtttctgatgaaaaaagtgaatcacaattactatccaatcggaaaacgatatgttgcaatgtaccaaaaaattttgaaagaaattttgtggggataaattacatccgttcgtgtactgtacaccaaaataaaagaggataaacagcagttgtagagtataaaaagtgttgtgtgttacggaagatggggagtggacgtttcaagcaatacagaattttgtaatgcttgtgatgcggttctgctgaaataaccacaaagatttgtctcgtaacatcaatacattgaatatggaacaaaatgacagaagattactgctatgcaaaaacaagattaggttttaattttaatgaggagggtgagttatggcaaagttttgcagcaaatgtggaatgaaactcaatgaacaaaccggaaaatgtcctaattgtgatgagaaaacaaaaatggatactgcaagctccgatagtaatatcagtatcaatgggaatccaaaagaggaccaaaatattaaaaaaacaaacggagaacaagaagtcaaaaaagaaagcaaaaagaaaacaatagtagtaatcacaattgttattgttgtattactgataggtataggcgtaggtataggtgttttcatggtacataacgaaaaaaacgcaaatgttcctaacaatggcgaaattcaagagacgcaaagtactgccggtacagagacaacaactcccaatgaagaaaatgaagaagttgacttgggcagtaattatgaagttcccgaatttgatgcagaagcatatttcagagaaaatactaccttaaaatctacttttgatgtagcttcttcgcaatctattcataccgaatctgaagcttatgatagttttgttgaaaggggctttgacggtagtcaagtgatgtatgaatatactatggatggtacttatttaggagagaatgaaatttcccgatcttcgtcatcaaaacatccaatgtatcagacatattacgctacaacatcaggggatatatggatgattcttgaaattaacggttcgttttttgcaacgccaatcacatacaatttttcaaacgcacaaaatgttcccgtaatagtttcagaaacggatacgattacaagctatgatagttccactaataaattctatgtgaacattcccaatgcatctcaaaccgttataaagacagtctccaaaattgatgctgaaacgatagaaaaactaacgagcgaggagttcaatcaatcatgacggttaaaaaaattgtaatatcacttctttgttgtgtaatcgtatctttttcttttctccctatgataacagtaaatgttcacgcggaaactgctacagaagaaagcagaatcatggtttctctcggtgattcctattcatcgggagaaggtattgaaccgttttatggtcaaaatgaatcaacagccgataaagtgaaaaatcaggattggcttgcacatagatccgaaaaaagctggcccggaagacttactctggagggagtaaatggttctatgtctcaaaatcgtaatgataattggttttttgtggctacatccggagcaacaaccgataatttgactcacacccaacgtaaggactatgacattgacgggaagaaaggcagtcgttatattgataaacagcttgatgtttttaaagaattaggtgataaaaaagcggaatatgttactgtttccattggaggaaatgatgcgcagtttacggatgttataaccaaagcagctctatcattttcatttaatcccggactattaaccgacaaattagattccgtttgggaagaattttattatggtattgacggcggtgaaagcataagagatagactttatcaagcttattgcgatattcaagatgctgcaggtgcacaagctaaaattattgttgccggataccccaaattactggaccctaacggaagcagattcttgtttaatgagagagatgctgctctcattaatgattcggtaagcagattcaatgacgaaatcgaatccattgtgaaatcgtgcaaagtggacggaatgaaaatctgttttgtgtctgttgaggaggcttttgatggacacggcgcctattccaatgacgcttttttgaatgaggtacattttggtagcaaatctcaagatttagaatcaagtcttatagcaccatcagcatattccatgcatcccaatgagaagggcgcccaggcttatgccgattgtgtccaagcaaaaattgatgagattgaaaaggataacggaaaaacggaatggcctttgatgtccggctcagatgagcgagacatagcattagtacttgatgtttcaggtagtatgagaggtactccaatgaatgaaaccaaaaatgcatcagaaaggtttatcaatacggttttaaaggaagattccagcatcggtgttgttacttatgataataccagtatgtgtattgctgacttctgtatgaatgaaagatatttgacgaatgcaatacagaatcttaattctggtggcggaaccaatatggaagcgggattatcacaggcatattccatgttacagagcagcaatgcaaaaaagaaaataatcgtacttatgagtgacggtgaacccaacgagggcaaaacaggcgatgaactcatagagtttgctgaaacaatcaaaaatgaaggcatatatatctatacattaggcttttttagtaattcacacgataaaacctcaccacaggcactgttagaaaacattgcaagtgaagggtgtcactttgaggttgaaaacgcagatgatttaatatttttctttggcgatattgcggatcaaatcaatggacaaaagtacatatatatccgcatagcatgccctgttgatgtgacggtaatgtacaatggtgaaacattgtgctctatagaagaaaatatgaatacccgcactgcttttggctctttaacatttgaggataatgaaaaaggaaccaatagcagcagcgataatcgagtgaagatactgcgattaaaagaaggtacagattataatatccaaattgagggtaacggcaacgggtatatggactataccattagatttatggatgataccggagagtacaccgatttacgcacattcagtaatataaaaattacggaacagactgtcattgatactgtggcgaccaattcagattcaactatattgaatgtagacgaaaatggcgatggaaggtatgacttgaagtataaggcaaccgaaaatgctgaaggtgaactggtcaacgacacctatctcatttatatttatattgcagttggtgtttttgttttaatcttgattgtaatcgcaattattctaattatgaaacatctaaaatcaaaaaaatctaagttggaaaacagataaagcatgcagaagttttgcagaaattgcaaaacacagaggaaaaagatgttttagcttttaccgattgaaaactactttataattttttcatttaataatctggtaataacaacaaaacaaacattgaaagatagtcctttcaatgtttgtttttgtttattggcaagaacgttttagcgtttatcagttgaaaattgcatagcaatttttttatgctataacaaccttgcaacagcagcaaaactaaagttttggctgttggcaagaacgttgtaacattttttagttagaaattgctttgccatttctcttatgttataatatctacactatttatttgatgcagttccattttattataagtacagaggagacgggtatatatgtccgcagtatcacaggcaaagcgcattgtagttaaggtaggtacctctaccttaacttatgaaaacggaaaactaaatttaagaagaacagaagaactctgcaaagtgttaagtgatttgcataattccggtcttgaagtagtacttgtatcatccggcgcggttggcgtaggtatgggcaaactcggcatcaaagagcgccccacagaaacagaaaaaaaacaagcaattgcagctgttgggcaatgtgaactgatgtttatgtacgataagctttttggagaatataattgtatggttgcccaggttttgcttacagcagacgtaacagccagtgagaacagcaagcgtaatgtagaaaacaccttcagagaactgctgaatatggatattattccggttgtaaatgaaaacgacacagttagcattgacgagctggacggccctcattttggagataatgatacgttatccgcagtcgttgccaagttggttggagccgatttgttaattattttaactgatattgacggactttacgatacagacccgagagaaaatccgaatgccaagcatattccttatgttacacatattacagacgaaattaaggcgttggcaggcgatgctggtacaaacagaggaacaggcggtatggtgaccaaaatacgcgccgcacaaattgcaaatgaagcgggtatctcctgttgtgtgatgagtggtacgcatcccaaaaatttatatcaattgctggacggcgtccaaataggaactacatttgccgcattataagtgcatcgatattgaaaggaggaatagatatgaccgaattggaacaaatgggaaaacgtgcaaaagaggcagcacgtgaacttgctttcgcaggtgataaaaaaaatcaaggacttgctgcaattgcaaaagctttgagagaacataaagataacattatagaggccaatgctttggatattgaagcagccaaacaaaacgggatgtctgagtcattgctggatcgccttacattaacaagtgaacgtattgaaggtatggcaaaaggtgtggaggaagttttagcgctgaaagacccaatcggtaccgtattggacggaatggtgcaaagcaacggtcttaagattgaaaaagtacgtgtacctctgggtgtcatcggcatgatttatgaagccagaccaaatgtgacttccgatgcagcggcgctttgtttaaaatcgggtaatgcggtcattttacgaggaggaaaagaagcattccactccaaccaatgtattaccaacattatgcaagctgcattagagcaagtcggtttgtcaggaaattgtgtccagcttgtgcagaataccagtagagaatccgcaaatgaaatgatgcgtttaacggaatacttggacgtattgattccaagaggcggtgcaggcttaatcaaagcggtggtggagaatgcaaaggttcctgtaattgaaacaggttccggcaactgccatgtatatgtagatgaatctgcagatgttgctatggcggctgatattatttttaatgcgaaaacgtcccgtccttctgtttgtaatgccattgaaacagtattggtacacaaaactatcgccgaaaaagctctccctgtcattgagaaaaggttgaaagaaaaacaagtggaaatcaggggatgtcaaacagtttgcagaatattgcccgatgcagtacctgcaacggaacaagattgggcgacagaatatttgggttatactttggcaattcgcgttgtagacgacattcatcaagccattgaccatattatgacgtataccacaggtcatagtgaatgtattgtaacagaaagttataccaatgcaatgttattcacatctcaaatagatgcagcagctgtttatgtgaatgcgtccaccagatttacagacggcggtatgtttggactgggtgcggaaatcggtatttctactcaaaaactccatgcaagaggtcctatgggcattgaacaactgacctccgtgaaatttattgtcaacggcaacggtcaaattcgtatataaagtactgtatctattggaataaattccaatcttaattttgctagagtgtaaaagcagatttttaccaaatacagttatgaaatcaccctgaataatagtttacaaaacagccttggcagatttcttttttataaaaaagttctgccgaggctgttttgtacttatatattaggtaaagtacaaaacaaggggttgaatcataacaaatgaattcagaaaacaaagaacaaacaccgaaaaaaacggcacaatttgtgtgtgattatcgagatgagcagcccactgaatttttgccgcagcttcaaatgcattcggcagaagaaacaaaagaggagccctcatcagagcctattgataatacaatacctaccatacatgtaacattagatgactccaatatgatagaaacagagcaggaaggaaacgaaactccggaatatccaacgatgccggaacaagaagagccctcgccggaaatagaaggatttcctctttggaaaagaaataatcagccctccagattattttatcctgcaaatccccaaattgcgcagcaacaggaagaggaaatatatgaggatgagacaaaacaatcaaaaccaaaaggaatcatcccgggtattatgattttaatggccgcatttgcgggtgtggtatgtttttgtatgtttggcggagtagacttggtacaaaatacagagcaaatcaatgcttttttagcgcctgttatgatgcaaaatccggaaccgttttcatcgttgtcacaggcaagcgaagatatgattttgcaagcttccgtatggagggcggtgacacaaaatcaggcaaactataaagagacagacgcacagggaagaatggttgttccggcaaaagatgtagaaaatgcatcgagggaactgtttggaagtgcgtttcatctttcttccaaacatctgcaaaacgcttctttttttgtttatgatgaatcttctgatacttaccgtgtgttacctagtagcagtgttacaagcacagttccgcaaataaaagaggtaaaaaaagagaatggctccatcgttgttacggtagagttttcttctacaacacaggaaattgctgtggaaacataccgttatatactggaatttgattctctcagcggagagccgtatttatcctcaattcaatctgcttgaaaacgtgatgagtatttctggcgatggaaaaagaatttttatagccaataaagtagattgacagatacaagaccttttgtcaaagattcttttgaattttgcatttcttggataatttgttttctaaaatgggactctatctttatgaaaaggcattcatgtcttaccggattcatcttttatcacagtattctgcaatcaaaaacggataccaattggtatccgtttttgatttttatatttcgtttgtcataaatcataatcttgtccatatatataataaagcaagatacctgaatgttatcatcaggtatcttctcttatcattatgtgcattagagcagtaagtataacagcgagaaaataacactggtgtcggcttgttcgttaaacagtaccagcagcagtatcatgattaaagttcgttcgctgtctttcataactccgtctaataaattttccacaatgttctgtggtccggcagagacgggaggggcgcttggcagactacctccgttgtgcccatgtaaagggccgccttgttcatttggtgtgtggtgagcgggctcttcagtatgatttccgtgagttccacttgaaaaagacggtccattattcgaacggtttgttcttggcgacgcagcaaaagacggtgtgccgcgcagttgttgattggcacgattatgcatttcctgcactctatgaattgcctcttcctgcatacgcttcatatccatattttcgttggccatgtttcacctcatagaatcccctgaagaataccctgttcttttaaaagaggtaaaaacttcagcattctcataattttaattgcttcatccagttttttctgacgctcactttttaataaaggacgcaaagcgtgcagtagtctggtattatcatcttcttgatttatgctccccagcaaaggcgctattttcataatggtattgagcatctcaggggaaacgccgtttcctcctccgcctaatgctcccagagtatttcccaaaccgcctaaagaagacaaagcaccaagtggattattgttcgtttgaggtgcttgtgcaggtgctgattgttgccctaatagactggcaagctggctaaaatcaattcctccggtagaattgctttgagattgctgtggggattgttgcgctggttgttcaggggcattgttttgctgctcggtattcatttgtcccaataaattgttagccatttgctgaaattttgccatttctgtaggattatttaaaatttcatttaattttccggctaagtcatccatggaccgtcaccccatttcttatttgcccaaaaatttttttagcagcacttgtgcctgcggtgaatttaacagtttattggccgcctctttatcgcttaatacttgctgaagttttgcggcatcgttggcgtttaggttatttaacattttttgcaacgtgccgttttctgcttgttgttttagttgttcgggttgtgtgcccagacgttgggctgctacatttaacagtttctgtaattcttcgttgttaggcaaagtatttcacacctttcaaagtaaaaaatgaaaaaagactggattccctcatgtgtttccatatataatatgattagataaatatacatatgcggtaaaatgggcagatagtaatattgtatatggagtcaagggggtttttatgagaattttagttatttccgattcccatggaaatacaaggaatatagagcgtgcagtggaaagtcaaccggaagcaaatattatcatccatttaggggacggggccgatgatattgtggatttggaatttgtttatagagataagcaattctatcaggtagccggtaattgtgactggggttcttcgttgcctcttgaaggtgaattaaaagtagcggataaaacaatattttttgtacatggccatgaatatagggtaaaaacaaatttacagcaaatcaagatggaagcaagaaaaaggaatgcggatattgtgctttttgggcatacgcacctgcctataacagaatatgatgatgaattgtatttgttgaatccgggctctttgcaatatgctgacggtacctatgggataattgatatcacagatgccggtatttctgtacaaattataaaagtttaaaattcgtttcttgacattgtatggattggcgtgataggctaatttgagagaaccaatattatgttgactgtattttgttgatacatataaagtaatgatattaccgccgaacagacagattaaagcctaagcagtaatatggataagggcggggaatggagagagtaattatgactgaatatgagagatggcatgctatgaaactggatgacccggatttaacagaagaactaaatgcaattgagggtaatccagaggaaattaacgaccgtttctaccgtgaactggaatttggaacaggtggtttacgtggtgtaattggagccggtacaaaccgaattaatatttatacagtacaaaaggcaactcaaggacttgccaactatctaaataaaaaaacgtcgcatgcgtctgtggcaattgcatatgacagtcgtattaagtcagacgtatttgcaaaggcagcggctgaggttttggcagcgaacggaattaccgcacatttatatcctcaattgatgcctacacccgcactgtcttttgccgttcgtcatttaaaatgtgacgcgggtatttgtattactgcaagccataatcctgcaaaatataacggatacaaagcatacggcagtgacggttgtcaggttgctttggaaatggcagatgctattctggatgaaattaaccggctggatattttccgtgatgtcaaacacatggattatgatgccgcagtagaacagggaagtattaaggccattggcgaggatgttgtaattgcatttttaaatgctgttaagtcacaaagtattttggattgcagcgattctgatttaaaagtagtatatactcctctcaatggcagtggaaaaatgtgtgtcacacgtatttttaatatgattggtataaaaaatattacaattgttcctgaacagtcagaaccggacggcaattttccgacttgtccgtatccaaatcctgaatttagagaggcattgcaagtaggattgaatctttgtgaaagcgtacaaccggatttactggtagcgacagatcctgattgtgaccgtatgggtattgctgtaagacataacggtgattatcaattgttaaacggcaatgaggttggtgttttattattagattttattgcgcgcaatcgtattgcaaatggaactatgccaaaacatccggttgcagtcaaaacaattgtttctaccgatttaacggatagtgttgctaaagaatacggtattgagttaagaagcgttttgacaggatttaaatatattggtgaccaaatagcaggcttagaagccaacggagaggaaagccgttatatctttggttttgaggaaagttatggatatctgtcaggcagctatgtacgtgacaaagacgctgtgaatgccagcatgttagtatgtgaaatggcagttgactataaaaagcaaggaaaaacgttggtagatgcaattcatgatatttatgaaaaacatggttatttcctaaatgaattgatgaattttacgtttgaaggtcaagacggtatgaataaaatgcagtccattatggagcgtttgcgtaccaatactccaactaaaattgcagactttgcagtggttggttggagtgattataaagcgtctaaatgttttgacggtaccattgaaactgaaattacacttcccaagtccaatgttttggaatatcgcttggaaaatggcagcaaattaattgtgcgtccgtcaggaacagagcctaagttaaaattgtacttatccgcaaaaggtaagacaagagaagaatctcaagcggtaattcaggcgtttaaaaattgtgcaaacgaattactgggaatctaaaaaaggtcggagcttgctccgaccttttttatgacagatttttatcagtacatgtgttaaaatctttttagtgataaaaattgcaactgtattttttttatggtatactttataaaatatatttccatccgtagcgaagctggatatcgcaacagattccgattctggaggtcgggggttcgaatccctccgggtgggccatgctggaatggactgtgctccattcaaaaagcccagccgtccggctgggctttttcataaaaatttgttattgatttttccgcgatggtctataataatgttatttatttgattgggattgtccttgtaacgtctctaaattactacaactttttacgagttgggacaatttcactttttgtcgtcgatagtttaataggtattttttatcaatccttctgatatggaaataatcacgagactttttccccaaaggctgttggcggcaataatttttggaaaggagaaaagcacttgaatcatttagaatttgggctggttatttgtaccaaaggaccgtataaagggaaaataggatatttagatgatgaagatatatgtgaaggaaatcagtttggaattgtatattttggtaatccgtcattttgttcatcattccatctggttcccattacatatttatcaaatgaaattaccatgtacgaaatcattcaaagaaaagaaacgttgcaacaacaaatacttaacgaaaaggatgaaaagaagaaaatatatttgcttctggaatcagaatttgtaaataccctgttttacgagagacatatacaaacacatactatgtctcaaaaaggtattaaattatttatatcttattcctctaaagataaaggatctgcaaatttactatactctgatttaaaagaggcaggatgtattccatggttggatgagtgggatattgtgggtgggcaatccatccctgaagagattgaaaaaggaattaataatagtgatttcttattgattttattatctaataattcagtaaaatccaattgggttcgagctgaatgggaatcaaccatttgggatgaaaatcaaaataaggaaatacgaatcataccaatattaattgaagaatgtgaaataccacgctttataaaatatagaaaatatattgattttagaaaagactacattacgggtttccgagatttattgtattctattgatagattaaaataagaactaattttataaatgtttcattaattcaacatgtagatttacagtttgtatttcaacctatacctgagggatgtatatacatccctcaggtattttctttttgtttctacaatccatatgcatttcgttcgtcactataggattatttcacaggtatatatatttcttaaaaatagaatatacattctgttggttttatcatgaaatgcgtgatattggataaaaaatagcctacatttatcaccggatacatttttccatcatagaatagcggagaacagggggaatttcaatgtactgtggtgaacaattcagtgatgtaacaaagcaatatttatgctgtttttatgagattttagacaatatgatagaagagatgacaaatgcgaagttaacaaacagtatatcgcataattttattgtacaaatgattcctcatcaccaagcagcaattaaaatgtctcagaacattttacaatatacaacgttacttcctctgcaaaacattgcaaagaatatcatttcagagcaaaccaaaggcatcgaagctatgaaagaaatactgggagtatgtggggaacaatttgattcaaaacaggatatgtgcctgtatcaaaatgaatttgaccaaattacaagaactatgttttctcaaatgaaaaatgcttgttcgacaaatcagattaatgcaaattttatgagagaaatgattccacatcatcaaggtgctatctgtatgtcaaaaaacgcattgcatttctccatctgtccgcagctaattccaattttgcagacgattattgtctctcaggaaaaaggagtacgagagatgagagcgcttcttcactgcatttaaaaaggatgacatattcattcccgttcagtaattgaaataagatacaacagaaaacaataggaggcgattatttggctattcgtatttttatcgatcaagggcataatcccagtggtgtgaatgcaggagcagaagggaacggattaagggaacaagacgttacctataatgtaggaatctatttagccaatctgttgaatgacgatcccaggtttactgcaagagtttcacgccctactcctgagaccgtactgggtaccagcaatgctaccagtttgcaggcccgtgtaaatatggcgaattcctggcctgcagattattttatcagtattcattgtaactccaatacaaatcctgcaattaatggcagtgaagtgtatgtttatcggagtaatacccaatcttattggctggcacagcacattctcaatgcgattgtagaacgtgtaggcaccagggataatggggtacgattgaatccgtcgctgtatgtattaagacgtactaccatgcctgctgtattggtagaattgggatatttaagcaatacttccgatgcacaaaaacttagagatgaccaaagaggatttgctcaaggaatttacaatggactactaagttactttggtttttcaccactttaacggcatcagaatataaatgaacgcaaatggaattcctattcctatgtatcacgattcataagtttatatgttatcagattggagatgttttggattgaaaaaacagccaggatatggtgggacaaccacatttcctgactgttttttataattttccgttatacgattgggagtttaaaaatttgtccgggatatattacatcgctggacaggtggtttagctgcatgatttctgtataacgcgtgccggagcccaattgttcttgtgcaattttccaaagagaatctcctttttgtacggtgtattcttgatattgaatgggaagttttatttggtctcccggataaattagcgtacttgtcagcccgtttaactgcatgatttcatggtaacgaaatccgcttcccaaatatttttcagcaataccccaaagcgtatctccggaaattacctgatgaatgagatgatttgattcaggagatgttggtggagtttcagagggagattccgtattgggaggagtaggagtctgtggaatagatggaattgaagaatcgggctgttgtggctctgacggtacaggtgattcgggggattcaggctcaggcgtcacaggccgctccggagattccggttcggttggattggatgaatccggttgctctgttgttggaggttcagaggattcgggggtatcggaagatattggaggttcagattcttccggttcagagggagatgattccggaagatttgtctcaggtgggacaatagattctggcggttccggctcggaaggggaaggtggatttggcggttgtgggataaccggttcagaggtatccggttgttccggttgatttggaatcgatggttcggatggtgtggtatcctgtgtttctccgtttatccattcttcataatggtcccaaatggatgggtcttcttgccccaacgcccatgagcctgcaccttttagattatatttttcaactaaacccaattttgtttcataagattggtcgttttcataccaaaccacatattttcctggttgcaaaacaaaatctccgcccacggtgtagcgggtgctttgttctgtaattgtaaattccgcttttacagattggcttgtttcatcataagtgacagtggattcacagttatttaaaatatcttgaatggttttgctgctgatacctttaccaacaattctattatcatctaaactccatacgcgtccatataaaggaacgcctatcacaattttgtcggcagtagttttactcagtgcatattgaatcgagtcttctacaaactgaattcctgcgacagggcccgcagctccgccctcataatgttcatcataagtcataataaataagtggtctgcatactgagcaagtgctgagtagtcgtaagaaccatgccagccggtctgccagtcattgggatttgctgcaaccgcaacagaaacttctttatgacttggaattttttctcgcagcagttttactaattgagtatattggtccctttgttcgtgggtcacattctcaatatcgacgtttacaccatccaggttgtattcttctatatcatctgcaatttgtgttgaaagtgtttctacatcttttaatgcattaatacctgccgttctgtcccaatggttacttaagaatgggactaccttaattccttttgcatgcatactatcaattaaatatgtgctgacataattcaatgttaagcttccatcttcttggatgttaaaataactgggggaaacggtatccaacgtttggccggtctgattcacatattcaatttgctgatggtccgtaccactatataagtatcccataatataacggtcagatgctgcaaaaacggataaaaatgaagttaaggataatgaggccaccaaaatccctgatgcaaatatttttacgcttttaattttggcttttttggcatattctgatatggattttaaaataccttctgaattggtgtgcttgttttttctcttcccaaattcccatgcaaattctacatcggctttggaatattcaattaaaatatcatactctccgtcttgtcggggaaccaattttatatttggcatttctatctacatcacctttcatgttgttcgttttttgttttattagtatgtacatcaaatgtgttaaatatgaaaaaatttggtataatacaggacatgaaatagtagaaaggcgtaagtattattgttttttgttaagcaactaaacaatacttgacgaaacagaaaaacaggtttataataaaacgacagaaatcacaaacggaggcgttgctatgcaatgcgaaatggcccgacaattttttgatatgctgactgtaataacagcaaagcaaaaaataccaaaagaatatgcagatggacaagtattatacaatgctgaaatagaattgctagaaaaaatttatcagtatccgcaagccaatattagcatactgtctgttaaattaggcgtgacaaaaagtgctgttacacaaatgagtatcaagcttttagacaaaggattgattgaaaagtttcaagattctaaaaataaaaaagaaaaatatttccgtctgacaaatgaagggaaaaaggccagagaaacatacatggcacatcatgaccaagcgttaaatgagatgagagcatatttgtgctctctcaatgagaatgataaaaacaccattttaacatttatgaaaatgatgaagcaatatatgccggtgtatacatttccttgtcaatgtggcacaaatcaaaattcctgctgtttagcagctgaagataaaaggatagaagaaaaatgcttgaattaaaacatatctctttttctgtgatggaggaaacaggtcaacagaagaaaatattaaaagacattaaccttacaatagataccgatacctttgtagtaattacaggtccgaatggaggaggaaagtcaacacttgcaaaaatcattatgggcattgaaaagccttctcaagggaccattctgtttaaaggccaagatattaccaatttagatattcatgaacgtgcaaaattaggtatgggatttgcattccagcagccggtccgttttaaaggtcttaccgtaagagacttattacatttatctaccagtaaacaaaaaagtgaccaagagcttagtcaatatcttactgaagtgggactcaatgcatcaaattatatcaatagagaaataaatgcaagtctttccgggggagagttaaagagaattgaaattgcaatgttaatggccagaggtgtagacctttctctgttcgatgagccggaagccggtattgatttatggagttttcataatttaattaaagtgtttgagcaaattagagataccaaacgcggagcagtagtcattatttcgcatcaggagcgtattttaaatatagcggataaaatagtcgtgatttctaacggtgagatagatactgtagggacacgggatgaaatattgccaaagctgttatcgcaatctgacacgtatcaatttcataaagtgagggaacagcaatgaaacattcagaaaaaacagaacatatttctggaaattcctctgtgctgcaaaaacttctcaaggtagtatccggaataaccggaacaccaaaaggcgcttataatattcgacaagacggtaaaagcattggtcgtcagagtacagataacatagaaattcgttcaaaagagaatggacagggaattgaaatttacgtgaaacctggaacaaaaggagagtttgttcatatccctgtggtagtagatgaaagcggttttgcagacgtagtatataatgatttttttattggcgatgatgcagatgtagatattgtagcagggtgcggtattcataatgatggtattcatttatcccagcatgatggcgttcatacctttcatgtaggaaaaaatgcaaaggtacgatatgtggaaaagcattatggagaaggtagtggaagcggaaaacgtgttctaaatcctgttacagtggtacatttggatgaagacagctatttagaaatggaaacagtacaaattgagggtgtagacaacacaaaaagagttacaaaaggcgatttgaaggatcgtgcgcaacttgttattaaagaaaagttaatgacaagcggtaatcaaaatgctactacagaatttcaagtgaatttaaatggtgttgattgcagtacaaatgtagtgtcgcgttcggtagcaaaaggaaactcttttcagggattttattccaaaataaatggcaataatgcttgtgcagggcattccgaatgtgatgctattatcatggatgaagcttgcgttactgcagttcctgaaattacagcaaaccacgtagatgcttctctgattcatgaggctgccattggcaaaattgcaggagaacaaattataaaattgatgacattgggattatcacaagaagaagcagaggcagaaattgttcgtggctttttaaaatagttatttcaaaaggagatggtgtatgactgtcttcttttttgttttataggatatgttttaacgattttcaaaagttgacatatattataagtagagtgtgtataaagtataggaatgtagtacaagcaaatagattatattaagacaaaatagttcaattttttagaaaaaagaatattaaaaagtacgcatatatccaatttatttcaccgagaatggagacttttagtatgaatatggatatgaatatctataatgggatgaattgttgttgcaaccaaaattgtgatgatgattgttgtcgtccagtaatttgttgtcctgctggcccaacaggtcctactggtccaaccggtcccacaggtcctgcaggtggtgtaactggtccaacaggagcaaccggtcctgttggtgcgactggcccaacgggtcccacaggtccaacgggagcaacaggctttggagcaattggtccaacgggtcctacaggtccgacaggagctacaggaacaggagcaaccggtccaacgggtcccacaggtccgacgggagcaacaggtacaggggcaaccggcccaacgggtcccacaggtccgacgggagcaacaggaacaggagcaaccggtccaacgggtcctacaggcccgacgggagcaacaggctttggagcaaccggtccaacgggtcccacaggtccgacgggagcaacaggtacaggggcaaccggcccaacgggtcccacaggtccgacgggagcaacaggaacaggagcaaccggtccaacgggtcctacaggcccgacgggagcaacaggtacaggagtaaccggcccgaccggtcctacaggaccaacgggagcaacaggctttggagcaactggcccgaccggtcccacaggtccgacgggagcaacaggaacaggagtaaccggcccaaccggtcccacaggaccaacgggagcaacaggaacaggagtaactggtccgaccggtcccacaggcccgacgggagcaacaggaacaggagtaaccggtccaaccggtcccacaggcccgacgggagcaacaggaacaggagtaaccggtccaactggtcccacaggaccaacgggagcgaccggtcctacaggtccgacgggagcaacaggaagaactggtccaaccggtcccacaggcccgacgggagcaacaggaacaggagtaaccggtccaactggtcccacaggaccaacgggagcgaccggtcctacaggtccgacgggagcaacaggaagaactggtccaaccggtcccacaggtccgacgggagatgaaggagtccagggaactgcagcgacagtaagagtaggtacggtaactacagcagagcctggcacagaggcaaaggtaacaaatagcggaactgagcaggatgctgtatttgactttgtgataccaagaggcgaaaccggtggaggtgttactcctgtagaattgttaacagcatatgctacgcccgctcagccaggcacatcaggtggcagtctaatttttgacagaaacggaacttcttatggtaatgcaatttctcatacagaaaatacttctgctcttaccattcaagaacctggtttttattatgtagcgtttcacacaacaatcactcctacaagtggtgtggattttccattatcaattgtagtatatctgcagcaacaaggtactgctgtttcaggcaccggcatacgccatacgttccagacaacttcagatgcaagtaatatagcattttctcagattatacaggtaacatcaactccaaccacattagaagtaatcggtgagggtggaaattatctgtattatgataatgcaataaccatttataaagtaggagaaatatcgtaaatctaagagaatatccctttattttggggatattcttttttattttactatttttcccattttgcttcattgacagtacacattgccccaactataatgaaaagataaaaatatgaaaatatcgtaaatctaagagggggaattcggtgaaaaacaaaattccgcgcgcaaccctagttatatggggaattatagttgcaatcgtaattgttatggcaactgtttgtattgttttaattttacaggggaaatggggaattgatggtaatgattcaagtgattatattgagataaaagaagaaaatatccaacaagatatctctgtgatacatttaaattgggtatcaggagatgtacaagtcaaaaagagttcaaataaccaaatccgtattgttcaaaagggtagtcaagattatccacaggagcaattattctcaactaaaatagatggggatactttatatatagaagataccaggggatatggtatcaatatgttcgggtttcaaaaacaagaaaatacagatttggtattatatttaccggaaaaagaatatcaacagttgaatggaaactttgtaagtgccaatgtgacagttgacacatgcaacaccgaccatttgtatttaaagactatttcaggaaccatttttgtagagaaaggaaagtgcgactcaatagaattaaatacgaccagtggagatatttctgtaaaccatataaaaacagacgagtccctgaaaatggtttctgtaagcggagctgttatagcaacggaaagtaaggttgaaaacgatacatatgcttatagtgcaagcggtaatatcaatatcaatgatttgcatactaaaaatatgaaatgtgaaacaattagcagctctatacagacagaaggaatttttgataatgtgacattttctaccacatatggattggtggaatgtacagcaaacgaaccattaaatcagttaacagtcactactgtttcgggagattttcacggtatgataccaaaagaaaacggttttaccgcgacatatcatacagtttcaggtacatttgagagtgaatttgaaaccatacaggataatcatatgtttatttatggagataaaaacggtatgtttgagtttaatacaagtagtggaagtgttactttatctgcacttccgttataatcaaaaaatcagatagaagatattgataatttctcagataaatttaaaagaaataatggaaaaacctattgacactcttatatatgagatgtacaataagcaacaaccagacaaggaacattgctgctcttagattgttaagagcagtattccatttatagggatagaaaagaggcggttgtagtgaatattttaattataggctgcggacgcgttggaattagtttagcagaacgtttagatgcacatggacatgatgtggccattgtagattcagatgtagataatttcagagctttaagcgatgagtttacaggtattacagtttgtggtatgcctatggacatgcaggtgatgcaaaatgcaggtatagaaaactgcgatgcggttgcagtagtgacgccggatgataatttaaatattaccgtttcacaggtagtaaaaaaattttttggcgtagaaaatgtgttagcgcgtatttctgatcctgcacgtgaaaaagtgtttaaaaagttcggactgaaaacagtatgtccgaccaatctggcaggagacgcgatgtttgtggctctgacacaaccatttgataataaaaatatgacatttggggtgtctactgtatcgtttacatgcgtaccggtagaagagcaatttgtaggcaaagatattagaaatttaggagaaggcagtgaccatagtgtgtttggtgtagtgcatcccgacggctctatggatttgcatttagcccataaaaaattaattttacaacagaatgatatgattatttacgcaaatatgtgtgactaagatggtttcgtaggagaaaaggattatgaaaattattattgttggcggcggcaagttaggtaaagatattgccgataatatgctggaacgcaaatatgatgtaagattaattgaaaaaaacagagcaaaatgtattgaactggcaaatgatttagatgtagaaattatttgcggagatggtacagaattggaagttctggaggaagcaggaacaaaaaatgcagattgctttatctctgttaccggtagtgaccaggataatttggtagcaacacagcttgctaaaaatgagtttaatgcccgtaaggttattgttcgtgccaataacccgagaaatgtggaagctttgcgtaccttgggaacagatattgttgttagcagcactgagattatcaccagactgattgagcaagaggtggatttagcgggaatgcatttgctggcaactttaaataaaggaaaagcaagcatctgtacaataaccttgcctgagttttccagtttggatggaaaaatgctaaaagatattacattgccgcaaggatgtcttgttatttctgttttaagagatgacgatatgaccattccaaatggttttactgtaattcatacaggagatgaaattgtgtctgtatgtgacagtgacaatagtcagcgccaattattaaaattattccatagccataattaaaaaaggagggtaatttaccctccttttttattcttctgttttctcttttcgacgcagacggttggttcgtttaaaccttgttttctccggcagaggttccttggttttataagtaatacggtgcttagcgtcagtgattttagagctgtccacttttttcataatcagtacatatgcaactaagagaggaacagcgcatcctgtcacaattgctcccaacttcaggccgggtgtttgataatgaaattgtatttcggatgttcctgcaggtacttttacagccataaagccaatatttacgttttctatatctacaggttccccgtttacggtggcagtccagccgctttcgtatggaacgctaaagaaaaccaaacgttccttatcggaggtatagtgtgcggtaaacccgtaactatcataagtaaaatctgagcaagccattgattggcgttcgagacagtccttgtaataagcttcttcggtgtaggagaaagaagtatttccaacggcaggttccaaaatatcctgatattttgttgcttgctcctcatccaatacaattgcttttaacagtaataggttacgattgtcttcatatagctgattatactgctcttcagtgtaatagtaatcgtaactaaaacccattggaatgtaatattgattttcccagacgtcatagccgttttgagtatcataataggtccatcccggcatacgagtcgttccatcttcttttacaaaattatcattgtctcctgtgtagtcaaataaccagcggcaggaagtaagagcacgcaatccataatattttacatcaggtcttgaaccaacatctcttgtgacgccaatggttgggtaaaattccataatagaacccggtacaatgctgtgaaacgcttgtatactgggaacttgccagaacattgcctggttatccatacttttatagaagtcagaacgtgcaaaatcagattccggtaaatttaaatctttaccgccatttaatgaggtaggaataatttgattgtgtgtatcataggattgtgttttaccaagtgcaataaaataagttgcgtataccacagtaataacgcaaacgccgatgtttaacaaacgagcaaaccacacgcggcttttgttgcggtattttagaataataatcagcaataataagctgacgacagcaatggcaacataagtccagaatctggtgggataactttccagtccgtaagttgtggtagtaacaccatccttggttgtcgtgttcggcattaatccaattggaatcgcaatgccaagagtaatcaataaagtccaacgtatggcgcgtttccaattaatatcgctaaactccaagcaggaaatggtagccagtgacatcatcagcgttaatatatagaaccaacgagcatagtaagaggagttaaataattgaaaagcactatttaaaattggaaccattgccattaaaaacaatacacccaatgttaccttcagccaatgttttttctttctctgcataaagccgatgacacctgtcatactgaacaacggtaaccatgcgcccagtgaagcccattttgattccgaatttggtgtaaagtttggtcttgccggaatatcaggagggaagaacaggctttgcagaatatgtacatatcgttgattatagctgtaaagtaaggcgttccatccatttggagggttgtccacacgtgggttttgtataatcgtgagtatggttggtatcaataaaacacacgatatggcaacgccaagaataccttccagaagcaacaagaaaaaatctctgacagaaattttccagcttttcataatcaggcggatggcaaaataaatgagacaaaatacaacttgtcctacaaagaaatagtaatttacaaaacagcatgcaaatacagtcaatgcgaaaattcctctgcggcgctgatacatgtattcatccagtgccgccagcataagagggaaaaatacgattgcctcatggaaatggttaaaaaagatattgtaaacggagaatcccgaaaaggcatataacatgcctccgataacggcaaaattttggttttgaacgtatcgttttaaataaacataaccggttaaggaggcacagccaaactttaaaatgagcaaaggccccataagatagggaacagctgcactgggaaatggaatggtcagccagaaaaatggactgcctaataaataaaatgaataggaaccaataaaattagcaccaagatcggtggtccagctccagccaaaactaccgcttcttacggcgtcatgcgccatttgatagaagggcacttgctgaacgttaaaatcaccgtaaaaaagaaaatatcctttgtcgtatataataaagggaataaagaaaaggaaagaaattccaacaccataaacaaatgccttaaaatagtagttttgccaccaaacttttggttgtagagctgttaactgcatgtgagacctccttttctttgttgattttttattatagcataaaagaaattggtgtgcaatttttgcccaatacatactaaaatagctttgacgatttttgcagcaagtaaattttaatatttatcgtaagtttgttatagaccagagaaaattgtattgcattttttagccaataaagactaaaccttcttatcaatacacaaaatctatgattttttagttattacaaggttgttatagcataaagaagattacagagtaatc

SEQ ID NO: 992 - DNA, 14223 bp, Unknown
  16S sequences of unknown bacteria
ctttatcggcaagattgattgaatgacaccaatatctttaactatgtgataccggcgaatccatgccagacatggacaacctcatccgcctgcgcgaagcgctgggcatttccctggatgcgcttttgttagaggcgccagaagaacctgccacagaggacaaagagcccgccagcacgccggttgccccagcgcaaccaggcaacgcccggcgcgccaagcgcatatggggcgcggcgctgctggcgctgggcatgctgggcgtgctcgtcatatggattctttccaccatgctgcccacggctgttcccgtgcaagcggccggttccgcgcccaacagctgggaggtatgggacgaaatcgtgtatgaattcgggccctttgtgcgggcgcggcgcttgcaagcgctgctggccgcgctgggcgcatgcgcgttggcgggagggggcttgctcatcgcctctgcgcgcaggaacgcccccaaaggctaaatttccggctttttcccgtgaaatggccgcgtttgctatagatttattgtaaacgtgcttgacaagccccggcgcattcggtataatgtgaaggctatgcgcgattccgccctcagcggcggttcaagaaaaaggaagatcaaagaaggagtgtttcgcatgtatcgcacgtaccagccgaaaaagcgccagaggagcaaggtccacggtttccgtcagcgtatgaagaccaagagcggcaggaatgtgctgcgcgcccgccgtctgcgcggccgcaaggtgctttccgcataaacaatgcccacttgtaggcatcccctcgcgctcgggcggcaatattcgctggggagcaatcgccagcatcagcatgtctaccggcggggcaagtcccatcccggcaggcatctggtgctgatttatctcaaagggcgcgaactgaaaatcggcgtgtccgcttcggcgaaggtgggcaacgccgtcacgcgcaaccgtttgcgccgctatatgcgcgaggactttcgtcagatgaaaaaccagttgaagagcgggcggtatatcctgatcgcccgcacgagcgcggcggccgccgggcatgaggcgctccgccgtgatttgcgcgccattgtggaacgcgcaaatttgttgcgcgcgcaatgaagcgcgcattgcttgcgctgatccgcttctatcagcgccagatcagtcccttattccccccgtgctgccgctttacgccgacctgctcgcagtacgccctggaagccatccaggtgcatggcgcggccaagggagtatttctcgcgttgaaacgcattttgcgttgcaatccgcttttcccgggcggatacgatccggttccgccgcgcaaaggaggaaatgaatgaaccctattagctcgttcctgaagaccgtcctcgaatggatatacgcgcttgtgggcaattacggttggtcggtgatcctgttcaccgtgctgatccgtgcgattttgctgccgctagacgtcaagagcaagcggggcatgcgcgccatgagcgcggtgcagcccaagatgcaggcgctgcagaagaaatacgccaacgataaggaaaagctcaatcagaagacgaacgagctttaccgcaaagagaagatcaatcccatggcaggctgcctgcccatgttgatccagtggcccatcttgttttgcatgttcaccgctatgcgtgtggtggccaacgaagaaactgtccgcatggtgatcgaatgggcctcgcactttgctgagggcggatacgacgctctggttgccgccgtgcaggatggcgcggacggcatcaatagcgtgctgctttcctgggagcaaatcgtcgcgaacggattggccgagaacttccacccggatttccaatccttcctgtggattaagaacatttaccaggcggattcgttcgccacgccgattatgcccaccgtcagttcgctgatgagcaacggtttgcaggctgtgaacggcacgtacctcacgcaggagcacatcaacatcgccagcgcgttcctgcagagcgatacctacgcgcagcttttgaaccacatgggcatgggaacggataacttcacgcacatcgatattccgttcctgatcaccacgttcacgatttccttccccaaggattgggcgactttcacctccacggcgaacggcctgttcatcctgccggtgctcgcggcggtgagccagtttgtgtccacgctgctcatgccccagcagcaacagcagcagggccagcaacagcaagctggaatgaacaactttatgaagtggttcttcccgattttctctctgttcatctgcgccacgtccacggcggcgttctcgctgtactgggtggcggttaacctgatcatgatcgtgcagcagcaggtgatcaattggtactttgacaagaaagacgcagcagcgaaaaatgtaggcgaggaggcgcttaagccttgaaatccatcaacgccagcggaaaaaccgttgaggatgccgtgaaggccggcttgaaagagttgggcctggaatcctcggatgtgacgatcgacgttctcgatgtgggcagcccgggcctgttcggcatgtttggccggctggcgaaggtgcgcctcaccgtgaaggaagaggaagacgatatcaagatcgaaatgcctgtgctcacgttgggcaacaagggcctgagcgtgctgggcgaaaccgagcgcaaagccgagaaaaaggcggagcgcaaaaagagcgagcccaagccggaggagaagcgcgcggagagcgcgaaagaaaagcccgttagcaaaccggcatggatggaagccacggaaaagaagccgggaaagagcgagcaaccggaaatgcctagcgcgcccgagaagcctgcggaacagcccgtggaaagcgtggaggccagcgccccgcgcaagcgggaaccgcgccgcgaatcgcggcccgagcgcgctccgcggcctgaacgcgaaccgcggcccgagcgcgagccccggcccgatcccgttcccgtagagcccgatctgcctcccctggatgtggatgcgctgagcgaatctggcaaacgcgcatacaatttcttgcgggaaacgacgcagcgtatgggcgtgaacgtggatatccgcatggtcgaaagcgaagaacagcttttgatcaagatgacgggcgatgtgctgggcgtgctcattggccgccgcggagatacgcttgacgcgctgcagtatctcaccagcctggtggtcaatcgcgggcgcgaagcctatttgcgcgtatcgctggatagcgaaaattatcgcgcgcgccgggaagaagcgttgcgcaggctggcgctgcgcatggcatccaaggcgcggcgcacgggccgcaaagtcgtgctggagcccatgaatccctacgagcgcagaattctgcactccgctttgcaaaacaatccttatgtcgctacgcatagcgaaggggaagaaccctatcgccgcgtggtgatcacgttgaaataatgctgagggccttgcgcaaatcgcgcaaggcccttaaaattcccactgcgcatatgcgagttttgcattctattcgttgcgaattggctagattgtacattttgaagtgacttgcgttgaaaaaatttctgagattttctttgagccagaaagcgggcttctagaatgcgtgggaaatcgattttctgccctcgctggtttgataaaatttctctttcccattccaactttattaggaagcgcgttgtgccataccgaaatagcgcatgcgtcaaatgcgcggtaaaaagctatgtaaaatattgcaatactgcttgacattggtatttaaatcctatactatgatattggagcctgcttgaaaaaggaaaaatccgcacctttgagagaattttccattcgttcgggcggaaaattcgcgggtttcgtggaactaaggcataataccttgggcgaaataacgaaaagcccgccaagggcattcggaggaattccagcagactcaagacggcagatgccataacaatagagaaaggatgaattgtgatgccgagaccgaagaaaaataccactgctgcatccacggttcaacacaggcgcccgcgcacaaccgatcccgatgcgcgcatcgcattggtggataagcagattcagcgtttggaaacgctcaatgagaaccgccgcgaattgattgcaaaaaccgaagaaaaattgaatcagcgcaaggatgcgttgtgcaaatcggaggccatgctggaaaatgcacgggccaagcgtgagcgcattgtcgcgttcaaagagcgctcttctatgacgaaagcggaaaaggctgccatgcgcgccgaagaaagggccaaaatgaccgctctgatggatgctttgaagaaaaagggcatttcgcttgacgatattattcaggaactggacaaaagcgaggattgattccgcggaaagcgccgcatggcgagaaaattgattttgcgaaattgcatgccaatttttggcacacataaaagcggcaattccatataaggattgccgcttttgatttgccattttcgagcgcatatggcaaaattttgcgccggtatacgaaaagccgccagagggcaaagtgttggcttctggcggctttgtgtttttggaaggggctaaggcgcttcgacaatcgcgccattggcgcgcagcgcctcttgcagcagcgcgatgggcagcgaacccagcgcttcctcccgccgcgcagccgcaaagcgcccctgtgctatccgctcgttcgcgttgcgcgctccagcagcgtgccgtccgcgtcgctgatggtgcccaccacataagtgcggtattcatagccggacgtcactgtccggctgccgcccgccatggcgacgccatttacctgagaatccgaccaggtggcaatggtttgccagctgccattcgctttgcgctggagatataccgtaatgcgagcggtgtagttggcagaaaagcttattggtataacttcgccatcgctatatgctgtgccgtcctctatatccagatacgcagcaatagatttcatgtgcgaatacctatgctcaaagtccggctctgccgacgcaaaaccgaaaagggagagtacacaaaacaggcacaataccacggcgcaacgtttcatcatggctgattcctcctatcagttttctatattataaaatgagcaaacggcattttccggacaaaaaataagaggattttacgtaaatattacatataaaccatccgttattgtgcctcaatcatgcacaccccgcgtgcaaccttcagagcctcttctttgggctcatctaactgtaggatgaaatagtctttgcctttgctccacacaatggaggtgccaacctcgtcctccagcacaagggcggtttctccgtttacactctcatatgtaacgactttatcttcgctgtcgatgttgattgttaaatgttcgtctccttcgtgaaatgtcaacgccttactagcttcatttagatataatactcctacgccacgcaataatacttgttcaacttgatacccttccggaatgtaggaaagataatatccactgttccatccatcgggaacctcgatggtggctccctcctccactatgccaatttcggcatattcatcgttgatttgaatcaaaaagcgcaccacactggcgcgaacggattctatattcgccacggcaagtggcgtagcgatgcagatcaccagcaaaatgcaggcggcgatttctgcaattttaggcacatagcgccggatctgcgccttgcgagcggcgcggcgccgccccttttcctgcgcttgccatttttgcaaaaacagcgcgtaggcccgctcggcttgcgccgcatcgagctccatgcgttcgctttccgcaatcagcgcttgcgtatcctccatttcccgcagcttgagggcgagccccgtcaggcaatcgcaatattcttcctccagcatatcccaataagcgcgatggtctttcacgaattcccttcctccttgcatatggccgccctgattttgctccgcgcgcggctgagatatttatgtatgctttcctccgaaagcccggcgatgctggcaatttccctgtaattcttgtgcttttgcgaatacaatatgagcacaaggcgctccttctccggcagggaatcgatggcccacaaaacggcagatagtttttcttttagttccactgattcctcaacgttttctgtgccagccacttgccaaatggtttcagcgtctatagggatggagcgctcatgccaaaaggcttccttcttttgcccgtcaaaggtcgcatgtttcacggttttcacgatgtatgcctgctgctgtggtacgtcgagtgttttcagcgtagccaggtttttcatcagtttcaaacagctgtcggaaacgatatcctccacttcatgtggatctttggtataacgccacgcaacggagaacatcagacgattgtattttgcatatatctcctccaccagtgtttccccttcctcctagcatttgtatatcgccaaaaaagatgccgccccataattttatccacatcaatttgcatggcgcatttagcgcatttttattatcctataaaaatacattctgcatacatcacctatccgtcatattcttgcacgaacagcatcacaagggcacaaactgtccttgtgatgccattcttctcgttcaattaagctactacttcggcaagtttacctgcttcccgcagtatacgcattccgcgatattcccatctacaattgtataggaatgaggagtttccacatacattgtttttgttacctgcactcggcagtgtgggcatttcccagtgtatcttccatacaacagacatgtgctccccttatctgtggtcgttataggatcaaaagaggagccaccgagcgtaaagtcatgaccattgctgcaagtcacatcaatatccgggatatatgcataagcaaccgtgccagataacaccaatatggaaacgagcaccagtgcaagtatgcgcttcatcaaaactcacctccttaccatttaatatattccgatgcttgatcaagccattggaagctctttatgcctctgatttttccgataccattaagggatacatcctcttccccaccaacgaaatcacatcgtgtttttgtgttttcataatataagacaagcaaaccagcgagaatcggacaaaattcctaccattttttacttctgcatcctccttatccgcggcttttttacccctccgccaccgccatggcgatggtgctattcagccgcgcgacgaaaacatcgccggggataacgccgtgcaggtattcgtccaaaatatcgtacatagcgccgtcttccaggggcgaccatggctttacccacaggttttccgccagcgtgcggtactgggcgatgctctccgcgctgacgacccagctgcgcccttccagccaggcgaccgtttcctgcgcggaggcgagcaatccttccagcgtgaccagatctgcctcatccgtcgtttccgcgatgagcgcctcccattcggccacctcctgttgcgcggctgcgagctggcccggggtgttttcatcgggaaccggctcgttcatgccggggcaaaactgcatctgcacggcgatatccgtgcattcccgcagggactccagcagcgcgatggcggcggaggattgctggctatagggattcacaaacgccaccgtcaaatccacgggcaatagccgcggattctgcgcgccggtggacaagagcagcgggattccctcgcccttatcgcgggcgccgcccaccgggatgcgataccgcacccgaatgtcaaaatccatcgcatcggcaaatagcacgtgcgccccttcgccctcgccgccgcaccagggcgcgaggcgcgcaaaatcgacggcctcgaattgcgccagcagcgcgcggaaggcttccgcctcaaaatcgggcgcgacgccctgcgcaagagcctcgtaggcgtattggcggacgagctgcgaaagcgccgcgcgggcaaactgatcgctggattgctccgagatggcgatatcctcccggccggccagcagatccggaagttcgcccagcagcgcgaggtattccggccaggtctgcggcggctggaggcccagcgccgcaaacgccgcgggactatagctggagctctgctcaaatgccacggccagcggcagcgcataaagcgtgccctcgcgcatgatggaaccctgaatgctggaatacatcccctgcgcatattccgccagggcggcgctatccagcgcgcgcatgtatccctgcgccagcgcgtccgcataggcggcgtcttgggtgtgcacgatgaagatgtcgctggaagaagattgcgtgagaagcgcctgcgcgagatccaaattttggtgcgaaacgatcaccgccgcgccgggattcgccgttaaaaagcgatgttgcgccgcatccaggagcgcgaccatatccgggtgcggaatggcgatgatgttcatctccgcgtccagggtaaggtaatccgccgggtaagcgatggtcagaaccgttccttccgcctgcgcggatagctggctcttcgccacgcattcgtaatcggccgtgagcagatatccgccgctggtgatccacggcacgttgcggctatacgattcggtgaaaatattgcgcacgggctccggcgcgccgccctgcgccagatttgcgcggtagaccgtcttcccctgcgcaaaatagacggcgtcctccccagcgctgtagcacaggttgccgaagtcgtccgccgcggcggaaagcgtgcgcacatcttccatttgcatggaatcgagccagagtttgcgcaaaagaacgccctcgtccccggattccgcgaacaatatggcctcctccccatggtgggccagggcgagaacccgacggctgagcgcggcgtattccccgctttccagatcgaaccaaaggagctcgccgccggtgggcgcatccgcaatgccgaagagcttgttcccgcacaaaaccggctggcgcagggtgctgtaatgggcgtaaaacgcctccacatccagctccgccacgctttccagcgtgcaaaccatccggctttcctcaaagcgcacgcggtatagcccgccccgctctatcgcaatatcggaagcgcgggaaagcttgccctggtcgatggccattacagtgggaatttccgataggtcttcatatgcatacgccagcgcgaacagttccccgccatacggcatgatgcattctaaataacaggataggtccccggccaaatcttccagttccagctcccatgctgtctgctcccaggtttcggaatcgatggcgcggatttcgcccgcgcccagcgcataaaccgcgctttccgtgcatgccgcagagcgaataacgcccagcatcatttcctctgccgtcacgctaaaatccccttccgcccgggcaacgcttcccaggcaggccaaaatcaggcataaggccaatgcgagtctccaccggaatttcatacgtattttccctcctttttcttcgtgttttgctctcattataataaacggttggccttagggaaaacgtacacgccttcaaaaaattaacattttggcaagccaccggtttgcggctgctcctgcctcccttctatgcctcttcccaatgcaaatggggcgtgctgccggaatccggcagcacgccccagacaagccctttcttttttatcgaatgcccagcacagcctgttccatttcttccttgaactggttggcatagaggttgtaatagtatcccttctggcgcaggagggatttgtggttaccctcctcgatcactttgccatccgaaatcacgaggatgcggtccgccgtacgcacggtgctcaggcggtgcgcgatgatgaagctggtgcggccatcgagcgtcttctggatggcgtgctggatggtcatttcggtttcggtgtcgacggagctggtcgcctcgtccagcacaaaaatcgccgggttggccagcagcgcgcgggcaaaggagatcagttgcttctgccccgtggacaggcggttgccgccctcgcccacgtcggtgtcgtagcccttttcaaaggcgaggatgaattcctcggcgttgaccatgcgcgcggcctcttccacttcctgatccgtggcttccaggcggccgtaacggatgttttcgcggatggtgccggaaaacaggtgcggctgctgcagcacatagcccaggtgcgattgcagccacagctggctgcgctcgcggtagtccacgccgtcgatcagaatgcggcccttggtcggctcgtaaaagcggcagatcaaattcacgatggtggatttgccgctgcccgtttcgcccaccagggcgatggtttcgccagccttcacgcgcaaattgaaatcgtgcagcacttcctcgccgcccttgtattggaacgaaacgttttcaaattcaatatcgccatggatgggcggccagttttcgcgcttgggatcgaagttatcgccatacacggcctccacttcgggcgtatcggcgatttccggttcggtttccagcatggtgatcacgcgctccgccgcggcctgcgaggattgcaagtcggcaaagatgcgggccacgttgctgatgggctcgaaaatgccggtcgcgtaggacacaaaggccgaaagcgtacccacgctcagcccgcccacgcccgcgagcagatcgccgccgcccttccagatgatgtacgccgaggcgattgcgcccagcgacatgacgatgggatagaacagcgccgagagcacggccgcgcggatggaactcttgcgcatggtgctggtgagttcctggaactcgccgaagttggcttcctcgcgcacgagggttttggtggttttcgcgcccataatgccctcgttgaaggcgccggtgattttggaattggtcttgcgcacttcgcggtagttggccaggatgcgcttttggaaatacacggcgaacaccgccacgatgggcagcgccaccagcgtgaccagcgcgaggtgcagattcatggagagcatcacgcacgcgaccatgattacataccccgccgaccacagcaaatcgatcaggccccagccgatggtatcgcccaggcgctgggtgtcgctggtcatgcgggcgatgagatagcccacgggcgtgcggtcgtaaaacgcgaagggcagctcctgcaggcgcttaaagcccagcttgcggatgcggtggcacatgcccgcctccacgcgcccggcgaggaaggaaaaggcgaagatcgccgccacctggatcagcacgacggaagcgtatttcaaaacgaaccagcccagtccctccgtttgcccgttggcgatgtacacgtcgatggcttcgcgcgtgagcagggggaacaccacgtccatgcccgcgcacacgagcatcatggcggccacgacgaaaagatgcttgtaaaacggcttggcgtatttcagcagatgcacccagatgcccgcgtcaaaccgcttggtataatcctgttcttcctggaattgcacggccaatcacctcgtttcccgcgcgggggccgtttcttcctcgcccacatcgcgccccagttcttcttcgagcgcggcctgaatctggtatatgcggcgatacaggccgtcctcatggatcaatgcgttgtgcgtgccctgctgcacgatcttgccgccatcgagcacgacgatgaaatccgcctcggagagcgtggtcagccggtgcgaaatgatgaacgtcgtggcgcccacctcgccggagacgcgctgctctttcagcgcttcgcggatggccttgtcggtttccgtgtccacggcggagagcgaatcgtcgaagatgaggatatcgttttcgcgcagcagcgtgcgcgcaatggccacgcgctgtttctgcccgccggaaagcgtcacgccgcgctcgcccaccagcgtttcatagccgttttcgaattcctggatgaattcgtgcgcggccgccgtgcgcgcggcgctgtaaatctcctcgtccgccggatccggcacggaaatgccgatgttggcgcgcaccgtgcgcgaatagaggaacggctcttgcaaaatcaggccgatgcgcgcgcgcaaatggctctttttgatgttgcggatgtcctcgccgccgatgcggatcgcgcccgcgtccacctcgtacaggcgctgtagcaagtgcatcagcgtggatttgccactgcccgtcgcgcccaggatggccaccgtctgccctggctgcaccacaaagctcacgccgcgcagcacggggttcgccttttcataggcgaactgcacgttatcaaattcgatggtgcggttcagcggcgggcaaatggcgttttcatcttcggtttcgggcttttggctgaggatttcgtcgatgcggttgagcgaaacgaaggatttgcccatgtccgaaaggatgcgccccagctggcgaatgggccacagcagcatggatatgtagctgacgaagatcgtcatctcgcccacggtgagctcgccccagccgcgcgccacgatgaacacgcccatcagcagcgtcacgcccgtctgcgtcatgctcagcgcgtcggacgcggaccagtagacggccagcaggtcgcacaggcggcggtgctttttgagcaggtcgtcgttcgcggcgttgaatttgtccacctcgaatttctgccgcccgaacgcgcgcaccacgcgcacgcccgtgaggttttcctgcaaaaccgcgctcattttgccttccgcctcgtccatctgggtgaaggatttgcgcacccagttgaaaaacagcatggcgaagaggaatagcggcggcaccaggatcatggaatacagtgtcatctgcacatggatgcccagcatgatcaccagcgcgacgatgatcatcagcaccgcgcggaagatttccaccacctggccggacaaaaagcggcggatggtttccacatcggacgtgcagcgctggatcaaatcgccggtttgcgccttgacgtggtagtcgtagggcagcacttgcaggtgcgcatacagccggtcgcggatgttcttggcaatgctctcgctcgcctgcgccgtccagcggccgcgcaaatactggaacacgccgttgagcacgttgagcaccaccagcatcagcgcgggcagccacagccgcgcgagcaggtattcccgtccgccgcgcgcgtagagatagtcgttcatggcgccaaagaagttgagcgggttgtcggttccattcaaatggtcgacaatcgcgtccaccgtgccgcccagcacccggggcgtgaggaaaccgatcgtgaccgtgagcgcgaccgtggcgatcgcgccaacatagcgcaggcggttgccgcgcataaagtccatgatcagcctccatcgtctagaagccattggtatccctcccgttttttccaaatccgatcccgtccgccgcgtggagcgctccattcccaggccgcaaaaaagccaccgggctttgcggcccggtggctgaagaattgcgtgatatgcctaaacaggcgcaccccactcagcagacgggcaacccaacaaagatgcgaaaccaaaattgcgcgcacttccccctttgcgcgccgacgcagccatacgctttgccttattcttcatcttgcccgcctcctttctgaattcttgtagaacacagtagctagtatagcgcattccgtgccatattgcaatatgcgccacaaaagttaaccattgccgttggaatctatgcgcattgtatgggtaaattttgtgtatgctcttgacagcaagcggtcgattgactataatgtacttattgttcatgtacattatagtcataggaggcggcgtgtggacatcatcatcagttgcaacacgggcaaacccatctacgagcagatcacctcgcaaatcaaggcgatgatcatgcgcggggagcttcaaacgggcgatcccatcccttccatgcgcgctttggcaaagtccctccacgtgagcgtgatcacggtgcagcgggcgtatgaagacctgcagcgcgatggctttattgaaaggctctgtcacaacaaatggttgatttttgacgagaaatagcgtataataatagt

SEQ ID NO: 993 - DNA, 24934 bp, Unknown
  16S sequences of unknown bacteria
tgcagcgaacttttgtatattatcactgctccgcttctctgtcaatagttttttatctgcagttaattttttcagaactgcaattcgctgataaagagaggagcaggacctcattcagattgtactgttatcaatacaatccataagggatttttattatatctctgtaaattccatatgtcaatatgataaacacatttcaactcattatcggaatagattcctccgatattcttcgccgtgggctcccgcagatatccgcaattttcgtccaatatttcctcgtgccgtatcttccgcctcatcgagttatgtatggataaaaatagaagacatgccgtatcaacgacatgccttcctcatttctctataagcgtttttctcctgttcttcctcttcgggccggtctgcgcccgttccgcaaaagacctcccgtaaatcctgaagataagattaaagcttcgacttgaaagtctgcagagtaaagataccttcgacggccgatgaagaaactcttagaaaattgtcttcggagattccgccagatttttgtaggtttcatatctgctcttagcattttcttccgccagctcgaacagttcttccgctacgtcagggaatgctgtcgtcagctgcgcgtaacgaacctcacccatcaggaaatcacggaaactttctgtcggctccttggaatccaggataaacggattctgtccttccttcttgagatcagggttatatctgtacagatgccagtaacctgctttgaccgcatctttcatcacttcctgagacttgttcatccccttcttgatgccgtggttgatacaaggagcgtaagcgataataatagacggaccgttataagcctccgcctctttgatcgtcttgaggaactggtttctgtcagcgcccattgcgacctgtgccacataaacgtaaccataactcatagcgatgagacccagatccttcttcttcgttctcttaccggaagccgcaaacatcgcaatcgctgccgcaggcgtcgccttggaagactgacctccggtattggaatatacttcggtgtcaaacacgagaacattcacattttcaccggacgcgagaacgtggtctaaaccgccgtaaccgatatcataagcccatccgtcgccgccgaaaatccaaatgcttctcttagcgatataatcttttctgtcgaggacttccttaatcagttccgcctcttctcccgcagcggagacagcttccaaagctgcgataagagcttctgcggcagccttgttttcctctctttcgctgaaggtctcgagataggcggaaatcgcagcttttgtttcctttggcacgttcataccggacagcttctcaacgttttccttcacctttgctcttacctgcttcgcagccacggccatgcccagaccgaattccgcattgtcttcaaacagggaattgccccatgcaggacctcttcccctgctgtccgtagtataaggagaggaaggataggacgcgccccagatagaggaacatcctgtagcattggcgatcatcatggaatcgccgtaaagctgtgtgatgactttcgcataaggcgtctctccgcagcctgcacatgcgccggagaattcgagataaggcgttctgaactgactgttctttacattatccgcagggatacccagagattttttactcttctctgctgcatattcccagttctcaatctgatcgtactgagaagcgatcggctgcatgacgagggattttgtcttcgtcgggcagacgtcttcacagacaccgcatccgagacaatccaaaggcgctacctgcattctgaattcataatcctccagacctttgccctttgtcggtaccgtctcaaagcccgccggcttcgtatccagttcggatttctttacgagaatcgggcgaatcgcagcgtgaggacaaacgaaagcgcactgattgcactgaatacaggtatctttattccatgcagggacattcgtggccacgcctctcttttcataagccgctgtacccggaggaagaattccgttgacgtcggcagtgaatgcactgacaggcagagaatccccctcctgctttgaaatcggtctgagaacgtttttgatgaattccggctcatccttctcttccggtacagaagctttcgcctcactccaggaagctggaatctcgatcttctcaaaagcagtcgctcccatatctaccgctttatagttcatttcgacgatatcttcacccatgaatccataattcttgacaatagattccttcagatgagcgatagcttcgtcgatcggaattactttcgtcagagcgaaaaacgcggtctgcatgatcatattgattctgttgccgagacctatttcctcgccgatttttaccgcattgatggtgtagaaatcgatgtcattttccgcgagaaatctcttcatctccccagggagatgttcttccagcccctctttattccacagacagttgagcaggaaagtaccgcccctcttcagattcttgagcatatcatactggtttacgtatgcaggattatgacatgccacgaaatcagctgtagagatgagatatgtagactgaatcttgttctttccgaatctcaggtgggaaatcgtgataccgccagacttcttggaatcatagctgaaatatccctgtgcgtacagatccgtattatcgccgataatcttaatcgcactcttattcgcgcctacggtaccgtcagagccgagaccccagaacatacagcgaatcgtaccttccggttcggtggacaccccttctacagaaggcagagatttatttgtaacatcgtcgatgatgccgatggtaaaatcgttcaccggatgatcggactcgagatttttaaataccgccatgatctgacccggattcgtatccttggaagccagaccgtatctgccgccgacgatgactgcaggagcatccgcttttccgtagagaacgctcttaacatcgagataaagaggctccccggtagcgcccggttctttcgtcctgtcgagaacggctaacttcttacatgacgcaggaagaacggacaggaaatgcttcgcagaaaacggtctgtagagccttaccttgatgagtccgactttcttaccttctttcagaagcgcatttaccgtctcctctgcggtctcacagacagaacccatcgctacgataacatgttccgcgtcaggagcgccgacataatcaaaaggcttataatgtctgcccgtctcttttgcaatctcatccatgtaatattctacgatatccggaatcgcatcataatgcttattctgcgcttctctgccctggaaatagacatccgggttctgcgccgtaccgatagtcttcggatgttccggcgtcagcgctctctgtctgaactcatttacagcgtccatgtcgatcagctttttatagacatcgtaatcgatcagttccactttctgaatttcatgggaagttctgaaaccgtcaaagaagtggacaaaaggagctctcgcctttaaagtggagagatgtgccacgctggccagatcgataatctcctgaacggatgcagatgcgagcatcgcaaatcctgtctgtctcgtagccatgacgtcggaatggtctccaaagatactgagcgcctgagttgagatcgctcttgcagacacgtggaacacggtaggaagaagctctcccgcaattttatacatattaggaatcatgagcaggagaccctgggatgccgtataagtggtggttaaagcgcccgaagcgagggaaccgtgtacagcgcctgccgcacccccctcggactgcatttccacaaccttgaccttctggccgaagatattttctttcccattggcagaccactcatctgtaacctctgccatgacagatgaaggtgtgataggatagatcgcagcgacttccgtaaacgcgtaagatacgtgtgcggccgctgtgttaccgtccattgttttcatcattttctgtgacattttgttctcctttaaatctttattcttatcaatgtttttcagtcttatctgaaataaaggctgagcctgatagtgacagggtgtatttaatcatgatatagcaagattgaaatcaagtcaattttgttcgacaagtatacaatattcaactaattgtacatatcattaatttttgcagtgaataataatcgaatagacgattttcggcagccttattccgatcagaggagtccggcgcgccggttccatttgaatcttaaaatgattccggctgagaggggaagaggtgtctgcgctgcattcacaccgcggacgcctttccgctctgcggtaaaatcacttgacggagcgccgggaacctacgacacactgaaagcggacgtcattccgctctgcgataaaatcacagcgatgccgctgtccggacgatcagacgaagaatctccccgacactttcatcatagatatacagacgggccgccacggcgcatcctgccccgcctcgctctttttccctgcagagttctttcaggaaccggaatcgatctgccggtttgtgagaaagaatttccatgcggcagacgctgcagtctgcgataattggaaaagatgcattctttcggtccttcagacaataagtccctttttgacagtaaaacttcttatcgtcatttctgcagctaccctccggaccatgagaaccgatgatgcagtgttcggtatacatgacgggaatccgtccgtatacggcgatctccggcagaaactcaccggaactgagcgctgcgtcagacagaagctctccgagatcttccacgctgagctcattggataaaacacccctgaaaattcctgactgttttgcttccccgaccgatgctatattatggaaatgaaaattttcctccgcgattacgggaaccggcatattttcaaaaaaactcagttgtccccggtgagataccgccacgccggcgatgagcttttcatcgtaaagatcggaaagctttccgaggtcggattcgatacgcaattcatcaaaacctctcgttaccgcaggcaggtaaggaaaaattctcaccggcaggtcctcggtgagagatccgaaaatgcttttccgctccgacagaaaaacgcggtacggcagatacagatccagaaagatttcaccttctctgaagatactcgcgttttcggcgatctgcgccagaactgcgggaattctctttcggttctgctccgtttcataaaaaaacagggcgacggccggccggaatcccggccattgcgtaggatccgtcccgtcttccgccacctgtgcggcggatttatcccctttccgtcttttattttcctccggaaagcgttttccggaaacagaatacgccgccttcattttttccagccgctgcgctgtcagctgttctaagccctcccgccgcagagagttcagcagagatgcggaaatcatcggtacgcccgtgatctctatgcggcattcgtccagataataaggcgtgcctccggtcttttccagctgtctgcggacagacgtttcctccggcatacgcttgagagcccgttccagaacctcctctgactgcaggagaacagtcacctccccggcgccgcttttctctgattttccgtactggccgtcggctctctttttcaggtcagcgaccggtatatttgacacataacgatacagcggcgcggatattttcagctgcgccggcgctccttcccctgcgctcagaatcatacgcaccggtatccttcccggaaggatgcggtaagattcctccgcctctttcatcagcgccctgtgggtaatccggtaaatatctgcacccggacgtattctgcccttcacatcaccgatagtgatcctttttcctgccggtgcagtcttcaacatattacccctttcgctgagataggttacgatattcccgcaggaatcgcctcccttccgcacttcgataccgtcgcctatcgacagagactccgtcagcactgcgctgatatgaccgcgggctgcgtcataagaactcaccgttccgatccgaattccctgatgcttcgggatcttttccgacatgagagaagctccgctttcgcccctcagataagcgtctgtcataccgccccggttgaaaacggcaagcaatttttttcgatcttcatccgacatcctccggggagtacccgcagccgccagatccaaatattttcgataaaccgacgttacgacagccacatactgcggggatttcatccgcccctcgatcttcagagaatccacgccggcttcgatcagtgcggaaagactgtcggcaagacacatatccgcaggactcagaagacagttcccctgcggagaagaaagtctctctccgtctctgctcagttcatacggcagacggcagggctgcgcgcagttcccccgatttccgcttcgtccgccgatcacataactcatatgacactgcccggaataagcgatacagacagcgccgtggacaaacacttcgatttccgcttccgtgtccctgcagatctcttcgatctcccgcaaagagagttctctggaaagaatcaccctttgaaaccctgcgcgaaaggcttcttccacaccccgtctgtcatagaccgttccctgcgtactgagatgaaaggtcatatccggaatcctccgcatcaattccgcgctgagccctctatcctgaagaatcagagcatcggcgcccagatctctgcatttttcggcaaaacgcaccgcatcttcccgttcttcctctctgatcagcgtattcaatgtcacatgtacgcgaacaccgtgctcatgagcaaatctgaccgcatccgccagagtttcatcgttaaaattatctgcatttatcctcgcattgaaagaggatccgctgagatataccgcatcggcgccgtttgccacagcggcccgaagctgctcgtatcctcccgccggaacgagaagttccggtatctttctcttctttttctccatcataatctgtcatattcccataagtttcaccgatgacagacaaaaacgtctgccaaatttcgctatttcatattgccggatacgcctgcctaaggaaggggcgcgggaaacctcatacgattttaataacacctcaaaaacggcgcggcaatccgccgcgccgtacaattctatttctcgcctgtcttttttacttttttcgtcttttccgtgcgttccttttcaggatcgataaaatacgtctcgaggagacgagccgccatatatttctccgcatccgccttcatagccagtgaaagtatcaggataaagacttccatccgctgatcatcggcgatatcggtatcctccagctctttcttaatcgtatcgatatccatatctaccgctgccgccagattttttacatagtccttattgatggcacacgcggtattatagagaatcgacggatcgatatgatcttcaaactccgacttgtgattttcgaccagcggtctcatcagaacctcgatctcttcaatcttaaagatccctttcagatagataatcatcgccgtcatcagaatatgagactttgtatatttttttccttccggacggggaatgagttcgtttttcgtatagttattgatcatcgctttcgtgatgacgctttttcccccggacagatccagattttcaaactgagtcttaaaaaacatctccgcctgatcgatatacagatccagatccggaattttatcttcccggatcaacgatgattcgtccagttttttaaactgggtttttatatattcttcgtatctcatgatctccctttctgatatcatccgttttatcacgtttatttaaatcacattatatggtttttaaaaccacattgtcaagttccgtcacaatatttcacaaaaaacagataatctttcggtccgaaaaatctcctacttcatcgaaaatatctcatcacagaccggaggacgcccgtatctcccgccctatccctctgtaaaattattttactttcggcggccgcttcccataatattgataataacacgcttcaattctgccgttatacagtttccgccggcgatccggctctctcggtttcaattcttcttccagggccttgtccgccgtaatcacataggcggaaagtgtctcgtctctcccgagaagagatttgagatgatgatagaccggcctcatctcatccttattcccgatacgctcgccgtaaggaggattgcagatgatcacagcatattcctccggaacggaaagacgctcaaagggacgtacggaaaattcgatacagtcatccacaccggcttcttccgcgttttccctcgcggcggccaccgcctttctgctgatatccgaggcctgaatgcggatttctttttcgtagtcaataataccgtaagcccgtgtccgctcctctttccacacttcctgagatatgcactcccagttttgggagacaaactcccgccccagccccggagcgatattccgcagaagcatagccgcctcgatagccacggttcccgatccgcagaaaggatcgatgaggagacggtctgcattccagaagctgagctgaaccatggccgccgccagcgtctctttgatcggcgccgccacgttctgcacccggtagccccgcttgtgcagaccggcgccgctggtatctatggtcagcgtggcccggtcccggagtatcgtcacctttaccgtgtactccgcgcctgtctccggaaaagtatccatcatatagatttcaccgagatgctctacgatcgctttttttaccgtcttctggcaggcgggttcgcttcgcagcacagattttacggtggtgcagttcaccgtaaattttccgtcaggcggaatccattcctcccaggggagcgcccgcgtctgctgaaagagatcttccgatgtttttgcttcgaattctcccattttgacaagtatccggtctgcgcagcgcagaaaaagattcgagcgcacaatcccccgctcgtcggcgagataagtaatcttagcgtcttccgacttgagaatcttataccccagattctctatctcacgccgtacgacagcctccaatccaaaagtcgccgtagcgatcagttctatcctggacaaatttttcctcctgattattccccaaacacgatcttagccagcgcttttccgacgccgctgttttcattcgtatccgtaacatagtcggccgcgctcttcaattcttctaccgcgtttgccacagccacgccaacgccggcataacggatcataccgatatcatttttattatctccgaaactgatgatctcctccgggcgaatccctctcatcatcgcatatctggccacagccgctcctttatccacccccggcgcggaaatttcataattatcgctgaaggaactggtaatcgcgatgtctgtccggctctcgaacctctccagaaatcgctgaccgtccttcggatcggaaaaacgcacactgatcttatataccggatcccgtaccgcgtcggctgcgggatcatccgtctgaagcatcggaaagcgctcgtcttccggaagtttttcattcatgatacgaaatcctgtgatctcctgaggcggctttctcgaataaaatgtatccttagaatagaaatgataatacatctccatttcatccagtattcgaaatacctccgcacaggtatccggatccatcggcgtaccgaataaatctctccgctcccgccattccatggtaaccgctccattggaggtgatcagcggcgtatccagatcgagaaatttcgcataagggcgggcggaaccgaaaagtctgccggtacagagcataaattggattcccgcctctctgacgcgccggatcatctccagattatagtccggaatcagaaatttactgttgatcagcgtcgcgtcgatatcacttacaatcagtttatacactggatctcctttccagatttcacactcatttacagaaaaaaagggctgcctcttccttacggcagcccccggatctgtcatcctactccatcattttattatccatgcgcttcgatgagatagcgctcatgtgggagagggccattcccgtacccactgcaacgcagtgcttcggctcctccgcaatgcttaccggaatcttcgtcttatcctcgattctcttatcgatgccatacatcagcgcaccgccgccggtgatcatgataccggaattactgatgtcagcggccacctcaggcggcgttctctccaatacagagtgtaccgcctcgcagataacggtgagaggttcattgagcgcgtcatacatctcttcagaagtgactgtaacggataccggaagtccggtaaccatatcccgccctctgcattccatcgtcacggattcctctcgcggaaaggccgtgccgatattcattttcagcgcttccgccgtacgttctccgataaaaatcttatgctctcttctcatatatttgatgatcgcatcgtcgaatttatcgccggcgatctttaccgacgcattcgctacgatgccgcccagagagatcacggcgatatccgtagtaccgccgccgatatcgatgaccatcactccgtcaggtctcgtaatatccagtccggcgccgattgccgcggcaatcggttcctccatgagatagacttccttgcctcccgccatctcagccgcttcgctgaccgcacgtttttccacttcggttacgccactcggaacacagaccataattctcggcttaaaaaaccttcccgaaccacaggtcttgcggataaaatatttcagcatccgttccgtgatgtcataatccgaaataacgccgtccttcagcggtcttaccgcgatgatattactcggcgttcttcccagcatgagacgagcttcctcacccaccgcgagaatttcattcgtatcctgattaagagccactacggatggctcgttgagtacaatcccttttccctgtatataaatcagtacattcgctgtacccagatcgattccaacttctgatgtaaatgccatttttttctcctttgactgaatccctgatccttgtttttatcataccccgtaaataaattatgtaatctgccatctgatcggtttcatcccgttttccaggagaaattcatttgctctcgaaaaatgaccgcatccgaaaaagccattgtatgcggacagcggactgggatgagctgcagtcaggacgagatgcgccggattggtgataagcgaagctttcgcctttgcgtttcctccccaaagcaaaaataccatcggcttttctctctgattgagatgacggatcaccgtatcggtaaagatttcccagccttttcctttgtgagaattcgcctgcgcctcccgtacggtgagcaccgtgttcagaagaagaacaccctgatccgcccactgggtcagacagccgtgagacgggatggtgcagttcatatcctctgccaattctttaaaaatattccgaagcgacggaggcggtgcgattccctccctgacggaaaaacacataccgtgcgcctgtcccggtccatggtatggatcctgtcccagaatgactacttttacattttcatacggcgtcgtcttcaatgcattaaatatatcatacatcgagggataaatgactctcgatgcatattctttttttaaaaattctcttaattttaaataatattccttttcaaactcaccttcgagaatccggtcccagtcatttccaatattaaccataattgtatcctgtattttacgacaaacgcgcttcgataagcgctgcgatttcttctgccagctgacggatcttttctgtatcgctgccttccagcattacgcggaccagcggttccgtacccgacggacggatgagaactctgccgtctcccgccatctttttctctgcggcttcaattgcgcttcgaacggcctcgtcctccagataacgccgcttattctccgtcttcacttttgcattgatgagcacctgtggatagatggtcatttctcccgccagagcggacagcgtcctgccggaacttacacaggcgcgaagaagctgaagagccgcgatcataccgtctcccgtagtggaatgctgaaggaaaatgatatgacccgactgttctccgccgatgacacagcccgtctttcgcatgctctccagaacatatcggtctccgactgcggtgacgtccacttttatccccagctcttccgcccgcttatgaaatccgagattgctcataactgtcacggtgaccgtatcatttttcaaacagccctcttccttgagaagtttcgcgcagatactgattacccgatctccgtccaccggcgtccccgtctcatctaccgcgatgagacgatccgcgtccccgtcgaaagccagacccagatccgccttctcctgacgcacccgttcacacagtttctccggatgagtggagccgcagccgtcattgatgttaatcccgtccggatcgctgcagatgaccgtcacatccgcgccgagaccggaaaagacatttttcgcgagagcggacgccgcgccgttggcgcagtcgatgacgattttcataccgtcgagacggactccggcggtagaacgcacgaattcctcgtataactctgctgcaggtttcccggtcatcacgatccggcccagttctgctccggataaacaatgttccggtatttcttttcttccggtggcgatcgcctctatttcatcttcaatagcatcatcgagcttaaacccttcggagttaaaaaactttatcccgttgtattcgtaggggttgtgcgacgcggagatcacgacgccggcgtccgcatgaagctctctcacgagatacgccaccccgggtgtgggaagtactccggccttgatcacatctccccccgtggacaaaatcccggccgtcagagcatcttccagcatatctccggaaatccgcgtatccttcgctatgagaatcagcggtcttttcttcgattcagccagcacacaggctcccgcctttcccagagccatggcgagctccggtgtcagttccgtatttgccacacctctcacgccgtctgttccaaataatcttgccatcttaatattatcctccagtatctaaaacatcctcgatgtctattctacgataagcttcgcactcaccgccggaataccggctgtgatattgagatcctgcagagactcatcgatatccaccgtcagctctgcttcggtaaattcgttctctttcagcgtaccgcagtcgagatgcagcacaaactgcgacgcttctacatcggcaagatcctcgtccgcataaatcgtaagggtaacggtttcatcttcaaattcgacatttttcccttccgtaagaccgtccagaagaatatcgcccacatcgacttttatcgtcttcgtcggccgtttctgcacctttatcgccgccgcgatcttctcctgatttgaggcgagtctcacaccgtccggaagaatcggaatcagagaaacctccgtcagctctgtaacaccggaaatatccaccggcttcgtcgttatctccgatacgctgtcgatcagactgtcaggacaggaaatctggacagactccggcgcatccaccgagacgctgtattctgcgtccgccgtacctgtcgtctgtacgttcagaggcacagatttggtagagtacatctggacagtcacatcggctttttctgccgacagagagatgccttttacctcattgcccaatttatccaccggcttcagctgtacattcatggattttttccggctggtgacgtcggaaacatcgatgacagcctgaaggttcttgactgacttcacggcggaagaggctcctgtgatggtgatgtgctccggctccactcccagaaatacaggttccttgttggccggactctctccgttaaagagaacactcacgggcttttcactggatacgagagattccacggtaatcttaatctgcgaaggcctcgtactgaccaccttgacattattcggcgcatgcacctccacagaagcgtaatgatctccttttgtatattccgatacgtcgacggtagccgccacatcgtcggaatccagatccagcagatccgcccgttttccctgaagcgtgactttcaccaccgccggcgcctgcgacgcggctaccacgagaccgtcttcctccagagaatcttcgttgagatactcgataggaatattggaataagtcattttgattgtgggattttcgtttccgatgacgaaaatccacagaccgacagcgataatcacagaaaaaatcatcgtaatatattttttcttatctttttgagatttccgtttcgttctatcctcttctctgttttcaggaagaagcggatcggtgttgcttttcatcattttttcctcctgaacagattgaggaacgcgccggaagattcttccgcgtcaagcccggaaagatacgcgctgtacagcagtttttccacagaccgcacgtcgagaaatctcgacagctttccttctgaggctgaagagataattcccgtctcctccgacacgataattaccagagcgtcggatacttccgtaatgccgattcccgcgcgatgacgcgttcccagagtcttttccaagtttttactctgcgtcagcggaagcacgcagcccgccgcatagacacggtccgcccgaacgattaccgcaccgtcgtggagagcggaaccttcataaaaaatcgtttccaaaagagcggcgctgacatctgcgtccaccacagtgccggtaccggcgatatctcccagagcgatctcccgttctatgacgatcagcgcacccaccttattggaagaaaaatagtccaccgcagaacagatctgcgaaatcatgcctttcacctcgttcttatccttgtctccgctgataaaaagcttggaaaagagctttcctcgtccgagatattccaaggctctgcgcagttcgggataaaaaatgatgacgatagccatcagtccgtaattcagaccgttgtaaaggataaagtgcacggtgtacagcttaaaaatactggataaaagcatgataacgatgagaaacaacagccccttcaccaactgcctggcccgggtctggctgataaactgcatcgtcttgtatattgcaaaggctacgatggcaatatcgacgatatccaaaatgcggacacccgatatcacactcagcgccgtatcgataaaattctcaatcacattgatctcctgaaaaaggagcgctgccgcgctccgctgtagatatactattctctacattataagaattttacgctctcttttcaatacgtaccgcacaagaaattacatattaatgcgtaaaaaaacataaaagtaactgtctcgattccattgtgaacggattttttctctcatgcaaatgccggatactgcgcagcggcctctcatcacaaaaaaacagggcgtcttcgcgacgccctgttgtccgaagatgccgtctcttgaaaaccgcggcatctgaaaggatatctgttctgtattcgaggtttacctccgctgattttatcagaagatagacctgccgagattctctgtccgttccgtttaatatctcggttcgaggattccgtacgcctcgtcctggcgtttatatacaaccgccacccggttcgttgcagaattcataaatacgaaaaaactgtgattgagaagctccatctgaagaatcgcttcatccgcgtccatcggcgataaatcgaaagacttggacttcacaggagtcatcgcgatttcctcctcctccgtctccggaacggcgtcgaagagaatctctctgttctgcttataattcttctgaatcttctttttatgtctggtaatctgcgaagacagacggtccaccaccttatccaggcagacattcatgtcattatccgtatattctgcgcggaacataacgcccttgagcgtgatcatcgcttccatcatctgtctctttttcttgtaacccatagttacatttacgacaatatcgtcagagaaaaatttttccagtttctggaatttcttttcgattaaagcggtctgcttttcatttgccgtaaatcccttgcaggtaatgttaactctcatatggttacctcctttttcagttgtatattattattattcggtgtaaagacagggattcctcttttttgtctgcgataaaatacatttatttcatatttttccggctttctctttcggaaattattcacaaaccggcggtaaaattctcatgtggataacttgtctttctgtggataaatctgtgaacaactgaaatcaaaaggtttcttactgtggataaaagcggcgctatccgaaaaaagaacgtccgttttaaaatccaaataatcgttgaaatttacaggttcttcatacttggtaaaaccatgtatttttttgtaaaaccgatattttccgcctgttctgtgagatttcagagttgtggataactctgtgcaaaactatgtgtaactcaaaaaaacaggcggtgtaaatgcctgttcgcaaaaagaagaacggatggccaaaaaaagaaacggacaaaagatatgcccgcctgacctggtctttgcccccacactcgcctgtgaacatgtgttttttagtatttttcacaggacttacttctaagccgcgccatgctcacgaatcgctgaaagattcgcttacgtggatccctttgcccgcgactggcctggattttcaaccacagacacgggcatatcttttgtccgtttttattcagtttccgtatttgatctgccgctgccggaatcgccgttcatgtgtggctgtatgtccgctgtctgcggaagctctctctgattgattcccgccgctaaagaagcgatatacacctccgccgctccgcgggatttcagcagaccgctgcaatgttcggcagtagtgcccgtcgtataaatatcgtcgatcaggagtatccgccggcccggaatctcgcggcccgccgcttcgctgacggaaaaagccccgtccaggtttcgctttctgtcgcgcagtcccagtctgctcatcggcgccgtatcgcggatccggtacaggaaatcgctctgacagggaactcccagccgcaagccgagatatctgccgagaagagccgcctgattatagccgcgtttccgctccttcgcagcatacatgggaacaggaactattatatcaaattcaagcccctcagccaggattttatcgcaaataatctccgataatttgcgcgaaagaaaactttttcctctgtatttaaaatcccggattattttgcgctcgatttcccggtactgcatacaggtgacgccccggtcaaaatttctggtccggttgacgcattcgccgcagatattcaccggataccagtcttccagaagtttgccgcagactctgcacagttttccgttggcccaggagatctcctgaagacagcgggaacacagagagtacggttcatcgggacgaatcggaactccgcaggccatgcaataaatattgggaggaaaaatgatgtccgccgccttttccgcggcggtgcgcatccattcccgcacaccggcggtatctgtttttctcctcgggatatcgtcatatttttttgcatccccgcccttatttttgcgccgcgttcccgcaggaacgcgccataaaaaccgcgtcatactacaaattctccaaaatcagaaacttccgcagcttttcagaaagtcccgaataccgctgatcgatgcgattgttatcgatcatcgcgcgcatcatccgatccgcccccaccagaacgacagcctgtttgcctctggtcacgccggtatataagaggtttcgattagccagcatcggcggaaaatacgccatcggcatgacgatgaccggaaactcgctgccctggctcttatgcaccgtcatggcataggccagttccagctcgtctgcctgccggaactcatactccacatgtttgacatcgtcgaaaacgacagacatcttattttcttccttgtctatcccagtgacaaagccgatatctccgttgtaaataccttcgccgtctaaaaaattatccgtgcgcttccattccagccggtaattatttctgatctgcatcaccttatcgcccacgcggaaaatacggttctgcagttctttttcctccttttccggcgacggaggattcaaaatcgcctgcagttctctgttcagatggaaaataccgagagttcctttcctcaccggagtcaacacctgaatatcacggataggatcgcaatggctgtaataagccggaagacgtctgctgcacaattccttaatcgtatccacgatagaagcctcactgtttctgcgcatcataaagaaatccgtatccggctcgttgcagtaaggatactccccccgattgatccggtgagcgttgactacgatcatgctctccccggcctgccggaaaatctccgtcagccgtacggtgtgaatgatctcgctggatatgatatcccgcagtacattgcccgctcccaccgacggcagctgatccgcgtctcctacgagaatcagccgtgtgccgctgaccaccgcttcggtcagtgcatccatcagaagaatatccaccatggacatttcatcgatgatgatcacatcctcctccagcgggttttcttcatttttgccaaaattcatgctgtcgctgtcctcggaataatagtactccaataagcggtgaattgtcaccgcggatctcccggaagtctccgagatccgtttggccgcccgtcctgtcggcgcggcgatggccacggtaaagccgcaggtctcaaacacatcgataatcgtattgataatcgtcgtctttcccgtaccgggaccgccggtaatcacgcagacaccgttgccggcgcagcttctcaccgcctcatactgattttcggagagacggattcccgtggaattctccgatgcccggatcagctcgtccacatcggattttaccggttttacctgcgcctggtgaaaagcaaacagacggcgggccacgttattttccgcttcaaaataggaggtcagatagatcgacgagcctccgccgctttcttcgatacgcacgaaaccgtcgatggtcagctgttccgccatgtcccggatgtccgctgcgggtacgtccagcatttgagcggcctcttcgcaaaaccggccgaggggcacataagtatttccgccggatgcataacggcccagcagatagcggataccgctggtcagccggtattcgctgtctttttcgatccccagtttttccgcgatctcatcagcctgacgaaatccgatgccccggatctctgtgatcaggcggtagggattttccatcaccgcccgcacggtatccgcgccgtaaattttgtacatccgcatcgcataagacgcgctgataccgtatcccgcaaaaaaaacggatatctccgcgaattcccggtgcgcccggtatccctcgatgatgacatgcgccttggcctctccgattccgtccacctccgtcagccgattcggctcgcgttcgatgatatcgagagtctcttcgccgaacttcctcacgatagcctccgccatcttcggcccgatcccccggatgaccccggaggccagaaattctttgattcccgcttcgtttttgggaacttcttccgtacaatcgaaaaaagcgaactgttcgccgtaagaaggatgagtcttccactcccctctgaaaaggaaagtcataccgcacttagccgtaggaatatttcccacggcgatatactgctccatctcttcatcgttttcgatgacagccaccgtataatagttttcttcgttgcggaatataatctccgcaagtctcccgcgtttttccagcataggcgtcatcctccgtcagcacatacctctgatttctctatgtatcttctccggcgctccgttgccggacaggcggtgtcccatccgacgcctcagccagacatgacagctcccgccgccgtctgacagcagtccctccggcggtgaaccgtttctcggcttaatcctctctatccgcgaaaggtcggcttatacacccttctgttttcgagagtccagaccttatccgaaaaatctcccggcggtacagccgacgcggcttcttccatatcgaaaagtctggcgtcaaaaatatccaagtaatgaagtaattccgcttccggaaacatcggacgcttcggactgccgaactccggttcgtagtgatgagacaggatcatatgttccagcatgacggctttttcatcgtcaagctccagttcctgtgccagccggtcgatcattttgactccctgagcgatatgccccagcagctggccttcaaaagaatatcccggtgagatcccccattgattggacagaatttcgttaattttctccatatcgtgaatcacgactccggtgaccacccagtccggatccagattggtataaacctcgcacgcctttttgcccatggccagcatgcgcttcatgtgaaacagcagaccggacatcaccgcatggtggttttttgaagccgcagggtaatacatcagcttttcccggttgcgttccatcaaaacagtgcagaccgccttcagctgttcgtctgtgatctgtccgatttctcccatgatgtaatcgtacatatcccggcccttctccggcgcggtacggataaactcttcgatatcgaaatcatcgttttccgcagcctgacggaatctcgacactttcagctgctgcttgccctgccactccgtaacggaagcccgtatcttgataattgcattttctccgtagctctccagctctgcaatctccgtatcagaagcgtcccacttcttcgcgctgacatctcccgtcttatcgctgagaatcatatcgatatattttttctgattggaacccacccggactgccatggatttcagcagaaaaaaatcatcaaaatcgctgccggtcaccagaccgtctacataattttttttcaatttatttcacctctcagaaatagattaccatatttttacatctctttcaaacaaaaacgctggcggccgcaggaacaaaaatgtttttttccaaatacgccaagaagcgatttttatttttcatctaacagtatataataaacggatatcgacttaaaatccactatattcgaaaatcatcaggagaaaagcacatgagcaaatcagatttcatccgaacggcggccgtttcacccgctctgaaagttgcaaatacctcttataatacagaccggatcatcgcctgtgccagagaagctgcggacaacggagccgcagtgattctgtttccggaactggcgattccatcctatacctgcggagatctgttcttccagcagcacctgtacgaaggaaatttaaaagggctctcccggattatagaagcttccgcttccctggacgcagtgatcatcgcaggcttttacctgcgcatcacgaatcgtctctttgactgtgcagcggtaatccggcgcggaaagctgctgggtgtggttccgaaaatgtttgcggaaaaaggaacggaatcatctgaaagccggtggtttgctcccggcgtccggatcgcttccgaaatccgctccgtccgtctcttcggtgaagatattcccttcgggcgtcttctcttttccgatgacgataacggcatcaccttcggcgtggaaatcggcggagaatcggcgctcccggtatctcctggcgctcagctgtgtctcggcggcgctcagatcatctttcatccctgcgccagcgctgaaaccgccggaacagcagacgcccgccgagatctcgcgcttcacagcagcaaaatcaatacggccggttatgtctccgcctcctgcggcgtctgggaatccaccacagacgcggtctacggcggccactgcatgatcgcggaaaacggcagcctcattgcggagaacaaaagatttctccgctccacggacatcctgtacggagaaatcgacatcttcagcattcagttcgaacgctcccgcaatccgatgccggaagaatacgccgctgcttttgccggccggagcggcttttcacaggtcctcctcgatccgcttcctaccgtcgacaggaagaaggagcggctgctgcgcagatatgaaaaaaatcctttccttccttccgatccttccgctgcggaaaaatactgtgaagagatcttctctattcagacagccggtctggccaaacgtctggagcacgcacatgcgaagactgctgtcctgggaatctccggcggactggactccacgctggcccttctcgtctgcgcggagaccttccgtattctgggacgtcctgcaaaggatattatcgctgtcacgatgcccggcttcggaacgacggaccacacctatggcaatgctctgtcgatcatgaaactgctgggcacagatatgagagaaatttccatcgctgacgcggtgacagatcattttaaagcgatcggccacgatatttccgtccgcgacgtgacttacgaaaatgcgcaggcccgggaacgcactcagattctcatggatatcgcaaatgagaccggcggcatggtcgtcggaacaggagatctgtcggaggccgcgctgggatggtgcacctacaacggcgatcacatggcgatgtataatgtaaacagcagtgtcaccaaaacactcgtaaaagcggtagtcacctggatcgcggatcacaaaacggcaggcccgcgggaagacgctggattcagttccgacaacgccgcactgcgcagagcccttcacgatatcatcgacactccgatttcaccggaactcctgcctccggacagcgaagggaaaatcgttcagaagacagaagaacgggtaggaccgtatatccttcacgaatttttcctgtatcatacgctgcgctgcggagccgcaccggaaaaactgctctatctggcggaacagacctttgaagatgaattcgaccgtccatatatcaaaaaatggctgagagaattctgccgcagattctttcagcagcagtacaagaggaactgcgcgccggacggtccgaagaccggccctgtttcgctgtcgccccgcggcggtctgagcatgccgagcgatgcagacgtcttttcctggctcgacgaaatcgaccatatggaataacaaaaatacagaattcactgtgacaaaaaatttccggccggaaacttaccggccggaaatttctcttttcaatatctcactttctctgtcagtattcttccatcgatattccaagcctgcctatacctcagagagctctctgacggcggcttcaaaacggctgagaccttcgtcaagctccttctctgtgatattgagcggcggaagaaaacgcacgacctcgtgaccggctccggcgagaagcagttttttttcggcagccccgctgatcgccggattcttccatccgtctttcattctgacgccaatgagaagtcccatgccgcgcacctcttctatcagatcatatttctctttcagctgagtcagtccccggaaaagatatgcgctcatctcatctacatgagaaagcagatcctcatcgatgagcgctttcatcacagcattcccgcaggcacaggccagcggattgccgccgaaggtacatccgtggtctccgggaacgaagaattccaccgccctttcggaggctaataccgctccgatcggaaatcctccgcccaaagctttggctgcggtacagatatccggcatgacgtcaaacttctgataagcgaacaattttccgctccggcccatgccgcactgcacctcgtcaaagatcagaagcgcatcataccggtcgcacatttctctcacttctctgagaaaaacaggatccgccggaataatgccgctttccccctgaaccggctccagtatcacgccgcagacatccccgttcatcagcgctttcaccgatgccgcatcattgaagtccgcctcatagatctctcccagaagaggccggaagtctttccggtatttttcctgacctgtcacagacagagcccccatacttcttccgtgaaaagactccttcatgcagataattttcgactttcgctctcctccctttgccttaccatattttcgggcgattttcagcgctgtctcattggcttctgttccgctgttactgaaaaaaacacgatccattcccgacgccgcgcacaaccggtccgccagctcgatcatcggaggattccagtacagattggagacgtgaatcagttcttctgcctgattcttgatcgcctccacaatctggggcgcggcatgccccaaacaattgaccgcgatacccgatacaaaatccagatattcttcgccatggatatcggtcagccatggaccatgcccctttacaaaattcagatcagaccgactgtatgtattcatcacgtgattttcgttcattttcgcttcctttccgtctcgctgatttccggtccccgcaaagctcccgtcgcaggtctgtgccggcctcacgaatttctccgcttttatcgattcgtctctcacagactcatagactcatagactcatagactcatagactcatagactcatagactcata

SEQ ID NO: 994 - DNA, 3885 bp, Unknown
  16S sequences of unknown bacteria
gtcgttataggcctgccgcgcctggctgtagagctccggcacacccgaggcgacgccgagtcccgagccggaattttcggccacgacgacaaaggcatagggtttgtcggccgattggcaaaatcccacaaaccacgagtgcggggtggattgctcgcccacctcggcggtgcctgttttggcgcaaagctcaagccccgaaaaggacgagtcgccgtaggtttcaattacgttgtttcgcatatattccttaagcatatttgcgctgtccgagcttatgagtcgttcctccgagcggttttctccgcggatttccaccccgtcgggagtggttatcgacttgacaatgtgaggggaaacgctgaccccgccgtttgccaccgccgccataaaacgcatatattgataaggattggcaacgtcggtatactgacctattccggcccagccggtgtcgatttcgtttgccgacgaaatgtcgaatttgctttcggcgcatttaatgccgtccatataaagggttttgttgaagccgacctcgttggccgtgtttgtcagggcgcttttgccgagatcaacggcggtctgagagaaaacggcgttgcaggagcgggcaagtccgtcccgaaggccgagtgtgccgtggtttccgagacagctcagccattcgcctccgatggtcacgccctgcttgcaggtgtatgtgcggcttttgaaatccgaaaagttttcaagagccgacagacaggtcacaagcttgaaaaccgagccgggagtatactgtcccgacagcagacggttgacgtaaacgccctccttttgctcgtcctttgaggatttttcctctgggtcgaaggagtaggagctgaccatgcagattatttccccggttttatagttgcacactccgacggcaccggcgcggcttccgaggctgcggagcgccgtgacgcaaaggtcggaatcaagggtgagctgcatatcgttgccctttccgctttggttatatgtgccgttgagcacgttgtatcccgtaagctcgggcaaaaatgcggcgtgaacaccggtggacacaaatccctccaaatcgccgacggcgtgggcggtggccactcttgtgtaataattttcgttaaaatgacgttctccgtctcgggtgcttgcaagcacgacgcccttggaatcggttatgtctcccgcgcgcagcagacgtccgtcggaataaaggtggctgttggtgggataggttgcccacttgccgccgtttacaaagagccgtgcataatagaagaaaattcctgcgatgaaaagaacggtgacgatgataacggcagtcgaccgtgaaattacctgtttcagtgctttccgcctccttcataagaaaccgcgggttcggaatatttaagctttttgggcggtatttcggcgcccttgaaaaacgcgataaagaggaaggccgccacaaggcttgtgcctcctcggctgacgaacattatggtaacgccggtcaaaggcagtatgtcggaggagccgaaaatgttgagcgccgtctggaaaaccataacggcggctgcggcgcacaccgaaatggcaaaatagggagatcggcatcgctttgcaaggcgaacggcgtaaaagcccaaaccggcaaaacaggcggcgacgcaaaaggcgatgagccagccccattcttcgcatactattccgtatacaaggtcggtgtcggcggcaattatgccgtgaagggtcccgtttccgcctcccagcccgagaatacctccgctggcggcagccacgagagtccttgtctgctgatagccggctcccgaggcctgctcccaaatgtgcccccaaacgccgaaacgggtggcaatatgtgggaaaatcgtcatgagaaggattgcgcccacaacggcggcggcaataatcgcgatgacaaatttaatgtcggtctgcctcatgagcaaaattacaatcatggccacaaaaaatatggcaacggcgccgaagtcgaccattttggcaagtgcggccatgcaggctgccgaaaatccgagaaaggcaaggcggcttttaaaggtcaaatcggaggggtaaagggcggccgagccggaaaatataaaggcaacctttgcgaattcagagggctgaaaggttactccgccgatgtttatccagttgcgtgagccgttgatgttgactccgaaaaaggcggtgagaaaaagcagcgccacggcgaacacggcaatatacggacgaagtgtcagagcaacgttttgatgagtcagaatgacggtgagaatcaaaaatcccgcaaagcccatgaaaacgcaggcaacctgctttacaaggtcgtcggggtcgatgcaggcggtcacggcgaggcctatggtgcacagaaaaagcaccgcgctttcggcgattatgcgaaagcccttaaaaaaccgtgtggccgcaaaatatatccactgagtggcaataagcagcccgaagctcaggggaatgttcatgttaagctcggaagaaaaacgaaggcagatctgcccgcacataatcagctgaaaaagtgtcagcaccaaaagcagcagcgctcccgacggctcgctttcggcggcgggaacggttttcggcgccgaacggaattctatcggatgcccgcatatctcaaagcggtctccctcaaaaatttccgttgcttttttaatcttttcgccgtttaaaagcacctctccgtcgagagggcagagaaaccagccgttttcccgctcgtaaagcatggcgtgctttctcgaaacggtctgaccgggaattcttatgtcgcagctttttgcacgtccgattatgttttgggcggcatatacataaagcgagttgttgccgccgagaaaaagctcgcacagcaccgacattttcttcctcgtcccaatataaagccgacaccaaagaaaggcgcacagcatggcgagcaccggcagaacgatgcgggaaatttcgagatatatctgataaacgtccgacatcggagacctccttcagttttgcggttttgatttctgacgaagctttgacggatcctcgtcggtccagccgtcgatgtgacggcgttcgagggcgcctatgaccttttcgtaaacctttccgtaggtcttgtcaagatcctcggcgaaaagctttgcctgctctcttgcggtgttgccgtcggcggggcaggggcttttaatgaccgggaggtgaagcttcttggcggtgttttcggtctgtttttcggaaacatacaaaagaggtcttatcatggttatatccttgcgggaaagataggtcaccggctgaaaacaaccgatttttccgccctgaagcagattcatgaaaaaggtttccaccgcgtcgtcggtgttgtgaccgagggcgattttgttgcagctcgcagcctttgcggcgtcgtgaagaattcctcttctcatgcgggcgcacatgctgcatggattgctctcccgcctgacctcgaatattatttcataaagctgagtcgttctgataacgggctcaatgtaaagacggcggcaaagctcgattatctccgaatagtcggttttcttgccgaaaaagcacgggtccaccattatggctttgacggtgaatttttttggataaaaacgtttgagctcgccgagagccgccaaaaggcaaagcgagtcctttcctcccgaaacgccgacggcaatgcagtctccgtcgtcgatcattcggtatttgtccaccgccttgcggacgatgcttaaaagctcgttcaaaaaaatcaccccgaaaaaagaaaaaaccgcatcaaagcaaaaagccgatgcggaaaatgaatggagcggattacgaggctcgaactcgctacct

SEQ ID NO: 995 - DNA, 18341 bp, Unknown
  16S sequences of unknown bacteria
acgaagaaagaaggcaaagacgtgccaaggggtgccccccctggacccccaggcagcttgccgactttttttcgggaaagccgacaggagggcggacaacaaaatcaaggatattaaataaagtgctacgccccgaggatttagcggctataaacccatgggtttttggtaataacaagcgcccgccaaaaaacggcgggcgcttgcgggcctgttatgtgacgatttccgctccggcgcggacaaacatctgttgggcggctttgcggagaacatcggcgacgaactcctccggataccgactcagggcatcggacagctcccgcagcttccggccatcctccgagggctcccggggcttcaaatcatcgtacattttctcgagcaggtggatcatctgctgattcgtggcttctctcgcttggatcagggtcgcgatggactggcgggagggatcgggcgcgttcagagacggttcgcccggctccattttttgaatcgcctcgatcgcctcgtggatataggccgtgtcccgcaggataaggtcgatcctcgagagaatgtctcccacggtcaaccgggagtccccggtatcggcggccccggcctcctggagctgtgccggtacgccgtcatccgcggcggtatggatggtatcgttcatattcttgtcctccaaattttcattcggcggacacgccagaagacagatttcgtgttcgcttaccatacgtgcccgccctttttttacaagacctctggcacgcttcggataggtgggttctaacggggttccatcctcgttccgaacttccacgacccgtttgtttttttcaatgggtatcctccccctagcgttttattagcagctctgtttttgtggatgggtggcgtccccgggcctgtgagggcttctgcagtttcagtatattctgaaaatggagaaaagtcaacataattcggacgaaaaaacaataaaaattggcatatagtacaaatcacattccggttaaccgccggcgccggcctcgtcgagatagatctgctcttctaccccgatgtcctcgatgcaggcgtaggtgccggtgaggatatagaccccgttttccacccgcccgtcccggttggacgaggtgatttcggcccgccccaattcggcccgctcccgctcatccagcagcgcggcagccagcgcggcggcctcctcctccgtccggctgaccggggaaggctcaagcagggcgtagcggtcgcagacaaagccgacgggcaggaccttgccgtaggcggtgagcatgtgccgatgggtctcgagtacgtgatctttgggaatggcgccgtcggtgaagagcgggacgcggatgccgaagagggtgaataccggccgaaaaatggaatcgcccgtgggaaggagaagggtctcctccaatggaacctcggcggtcagagtgcggctggtctcggcgatcacccggccggacgagcgtcggagcaggggcccggttttgctttccaccacgccgctgatgagcagggtatcccgagtgacggcgtccccggcctgtaccatcgcctggccgcctgtcacctcgattttcaggacgcgcccgtcccgggcggccttgatgttggagggaaaagcgccgtcctccatcggggcgtggctgccacgctcccggaccttgacatggacggtgctgccctccaggttgacggccagccaggtcagatcgggcagggactgcagggccgtaagctgcagggaggggacatccagcttcctaaaatcaccgccttcctggacgccgaggggttccagcacctcgcggatgctcgcctccggcacctgatcgttgccctcgatgttgacgatccagatccgtcccgacaggaactgcagcagcagcgcatagatgaggacgccggcggcgatgccggcccgtgcccggtagcggtggaggaaaaagggaagcccgtgccgctcgagcacccgcatccgtacacaggcttttttagcaagggggcgcagcttcttatactgtctagcgtaacagcaggtggtcatccggacaccttgacggcagctgttccacaaagaaaagcccgctttggcggctccgttaaggagcttttccggaaagccgccttcggtttccagccggacccatcccagcagccagcgcagaaaacggataaaaaacatgccgatcctctcctcttcggatcctgccggctcttcgccgggtcaggacaggaattccacggacagcaggaagcccgtgatcaccgcgcagtcctcggtcaggcagttcatcaccagcccgcgccccatgaagcggatggtgccgcttgtagtgctcaggcggataagcccttcctcatattcttggatgccccggcacccttcgatcacgacccggcggttgcccgccatttcgagccgggcacagttgccgagcgccccctcggggagctccagcacctcttccacccgcctggtgacagccgccgcccgggaagagggcgggcaggtccgtgtgcgtcttctgctcatacatgtcgtcctttctaaagatagaactggatcaataacaccattgctccggcaggcagctccggctggggacgggcgcggagtagaggtgtcggggccattccggacttggcggaatggtgggcggccggtccaagacagcgttcaaagggagtccggctggggacgggcgcggagtagaggtgccggggccattccgtgcttggcggaatggtgggcggccggtccaagacagcgttcaaagggagttcggctggggaccggtcttgttcttctatttttatgcacgggaaaccggaataatgcggcgggacaaacatatgtatgaaaggagaaggctgcgatcaggcggacggcgacgaggagcgggagggctacacccttgcacgcggggaacgagccgctctgagtcacgcgctggatgaaagggtgaacgggatgtttgtcaaaaccgtgcgggcggcacatctgaaaatgggggggctgctgatcctgattctggcagccggcgcggcactgctgatctggccccaggcggcggcaggaggggtaagccgtggcctctccatctgctcgggggtcatcattccctctctcttcccttttttggtgctggcagggtttctggtgcgttccgggatcagcgcggcgctggggcggcgcctggagggagtgacccgggccctgttcggcctgccgggctgctgcgctccggggatcctgatcgggtttatcgggggataccccaccggcggcatggcggtgggggaactggtcgagagcggacagatcacgggggaagaggggcggcggatgctccgcttctgcgtcaacggcggcccggcgttcatcatcagcgcggtgggagccgggatgatgggcagcgtgcggttcggtgtggtcttgttcaccgcccatctgctcgcatccctgctcatagggattgggggcggtatcggcgcccggcatcgccgcggagaaccgcccgcctgcggaaaaaagacctgtatagccggaaaacggacctcccccgcggcggcgttcgtggaatccgtcaacgcggcctgccggtcgctgctgtatatgtgcggttttgtggtgctgttcgccgccctgctcgccttgctcgatgtttcgggcgccacggcggcgttcacccgtttcctgacactgcccttcgcgctggccggggcggatacggggacgctgtcttcgtttctgccctgtctgctcgaggtcagctgcggctgcgtcgaggcgtccgggacgggggaagcggcccctctcctgctgggggccgccctgggctggggggggctgtccgtccactgccagcttgcggcttcccttcacggacagcggctcatgggacggggatttttcgccttccgccttctccacgcactactcggcggcctgctgacgatggtgctgctccgcttcgttcccatcccggtgacggtctggcagccgtcgaccggggcgctgatcaagcctttttccggccccgtcgtggcgtcggcggccctcctgctcatgtgcgggatgctcctgctgaccaccgccggtctgcggcagatccgggaaaatcgaaaataaccgtggattttcgacagcatttctgctatactgaagggtgtccgacgatggaagagacggcggcggtgccgcaagaaagctcttcccgcgaaaaaggaggtccccttccatgcgccgcaagctctatggcaacaccatctcccccgcctgcgaggtatgcgcctacggtcgccgttcttcggacggaaacgccgtgctgtgcagccggaaaggggtcatgcctctgtatcatcattgccgccgcttcgaatacgaccctctccggcggattccgacccgcccgaagggccccggcaagttcgatgaggacgacttccggctcgactgaatggcctttgacggggatggaaaatttttcttgtcccgcggggcaaaatttgacgaaaaaccaggcagccggcacttgacaaagcgccggccatcgtgtataatacgtgtaaagctttttcctttacagtgaaacgcttggaagcatccgggcgtttttcctttggtctgtgggaatcgaaatgcggtgaaaggagaccggtcatggccaaaaacctcgagattgcgctgttgttcgatttttacggcgatatgctgaccgacaaacagcgggatgtggttgagctctactacgataacgacctgtctctgtcagaaattgcggaaaacgaggggatcacccgccagggggtgcgcgattccatcaagcgcgccgaggcccagcttttggatatggaagaccgcctccatttagcccgccgtttccgtcagatgcgggaggggatcgccgccatccgccaagctgcgggcgagatccaggaactcaacgaccgcttcggctattcccgcgatatcgaggaaaaggcccggcagatcgccgccctttccgaccagctcgccgaggcctgaccctccccgcgattttgcatgaaaggcaggtatccccgtggcgtttgaaggactctccgacaagctctccgccgccttcaagcggctgcggaacaagggcaagctcaccgaaaaagacgtgcgcgacgcgatgcgggaggtgcgcctcgccctcctggaagcggacgtgaactataaagtggccaaggatttcaccgccgccgtcaccgagcgggcggtgggaagccaggtcatggaaagcctcacccccgcccagatggtggtcaagatcgtcaatgaagagctgaccgccctgatgggtggccaggcggcgcgcctggcgtcggcaaaccgtcctccctgtgccgtcatgatgtgcggcctgcagggttcgggtaagaccacccattccgccaaactggccaaaatgctgaagagccaggggcaccgccccctcctcgtcgcttgtgacgtctatcgtcctgccgccatcgcccaattgcaggtggtcggggagaaggctggggttccggtattcgagatggggcaaggcaacccggtcgagatcgccagacgggcgctctcccatgcgaaggaccacggcaacgattatgtcatcctcgacaccgccggccggctccacatcgacgagaccctgatgaaagagctgcaggagatcaaggccgctgtttcgccgggggagatcctcctggtggtggatgccatgaccggccaggacgctgtcaacgttgcctcttccttcaacgaggcgctcggcatcgacggcgtggtgctcaccaagcttgacggcgatacgagaggcggcgcggccctgtcggtccgggctgtgaccggcaagccgatcaagttcgccggcatcggcgaaaagctcgacgatctcgaggtgttccatcccgaacggatggcgtcccgtatcctgggaatgggggacgtgatgtccctcatcgagaaggcgcagcagcagatcgatgaaaaggaagccgaggccctcgcccgcaagatgcagcaggataaatttgatttcaacgacctgctcgaccagttccgccagatccagaagatgggggacatcaaggggatgctcgggatgatccccggtgtcggcaaacaactgcgggacgtggatatcgacgaaaaacagttttcccggaccgaggcgatcatcctctctatgacgggggcggagcgggccaagcccgacctcatcaatccctcccgcaagcgccgtatcgcggcgggctgcggcatgaaggtggaggatgtcaaccgcctgatcaagcaatatgagagcatgcgccagatgatgaagcagatgaagagccttggcaagaaaggcggccggggcctcgcggggctcgccggtatgggccggggcggtcgccggtttggtttttagtattcaatccatggatgtggttgaagaatatagaggcataaccgcggggccgacccgtggttacccatctaccatttcactttattggaggaacaacaaatggcagtgaaaattcgtctgcgccgcatgggcgcgaaaaagtccccgttctatcgtatcgtggtggcggattcccgctatccccgcgacggccgtttcatcgaggaaatcggctattacaatcccctcgaggagccggccgtggtgaaggtggatgtcgaaaaggcgcagaaatggattgccaacggagcccagccgaccgatacggtcaaggatctgctcaagagagccggcgtctgattctggaagaacatgtgatgcggccgccgcgcggcggtataggcatcgcgtcccatgaatgtgaaaggaaaggcctgtatcatgaaagaactgctcatcgacatggcgaaaggcttggtcgaggatcccgatgccgtcaccgtgaccgaggacgcgcccacggaggatggaaccgtcgtgttccatctgcgggtcgccccggacgacatgggccgtgtcatcggcaaacagggccggatcgccaaggcgctgcgcacggtcatgcgtgcggccgccacccggcagaacgccaaggtttcggtcgaaatcgacgactgatgccctggcggcaggcgaaacaccctttgcgggccatgcatcgtggcccgcatttcgcgtctgtagggcaggcgcggggccgcgccgtttgccggcctcgcgtctttatccctggggccgcagtcccttgcttatcgaggtttttgtgatatcgttggggaggttctcctaaaaagagaaccggcaggatcactcggggcccggggatatcccccagcggcgcttttgcctccttttgccgccggggataaaaggatgtggccgcgcattcgatatccttttcagcagcgcttgtgccgcgcaggcaccccctttcttttcgcaaagaaagggggaaaagaagcgccagggggaaggccccctggacccccgggtggttctgtcgattttctctctatgaaaatcgactcgaacgccgccacccgaaccggcccaaataaaaaaggggctgcggccccgcgggttggggctgccgtcttttttcagccctgcgcccaatcggtccccgggggccagaggccctctggagccgggccggccttgccctatgccgcgttgtgttggacagccggccgccgcttcgcggagaaagaaggaggacaaacatgccgaaacagacctatttggaggcgggacaggtcgtgggtacccacggcgtccggggggagctgcgggtccagccttggtgcgattccccggcggttctggccgccttgtccaccctatatctcgacagggacggcgtacagccggtcaaaatcaaggcccgtgcccataaaaatatggcccttgtcaagctggagggggtggataccgtggcagaggcggaagcgctgcgggggcggattctctatctccaccgggacgacgtgaagctggaacccggccggtattttatccaggatctcctggggcttcggatcgtcgatgcggatacgggagagctttatggagagctcaccgacgtcagcgccacgggtgccaacgacgtttaccacatgcggtaccgggacgggcgggagatcctgatccccgccattccgcaggtgatcgcacagattgacacggacggcggcgttttgcgcctgcgtcccatgccggggttgttggatgatgagatttgatgtattgaccctgttccccgaaagctgtatggcggtgctgggggagagcatcctcggacgggcacaggaaaaggggatcctggaaatccacgctcatcagatccgggactacaccctcaacaaacagaaacaggtggacgattatccctatggcggcgggatgggaatggtgatgtacgcccagcccattgccggcgccttccgggccgtgtgtggagaattgggcacccgcccccattttgtctacatgtccccgcagggtacggtcctgacccaggagcgggcgaaagagctggcggagctcccctccctctgcatcctatgcgggcattacgagggggtggacgagcgggcgatcgaggcccttgtagacgagcagatctccattggggattatgtccttaccggcggcgagctgcccgctatggtcctggtcgattgcgtttcccgcatggtgcccggagtgctggcggatgaggtctgttttacagaggaaagccatttttcttccctgctcgaatacccccaatacacccgtcccgccgtatgggaagggcgggaggtgcccgaggttctgctctccggccaccacgcgaacatcgccaaatggcggcgggagcaatccctgctgcgcaccttgaggcagcgccccgatctgctcgaaaaggcggatctgacggagaaggaacgcctctgggtcatgcgtcataagctgaaggaagagacaggtcgggtggattcatacgatcctgaaatggcacacacagacaaaaatgacgaaaattgacaggagtatttccggattattcggtttatctcaccaaaaattattcacgcttcttgttagaacaaacaaatccgtcaacttcttttttcggaaaatagggcagccagccaaaaatgcggttttaggcgatttctgggggcaaaaccgattgacggggcgggtaaatgtggtataataacactattccatcagggtttttgtttagaatggcgttagagagatgagagggagtttccgtcatgtatgtaaaagacgttttggtccaaaatcaggttggcctccatgcccgcccggctaccttcttcatccagaaggccaacgagtataaatcgtccatctgggtggaaaaagaggaacgccgcgtcaacgcgaagagcttgctgggcgtgctgtccctgggcatcgttgggggaaccaacatccgcatcatcgccgacggcaatgatgaggcggaagccgtggacggcctggtggccctggtcgaatccggcttcgcggaataagaccggcggtttgttctcccataagcgactggttctatgaaacgcggctgtcttcggcagccgcgctttttccgtgtggccgggtccggccgaggaggcgcgctatgaatccccttcccgataagaaccccaaactcgccgagctaagacggcaggcgatggccctgccgctcgatcccggcgtgtatatcatgaaggacgcccgcggcgacatcatttacatcggcaaagccaaggcgctgaaaaaccgggtgagccagtatttcggctcggatacgaaccacaccgaaaaggtgcggcagatggtccggcgggtggatcacttcgataccatcgtggtgggcagcgaattcgaagcactcgtgctcgaatgttcactcatcaagcagtataatccgaaatacaacatcctgctcaaggacgacaagggataccattatgtccggatatccccgccgccgtattcccggatatcggaagccaagctcaagcaggacgacggggcgcggtatctggggccgtacctgagtacctatgtggtccgggaaacggtcgacgaggccaaccgggtcttccagctctccacctgttcccggcctctggcctacggaaaaagccgagagcgtccctgtctgaaccactatatcggccagtgctgcgccccctgcaccggacgggtcagggaggaagattacgccgaacgggtgggccaggccgtcgagctgctcacccaaggatcgagccggatggccgcgctcctgaccgaacggatggaggaggcggcggagaacctggaattcgaaaaggctgcccggtatcgggaccgggtgaacgccatccgaaaaatcggacagaaacagaaggtggtcatgtcccgcatcgaggagcaggacgtcatcgccgcggcgcaggggccggagggcgtctgtttcgcggtgctccggtttacaggcgggtcgctttcggataaagaggattttatcattgaggaggccgacgccctgccgtcggtccgttcggagtttctccggcggtattacgcgatccgggaacgggtgccgtatcaggtgacgatcgacggcgaggtggaggaccgggagctgctcgaagactggctgaccgaaaaggccggcggccggcggcgggtacggatcgtcctgccccaaaagggggagcaggcgcagctgatcgctatgtgccgcgacaatgccgccgaacggatcgcacgccagaacggtatgtcgggccgggacgcggccgctctcgacgagctggcccggctgctggggctatccgcgccgcccgtgcggatcgaaagctacgatatttccaataccggcggcagcgacaacgtcgcagggatggtggtattcgagaacggccgtcccctgaaagccggataccgaaaattcaagatcaaaaccgtggacggacaggacgactacgcctcgatgcgggaggtgctgtcccgccgcatggaggaatacgaggcgcacaagggggaggacaagggcttcggcaccctgcccgacctgatcctcctcgacggcgggaaggggcacgtggcggccgtcaagcccgtggtggaccggtacggctatgccataccggtattcggtatggtcaaggacagccatcaccgcacccgtgccatcgcgctggacggcggcgagatcgccatcggggccaagcgctccgcctttaccctcgtttcctccatccaggaggaggtccaccgctacgctatcgccttccaccggcagcagcgggcgaaaaacagcgtggggaccaccctgaccaaaatcccggggatcggcgaaaaccgcgcccgtctgctgctgcggcatttcggatccctgcgggcggtgagggaggccgacgcggacgcgctcgccgcagtcaaggggatgacccggccggcggccgaggccattgtgcggtattttgagcagcaggacgcggaagaccggcgggacggctaaaaaacagatgaagccgctaagaccgtccggacggtcttcacggcttcgaggaatccgggtttatacgcaaaaaaggggttacgattggtccggcgggcgcggcccgcggtccttttcgcacagataccgggaaaccaccagcagcgcggcgaccgccgaaaccgtcaggcccgccgcgaggatgccgacggcggtgatggccagaatatccgtcagcatgctggtcatccgcatgttgtcccagatatgccagattaggcccccgccgatgacggccggcaaaaagccgaggagccagcatgtttttttaaacagtttcaaacccgtttccccttcatacacgattcctccatccgtggccggcaccggcggcggtttgccatatacgccggtgaacccgaatttttccgcggccaggacggccacgtcccggcaatccatccagaaagagaggctccggcatgcccaaagtcggtctgcggatactgaaatccgcgctcgcggtctttttatgctttgtggtgtatctggtccggcaggacggcatgccgttctattccgccatcgccgcggtcttgtgcatgcagccgtatgtgcgtcacagttttaccgccgcgctcaaccgcaccgtgggcaccctgatcggcggcgcctacggcctgctgattctcctgctgctgcgcctcggcccgattgccgcccggccgctgcttgggtacgggatcatctccgccgccatcattcccttgatgtacctgacggtcctgattaaaaagacgcccgcgacctatatcacctgtgtagtctttttgagcgtcgtggtgtcccacgggatggataccactccatattggttcgctctcaaccgggtgatcgacacactcatcggcatcttcatttccctgctggtcaacacgctggtgtttccacaaaaaccgccgcccgcggagtagacgggcggcggttttttggagggcggggttcagcctgcaggcggctcgccgccggatgggccgttatctgtcggcgccccatcatcctcggccggcagcccctcgggcggaggggtatccccctgttttttcttgctcatggtgctgattaccaccatagcgattaccagagccagcccgatccccgccagaataaaggggatcggggaacgcggatcctctcccgtgacgggagaggcggcggacgctcgaagcgggagcagcgcggcccatcccgcggccgcaagacctgtcagccattttttcatgcaggggcctccttttcatgtgctctttttcctattgtaccgcacaacgcccaaaagtacaacgctttcttcaaagccgcctgaaaatcccgcctatccaggccgccgggcggggaatttcttgaagtatgccggccgatatgatacaatatggcgggattatggttcgtccgtgccgcccgagggtgcgcaccggaccaaagaaaggaagtcaagtccatgcatgacgtttatgagaccccgttttcctcccgctatgccagccgcgaaatgcagtttctcttttcatccgaccacaaattccggacctggcggcggctgtggatcgcgctcgccgaggcggagcaggagctcggcctcccgattaccgacagccagctcgaggaattgcgcgcccatgccgacgatatcaattacgacgtcgccgcggcgcgtgaaaaagaggtccgtcacgacgtcatggcgcacgtctatgcctacggccagcagtgtcccaaagccaaggggatcatccatctcggggcgacgagctgctatgtgggggacaacaccgatctgatgattctgtatgacgcgctccgtttaatccggaaaaagctggtgtgcgccatcgccctgctctcccggttcgcggacgaatacaaggcggtccccaccctggccttcacccatttccagccggcgcagcccaccactgtgggcaaacgggcgaccctttggacgcaggagttcctgatggatctcgaagaggtggagtaccgcctctcccgtgcccgcctgctcggttccaagggaaccaccggcacccaggcaagtttcctcgagctgtttgagggcgatcatgaaaaatgccgggagctggaccggatcatcgccaaaaagatggggtatgacgcctgtttccccgtctcgggacagacctatccccgcaagctcgactccatgattctgtccaccctgtcgggcattgcccagagcgcctcgaagttctccaacgacatccgcctgctccaacacctcaaggaggtggaggagccctttgaaaagcatcagatcggttcgtccgccatggcgtacaaacgcaatcccatgcgcagcgaacggatcgccgccctgtcccgttatatcatcgcggattccctaaacccggccatgaccgccgccacccaatggtttgagcgaacccttgacgacagcgccaacaagcggatcagcgtagcggaggcgttcctcgcggctgatgcggtgctctccctcgtcatcaacgtggtggacggcctggtggtcaataccgccgttatcgaccgggatctgcggcgggagctgcccttcatggcgaccgagaacatcatgatggactgtgtcaaacgggggggggaccggcaggagctccatgagcggatccgtacccattctatggccgccgcccgtcgtgtcaaacaggaggatggggtcaacgatctgctcgagcggatcgcgggggatccggccttcggtctgtctctgccggagctcgagacggtgttggatcccgcccgttatgtcggccgtgctcccgaacagacggaggagttcctccgggaagaggttgcgccggtactggaaaaataccgggacgatttgggtgtgacggtggaaatccgggtgtgatagtatggccacccgattcccggaaggggatcagggacaaccacgcgcgattgtatccgcgttcggaccggcccttttgtgacaagaaagggaatgaccatcgggcaaatccctgacgatcacttgcgaatttttatttgctcgtgcttataaagtacaatctgcactttggcacctccattctctgtgcgggtcggtacaacggcgcatggtatgcgcagatatagtggaggagccctctgcgctcacgctaaaagggccagtgaactatgttcaccggcccttttatagtgcagctattcgcagacaagaggcgggttcccgcatccaagccttttatgccccgaaataccggcgcagttcgtccgccttgtctgtcctctcccatgcgacgtccagatcttcccggccgatatggccataagcggccagcggacgatagatgggccggcgcagctcgagctggtcaatgatggcggcggggcggaaatcgaatacagcgcggagcgcctcggcaagccggtcatccggtaccgttccggtcccctcggtatccaccagcaccgacacgggccgggccacgccgatggcgtaggcaagctgtacctcgcagcggcgggcaaggcccgcagccaccacgttcttggccgcgtagcgggccatgtaggaggcggaacgatccaccttggtcggatccttgcccgaaaaggcgccgccgccgtggcgggcgtatccgccgtaggtatccacgatgattttccgtccggtcaggccactgtccccctgaggcccacccacaacgaagcggccggtgggattgacgaaaattttggtgtcgtcgtcaagcagctctgcgggcacttcggggcggataaggcgttcaatcagatcccggcggatctgatccagggacacgtctgcgtcgtgctgtgtcgagaccactaccgcctcgatccgcacaggggtattgccgtcgtattccaccgtcacctgggttttcccatcgggacgcaggtaggggagggtcccttccttgcgcaaggcagtcagccggcgggccagcctgtgggcgagggagatgggcagcggcatccgctcgggcgtttcatcgcaggcaaaaccgaacatcatcccctgatccccggcgcctgtccggtcgtaccggtcgccgtctccggcccgggcttccaacgcttcgttgacacccatggcgatatcgggcgactgctcgtcaatcgctgtgagcaccgcgcaggtatccccgtcgaatccctgcccggcatcgttataaccgatgtcccggatcaccccccgggcgattttcgggatatccacataacatctcgtgctgatctcccccatgaccagcaccatgccggttgtggcaatggtttcgcaggccacatgggcgtccggatcctgtgccaggatggcgtcgagcaccgcgtcggaaatctgatcgcataccttatccggatgcccttccgttaccgattcggaggtgaaaaatcgcttggccattggatagtctctcccttcctgtttcccatccgcctgtgtatacaggcaaaccgcttgcgctattcgacaaaaagcgccccggcattcgcacagggcgcttcgaaacgtcccctcatctgccggcaatccgccgcaggatttggcaccttgtacgccatgtaccggttgccgggcttcatcgggcctgttccctccaccgctcttgataaggaatctgttcttttgtaagaatatacatcctaattttccgggatgttttgcgttgcggctctgctaacggcagctgccgttggaaacgccggacaaaactcccacacttcgttctatagtatacctatatcggaggattttgtcaagaaaaggcggtcagcctttttcggcacggcggtttcagcggaacccacccaatacccggcggaccggttttaatgtcaatgtgagcagcggaatcatcaagacactaagaatcatccctttgatgaagttaaatggtacactgatccaagccgccgccaaggcttccccacttcccaaggggttattcaaaaagaagcggaagaacaggggcgctaccgcccagttgctgaaaaagccgattaccagcatagacaccgtcccggctaaagacgccaggattaaccgccagaatgtggagaggtttttcttttttaatccggcgaaaatagcggtaaacgggagcaagtaagcacaacccaataaaaaattctgtatgtttccaaagcccatttgactgcccagaccacgaaccatcatttccagcagatttttaatcagttccaccattaccccgcagaccgggccaaaaaccaccgcgccgaagatggcgggaatgtcgctgaaatccattttaagataaggagcagccgacagaagcggaaactcaaaaaggagaaagagcaccaacgccaaagcggagagcattgcggtagccaccatcatcaccagcggctcgcgggtggccggttgaagagatttcattgataaaaacgcctctttcttttcgccgtcttatttgggaaaacaaaaacaccccacagagactctgtggggtaggaaagagacaaaagcgggaaaaccgccttatgtgcatcttcttccatccggactgtaaccctggatccctttcttagaaagaatccggcaaaacaccattagcgttttgcaaggaccggcctaaagaccggcccctggaccgtcggctttggaatttcaccaaatcaatgcctatgcaaggcactcgcgggctgttccgtttccggaattcaccgccggtggggaatttcaccccgccccgaagacagcgtattcgatttgtatggatcggtaccgaatcctggatataagtttactccgattccccgtccctttcaagaggcagagagcctaaaattccgagatctcatatctggatttttgcacaggatgtcgggcctgactcccctcggagggggcaaagcaaaacccccgccgggtggcgggggtttcaaggaccgtttcgggatcaaaggactgcaatcagccgttgatcttggtgacgacaccggacccaacggtacggccgccttcacggatagcgaaacgcaggccttcctcaatggcaatgggggtaatcagctccacgtccatctcgacgttgtcgccgggcatgcacatctcaaccccttcgggcagggtgatgacaccggtcacgtcggtggtacggaaatagaactgcggacggtagttattgaagaagggggtatgacggccgccttcatccttggacaggacgtacacctggccgtggaacttggtgtggggattgatggagccgggcttacaaagaacctggccgcgctcaatctcattgcgctgcacgccacggagcagggcgccgatgttgtcgccggcctccgcgtagtcgagcagcttccggaacatctcgataccagtgacaaccgtcttcttgcgctcgtcggtcagaccgatgatctcgacttcgtcggacatgttgagctttccgcgctccacacggccggtggcgacggtgccgcgcccggtgatggtgaagacatcctcaaccggcatcaggaagggcttgtcggtggtgcgctcggggctggggatatactcgtcgacagccttcatgagctcgaggatgggggcatactcgggggcgcccgcgtcggtagaggtgcactcgagggccgccagagccgaacccttgatgatcggagtgtcgtcgcccgggaactcgtactcattgagcagctcgcggatctccatctcgacgagctcgagcagctcgggatcgtcgacctgatcgcacttgttcatgaacacgacgatatagggcacgccgacctgacgggagagcaggatgtgctcacgggtctggggcatggggccg

SEQ ID NO: 996 - DNA, 7054 bp, Unknown
  16S sequences of unknown bacteria
caatacagacttcctcgaacccacgcttttcataatgagaattatcccttctgaaaatgacagattcgtgcttgtctcgcttgattttacctgccttaatcagctgctccttctccgcacgaatgcgttccagaagaacggaagccggttcatcgtttgggtcttgtggtacaagtttaccttgaacagcttcctgtaagatagatttctttagtctgttaggaaaagcattatttagggattctgattcagagtatgaagttctgtatgtatcaacataaggcaatacttttttgattttttctacaattttttttgctccgcttcaggaggaaccggtataagtgcctgatatagtttattatcgttgatcgcaggataagcaactcccttggcattgtctgtgtcatttacatacgcatcaaagtctggtgacattagataataaaacaggaactcattgtaaaatccagtatgacaagtgagggcagcgaagcctgtactggcaataggttgatggctaaagggacggtcaacaatacacatattatgcagatatggacgcacagtagaataaagaatatcacctatatcgacaatttttcttgcccttgagggtgccttatctatagcaattatattttcttcatcacttagtttctgatgtttattatcaatagatccgatatctatataacagaaatcatttgccggttccatttgccctctgttgtaaacgattttgctcagtcgcacccattcccagctcgcaggtatctcaaacggcacctcatccgcaatgcacactggctcgtttttgccgactttctcataaggcaagttatcggtagtagcataatttttacatatatacccctgttcacaattcagaattgtatttcattttccaatgtgctatactgtgcgtgagttagatatatctaattaaaagagggaaaagtatgagcgattgggtgctgaaaggaacggatgtgagccggtggtacggagacggagaagtccgtgttcatgcgttaaacggggtatctttcgagatctgtcccggggaatttgtggtggtcttagggccgtccggttccggtaagagtacacttcttaacctgctgggaggcatggatagtgccagcgacggcgaactgttatatggagagaaaaatctgtcggagatgacggcactggagctgtcttcttaccgcagggacgtggtgggatttgtgtttcagttcttccatctgatccctacgctgacagccaaggaaaatgtggagctggcatccagcattacaccgggttcccgaagtgcggatgaggtgttggagatggtaggactggcggaacgaaaagaacattttccggcgcagatgtccggtggtgagcagcagcgggtatccattgccagagcaatcgtgaaaaatccatcaatcctgttgtgtgatgagccgaccggagcattggattccaagaacagcctggcggtggtaaagcttttgctggatgtgagagatcagattggctgtccggtggtgacgatcacacataatgcggagatggctaaggtggcagaccgggtcttctatatgaaggatggtcagatgatccgggtggagaaaaatgagcacccactgaaagcggaggagctgctatgataaagctgctgttcttgaaaatgcttcgggatatgaagaagagtctggcagcttatggaatctgtctgttgatcgttggtgtgggcttctgtggcttttgcgtcatgtcggtggcgaaggatcatctgctggtgtccagagatctgctgtatgagaaaagcgcatttacagaaggatttgcggaagtttatgaggctccggcagcaatcaaagacaagctggcagacataccgggaattggagaagtacaggccaggatcatcaaggaagcaaggcttacagatattggagatggcaatgccagactgaagcttatttcttatgagcaaggcggcagaaatgtgcccatgctttttcagggaacggatgtgaaagcaggagaacttcaggtggttgccggaaatgcatttttggaagccagaagtctggctgtgggaacgaagatccatgtgctggtatcaggaaaggatacggagttagagattacaggtgggggtatttcgccggaaaatatctacattatcagaaatatcgtggatatgtatcccgatgctgccaattatgatgtgggatttgtggatcaaaagaccatggaatccctgtacggcatgaaagatatggccaacagctttgcctttgatctggatcctggctacactattgacgatgtgaaggatcaggtggaagagttgttaaagccctatggatgttacagcgtctatggaagagaagatcaccagtcagcgtccatgcttgattcagaattagatcagctggatcagatggcattggtattgccgtttttgttcctgtttgtggctgcagtggtgctgtatattaccatgcatcggctgatcgagcagcagcggatccaggtggggaccatgctgtccatcggaatcactggcagacagattggatggcactatctgggatatggtctggctattggtgtgatcggaggcctggcaggcggacttctgggaaatgtgtgtgctacaccgttggtggattattatcgggtctattataatctgccggatgcacaggcaggaatctccatgaaatatctggtgatcggtgtgatcctggcaagtgtgttctgctcaacagtcagctatctgtgtgccagaaaactgactcacttaagtcctgcggatgctcttcggccaccagctcccaaaggggcgaaaaagacgctggcagagcggattccaggactgttaaagctgtttacagtgcctggtatcatggcacttcgaagcattggaagaaatccaaagcgaagtatgctgtccttgtttggtattgcctgcgcatttatgatcacggcaacgctcatgtcggtgagcagtctgtttgatgtctttttgttcgataatctggaaaaagtacagcatcaggattttaccgtttattttgaatcgccgctgaagacagcggatgtactttcttccgttgaaaatgaaaatattgagaaaatggagccttttgcagagacacaggcaaagctcatacgtggcaatgaagaactggactgtacagtgcagggcattgacagggattgcgaactggtacatctctatgatgcagatggtggaacaatccatgtggcatcagaaggaatcgtcctgtcgatccatatggctcagcggctgggcgttggtgttggcggctgggtggatgtgaaagtgacatacccggaagaacggatcacgcgggttcctgtcactgcggtgatggagcaatatatgggaacaactgcctatatgtctatggaaggactggcggatatcagtgaatatagaaatgtgtgtacgggtctctatattaaggctgcctccggggcagaagagttgatctggaaagatctggaaggagcaccccaggtgaccggactggaaggcaggatcgccaagatccagaaatggagggatatgatggggagctttgatatgctgatcggtatgatggtagctcttggaatcctgatcggtctggcagtgctgtacaccagtgcactgatcagctttgaagagctgaaacgggaactatcggtgatgctgatgctggggctgacagcgagcgagtgtctggaagtcatcagtgtgggtcagtggatattgactgctggcggtgtgctgttgggaattcccatgactttctggatgagccatgcatttgcagtgtccatgtctgccaagatgttcagtattccagattttgcagatgctgcatcggtggcagagtcggctgtgctgatgttcattgcggtatttatcagttccagactgatacttagaaaattaaaagcggtatcccctgtatcgcttctgatggagagggagtagagagatgaaaaaacgagtaaagatcattgcaggagcagtactcttaggtgtgctggcagtggcaggacttgtggtgctgctgatgcctgtgcgtgtggagacggagacagtccagaaggcagaccttctggatacttttacggtatcggcaacagtaactccgaaggacagccagtatgtatgtgcaccgctgtcaggcactgtgtcagaagtggcagccaaagaaggcgagactgtagagcagggtgcaaagatcgtcgtactggatgactctcagaccagggatgaactgaaccgccagattgagtctttgaaggcacagaagaccagtgtacagagtgaaggtacttccacaaaaacccagttgagtgtaagtcgtcagcagctggaatcccaattggagcaggcacagcttacctatcgacagctttacggggaggaaggtcatgcggagcagctttaccgggtggcttctgagaattttgacacggcaaatgtagcatactggaaagcgtttgatgagtatgacggttccaaggatccagccaagcagtccgtgttaagctctctggaaagtgccagagcagcagcggagcaggcactggtggaagcggataacaaccgctccgaatccacaaagtcatattatgagagcctgatcgcttcttatgagtctcagttaagtctgctggacggaagcgtgaaagcggtaaatactggaaccagtgcgtccggccagcagattgatcttcagatgcagcaggtacaggaagaactggataagacagcgccaacatctccaacagatggtgtggtatgggagattcttgtgaaaaacggcgattatgtgactcagaaccagccactgtaccggatctacaacaccgatcagatgacactggaggcagatgtgctggatacacaggcggcgctgctgaaggaaggcgatattgctaccgcaaaactggcagacggaagtgaacttgccggaacggtatcttttctctcgccggtatccacgcaggagctgtcggtgcttggtattgaagaaaacagatctaaagtgattttagatgtagatggtctttccgacaaaatgggtgccggtcatcaggcagatctgaccttctctgtggttcggaaagaagatgtgctgcagattccatcttcagccatcgttccgggagacaatggagatgctgtttatgtgaaagctggcggcaaggcggttctcaaagaagtggaacttggagaacagagcggtggacgctcggaggtgatcagcggtctggaagaaggagaccaggtggtgaccaatccgtatgacaccggaatcaagaaaggaacacatataaaataaggcaggactgtcggtgaaaaatggatttcaccgacagtttttcggctttacccgaatatccaggtgtgttataatgtgcgatagcgcaaagcagtgccagtttcacagggagatgagtcggctgtttacagacggacgcatctcacaagaaactgatagggcgtgagcccgacaacgagagaagtcgaagacttctcgagtgtgcactgtgtaagaaaagtgcgcgttagagtatgcactgcgataatataaaatgaaagatcagatagaatagatagcgaggtaactgagtggcagaatatacaccaatgatgcagcagtatctgaagaccaaagaggaatacaaggactgcatcttattttatcgcctgggcgatttttatgagatgttttttgaggatgcgaagatcgcatccaaggaactggaactgacgctgaccggaaaaagctgtggtatggaggaacgtgctcctatgtgtggggtgccctttcatgcggtagaaggatatttgagccgtctggtgtcaaaaggctataaagtggcgatctgtgaacaggtggaagacccggcattggcaaaagggctggtaaagcgggaagttgtcagaattgtcacacccggaaccaacctgaatgcacaggcactggatgaatccaagaacaattatgtaatgagcattgtctatgtcagtgaccggtacggcatttcttttgcggatgtgacgaccggtgattattttgtaacggaggttgattctgccagaaagctcatggatgagatctataagtttacgcctcgggaagtggtctgcaatgaagcacttcttatgagcggactggaactggatgatctgaaggaacggctgaatctggtactgtatccgctggaaaactggtattttgatgatgaactgtgtaaaaatacacttcgggagcattttcatgtgagatcgctggaaggactgggcgtggcagattttggctgcggagtcattgcagcaggtgcgctgctccgttatctgacagatacacagaagacatctctggcacatatgacaaagcttcagccttatgtgtccggtaatttcatgatcattgacagttccagccggagaaatctggaactggtggagaccttaagagaaaagcagaagcgtggttctcttttgtgggtgcttgataagacgaagacggccatgggagccagaactctgcgtggttatattgaacagccgctgatcgataaggaagagattgagaagcgtctgactgctattgaggaattgaattcccagatgatcaccagagaggaattgagagagtatctgaatcctatctatgatcttgaacgactgatcgggcggatcagctatcagacagcgaatccaagagatttgatcgcatttaagacttctcttggcatgctgccgcccatcaagacattattatccgaattgaaaagtccgctgatgcaggagatcagtgaagagctggatacattgacggatctatatgatctggtggagaagtccattcaggaggaaccgcctatctccatccgggaaggaaatatgatccgggatggctacaatgaggatgtggatagataccggactgccaaaacagaaggaaaatcctggctggccgagatagagaccaaagagcgtgagcggacc

SEQ ID NO: 997 - DNA, 13233 bp, Unknown
  16S sequences of unknown bacteria
ctcggcgtcgccggcgccgacgatgttgtgaacctcgtcgatgacgaggatgacgttgccctgttccttgacttcgtttatgagcccgagcatccgcgcctcgaactgcccgcggaactgagtgcccgcgacgagagcggtgaggtcgacgagatagatctgcttgtcgcggagcttctccgggatatttccggcggcgatgcgttctgcgagtgcttcggctatagcggtcttgccgacgcccggctcgcctatcaggcaggggttgttcttctggcggcgggagaggatctggatgacccgctcgagctcgcgggagcgtccgacgatcgagtcgagcgcgccgctctttgccttttcgttgaggttctggcagtaggtcgggaggtatttgagctttgacggcttttttccgtcgcgggtcttttctttcttttcggactcctcgcgcggctgtccggcggagtccttcggagcggcgccggggaaaccgaatcttccgaatattttcccgaaatctatcgcgggagcgccgccgggaggcgtctcgccgtctggcgtgccgtcgtctttgtcctgatcctggtcagccggatctgtcgtgatgatcccagggatgccgtcgattccgtcgaccatgttgtcgatgtcgtccggggtcagccccatcttgtcgagtatatcgttcaccggtttgatgccgagctccttggcgcacttgaggcagatgccctcggtgacagtctcgccgttctcgccgagccgcgtcatgtagacgacagccatgcgcttatggcatcttgagcaaagttccatgttctgatttacctgtgtcggtcggtatgttttccgacctttcctttctgggtggcgttgtattgttatccgggagaccggaatgttattttgctaaaataaagcctttttgatagaagaatttcagtatcaccgagccgtcgataacggtctggttgaatatgtcgccgcgtatcgtggagaaagcgcgtatgaccccgaccgctatgttcgagatcgcccacgcgaagactatcgcgctaagtatgccgaagatcagcccgagaagcgtgttgagctggtcaagcacaggcagacggcatatcaggtcgagtatgaagaaagcgaacttcagcgcgatgagagcgatgaggaacactcccgccgccgcgaggacgcggctgatcgcggcggaggtcggcgcggcgatgtaatccgacagcttttctatcgcctcgctgtctgtcttttcagcgagcttgtcggagtagtactccccgacctcgtccggatcgaagccgaagcgggacgctatgctgtcgagcgcctccggtctgtccgcgaagatgtccgcgagggcgagcttctgctcacccgccgtgacgattgaggttatcgagtcggaaacgatagccccgaccctttccgagacaacgttccggtcgagccactccgccgcaggggacgcgaacatatacgtcgctgtgagcgcgagaatcagcgagatgaaaccggacgccgacttcacgaacccgcggacgatcccgccgtagacagacgccacggcggcgaggatgatgattatgtcaataacgagactcaattctgtttcctttcaggggatatcatgttgctggggttgtctccgccgtgtcctgtccatcggtgtcgtccggaatacccgtttccggaaggctggtggtttcggtcgccgcggtgtcaggcgtgaccggcggagtgacgggttccgcgtctcctgtgtcggcggtgtcggcggaatcgtcgagatacttctccccgaagtcatccggagtgcaggtcagcgcgtagcttgacgtcgctataaggtagctgtcggggctcatcgctacaatgtcaaatccgctcgcgtccgccttcacctgaccgatcctgcggttctcgaggtttatccgcgtcaccgtgttgccggcgagaaggaagatatattcgccggactcgtcgtggtcggcgccgatcagctttccgtcgaggtcggcggtcgcttttacctgtcctttcgtatcgtagacggtaacggcgtagctgtttccgatgacgccggacgcgtcgatacacgtgagatatctgtccgacacatcggtcatgacgagcgacatgtccttgaccgcgcgtatcagcgtcaggtcgctgtcatataagatgattcccgagtcatacacgaccgcgatggcgttatccatataatgtatcgaatatccgagcccggagaagttcaccgacttccggacgctgtcgtgaccggggacgatcagctcgatcgtcgtcacgaactcgccgtcgacgcttcccgcggtcattaccgcgacctccgagccgtcgcgcttcagtgttacgtcggacaggtaattctccctgagcactctcgacaggagtttgaggtcgctgtcgtagagcatcaccgcggtgcggtactcacgcgttgaagaggcgacgacgaaattcccggcgtccgaaatgtccgccgccgttatcgggtagtcgaccgttccggatgacagcttcgcgaaggtgttgaacaccgtgaacgccgtgccgccgaggtcgtagcacagcgcgtatttcgagccggtcgacagcatcggaaaggcgtactttatattctcggtcattatcgtgttcccgcgggagtcgtacagcgcgtagccctccggcgagaggtaacacaggtcgccgataaacagctcaagccgtgtgcggtcgctcgacgggtaggttatgcgcgtagcggtgatcgacgtctcggtgttcgtgaagctgatgaacttcatcaggtattgcaggttctcgatggtaagctcgctcctgctcgtcgcgatcgccgctaaaaggaagactatcgtcgcgaagatcgagacgtgcttcgcgcttctgaaatgccgcgcgaccctctcgtagtattcgttcgtttccggggcgccgcctggcgttttttttgatttgcccttatccggcgcgggtctgacgctgttcaatctctcaccacctgttcggatcataatattcaaaatccattatatcatataattgttaaggttttgcgcattcaattgtgacataagtttgaaaacgggcgcgccgtacagtattcccgcgtgacggaaaaaagtaacaattaagggggtgacaaaagtcccgtaaagtggtataatataaatattaatgaagatctccgaaaggaaataaggaccatgaaaacactcctcgctgtcgacggcaacagcatcctctgccgcgctttctacgggataagaccgctcactacccacaccgggctgttcacgaacgcggtttacggcttcgcgacgatactctcgaagcatatcgagaacctgaagccggatgccctcgcggtcgcgttcgacgtcaaggcgccgaccttcagacacgaaaagttcgacgagtataaggctggaagaaaagccatgccggacgagctcggaatgcagttcccgtacgcgaagcgcctcgccgccgcgctcggggcgaaggtgctcgagctccccggctgggaggcggacgacatcctcggcaccttgtcgaggactgccgaaaaggaggattaccgcgcgtatctcctcaccggcgaccgcgattctctccagctcatcgacgcgtcaacgacagttctcctcgcgtcgaacagcgacacgatcaatttcgacgaggagcacttccgcgagacctacggcgtcggaccggatcagttcgtcgacgtcaaggcgctcatgggcgacaagtcggacaacatcccgggcgtgccgggcatcggcgagaagaccgcgctgaagctgatatccgacttcggctctctcgacggcgtctacaaggcgatagatgattcggcaggcgcgcagataccgaccatcgcgaagggcgtgcgcgcgaagctcgagaccgggcgcgagagcgcgtatctctcgagatacctcgcgaagatagacaccgcggcgccgctcggcgtgacggcggatgatctcgcgaccgacgggtacagaagggacgagctgaaagccctcttcacggagcttgagttcaccggactcatcaagcgtttcgggcttgaaggacaggaaaccgcacaggacacccggaaaaagccggaaatcgaaacgaaaaacgtgaacgcggacgaatttctccgcgccgtcgtgtcttttgacaaggtcgccctcgcgtcgacgccggggacggttcagctctcgggggacgggaagaccatgctcgagacgccgctgaaccgcccgcgggagaaccttctgtgcgagctcttctcgcgtgcggacgagtacgccggcggggaggggaaggcttacaggatggagagcatagtctatgactcgaaaaagctctggaacgagaacccgatgctgccggcggacttcagcttcggcttcgacgtgatgctcgcggcgtatgtggcggatccgtctgagggcgcgtacaccgcggaccggctaaggataagatatctcggcggggacgagacgaagacctcggaagagagtctgaacgccgcggagatttatctcatcgccgacaagctcgacaatacccttcgggagcgcgggcaggaaaagctgctccacgagatcgagatgccgctcgcgaaggtgctctccggcatggagtccgccgggttcaaggtggataccgagggactgcggagtttctcggacaagctcggcgaggcggcggagacgctgaaagagcgtatatacgcgctttccggctgcgagttcaacatcaattcaccgaagcagctcggggaggtgctcttcgagcgtctcgggcttcccgccggaaagaagacgaagagcgggtactcgacgagcgcggatattctcgagcgtctcgcgccgatctcaccggtggtcatggacatactcgattaccgccagctgacgaagctgcgctcgacctacggcgaaggtcttgtaaaggcggcggacgtgaacgggctcatccatacgagcttcaaccagacgataaccgcgaccggaaggctgtcttcgaccgaaccgaatctccagaacatcccggtcagaaccgatctcggtcgtgagctgagacgtttcttcattccgagggacgagggaagagtgctgatcgacgcggactattcgcagatagagctgaggctcctcgcgcacatctctggcgacgagacgctgataaatgcgttcaggaacggcatcgatattcacacgctgacggcgtctcaggtcttcggggttccggaggacgaggtgacaggtgagatgagaaagcgcgcgaaggcggtcaatttcggcatcgtctacggcatcggcgactactcgctggcgcaggatatcggcgtcacgaagcgcgaggcggcggcgtacatttccgcttacctcgcgaaatacccgaaggtcgggaaatacctgaaggacgtcgtcgcgaaggcgcatgaggacggatacgtcacgacgatgttcggcagacgcagatatatccccgagctcacgagccagaagaagatgatgcaggcgttcggcgagagggtcgcgatgaacagcccgatacaggggagcgccgcggatatcatcaagatcgcgatgataaacgccgacaaagccctgaaagagagcggactcgacgccatcctgatacttcaggtccacgacgagctgatagtcgacgccgccgagaaggacgccgacgccgcgaaggaaatacttgtcagagagatggagagcgccgcgaagctgagcgtaccgctgacagtctcgagcgccgtcgggaagacatggtacgactgcaaggactgaatgagagatggaaatgatcagaaagcagcgtgatagcgacctcgacgacatcacgcggatatggctgacatcgaatctcggcgctcatgacttcataccggaagaatacccgcgcggcggcgttctacaatcgcgagggatttactgtgacctctgagggcattgacgccgacaccggcgagagggaactcacgatggtctggtccgctgatacaactgaataaaaaaccgctccccggtgacgtttttccggggagcggcaatttatctgcgcgcagagagtatgaccgtgttttcttccttgaatatgcggcacacgtctttgaatcccgctttaccgaggagcgatatttcattcttctcggcgagcggcgtgtcgaagtggaacattccgtcgccggtcctctgctcgtttttcagcttttcgtactcgttccggaaccactcctgctgctcgtcggtctcgcacatatagtcgccgaggaggaagacgcctcccggtctcagcgcggcgaagagcttttcgtacagcccgagctttttctccggcgtgaagtggtgcaggctctggaacgagacggcggcgtcgaaatccttcccgaacggctcttcaaagtaatctccgaggatgagctcaagcttcttttccgggtgctttccgcgcagcttttcaagcatcgccgcggtcatgtcgacgcccttcacgtatacgtcagggcagcgggcgaagatttcgtcgagctcgagaccggtgccgcagccgaggtcgagtatccgcgatggggacattttttcaatttcccgcgccatcacggcgtaaccgttcctgcatcccccgacgtcgcggagcatatgctcgtcgtacccctcgacccgggcggtgaagaaatcgtccatcttttcaagtgtcataacagaagctccttttttatttttaatgaaattatacattatccggagcctcgtgtcaagaggtaaaaccgatttttccggagaacggctattgacaagacggtatatttgtggtatgattatagaagatataaattatgaggtaaaaaacaatgagttgtcttggaaatatactctggttcatatgcggcgggctgctgtccgggctcagctggtgcgcggcgggggtgctctggtgtatcactatcgtcgggataccggtgggactccagtgcttcaagttcgcgtcgctgtccttctgtccgttcgggaaggagatagtttaccgcggcggcgcggtgtcgactatcgcgaatatcttctggctgatactctccggcataccgatggcgattgagttcgccgctttcggtattgtctgcgggataacaatcataggcatacccttcgcgaaacagtatttcaaactggcaaggctcgccctgacgccgttcggggctgagataatatgaaaaacactccctttcgtaatgaaagggagcgctttgttatttgctgtcttccggaatgagcccctgacgctcgtgctcgccgaggtgttcctttatggcctcaaacgatttgtcacttataacgtgctccatgcggcaggcgtcttccgccgcggtctccttgtcgacgccgagactcatcagcattttcgataggatcgtgtgccgctcgtatatcttcgacgcgacctcgacgcccgcgtcggtcaggtgcaggaagccgtccgcgtccatcgtcaggaagcccccgttcttcagaagcccgacagcgcggctcacgctcggctttgagtaccccatgtactcgcacacgtcgatagaccgcgcgaacttcccgcccgcggtcagtatatatatggtttcaaggtacatctcgccggattcctgtaaatgcaactgtctgtcctcctgattcttttcgctcgtattcaatgaagcgctatctctattatacaatgtaattgtgaatttttcaagtgtctctcagaaactatcgtcgaagctttctgaaaacggcaggcgtacagcctgtcatttcggtgaagatccttatgaaatggctcggtgacgagaagccgcagagctccgcggtctccgcgaccgttcggccctcgtcgaggctgagctttgaacggtttatccgcaccgccgcgatatattcgctgactgacattccgagcgcttcacgaaagtcgcgggtcagcttcgtgcggctgatataaaattcccggctgagcgtgtcgatcgtcagctttgtcgcgatattatctgagacatatccgcagacctccgtgatatacctgagccgttgtgacgatacgtcaccgttggtgtgatttgatatcatcggcgacaactcacagagaaacagcgccatcaggtacttgagacgttcttttgaaagtgtctccttctgttcttctgtaaggtccccgtccgggaagcgctcgtcctctatctcggagaagaacgcgttcataaggtgtgcgatagcttcgagacggtcatattcctcatttttcagaccgaacgcgagaaattcatgagggaaacgcgccgcctctccgtcaagatagctctgcgaaaaggatatgcagtatcgcgaatacggcgcggggtaatcatttatctgttcatggagcgtctccggcgggatgaaaatgaaatacggtgctttgagatgcacgactttatccccggcgaatattacagaagcgcctgtacccgcaagcatgatctcaccggtattgtgtacgtgcggcttgtatccgacccgtggcgtaccggctgaatgtgacctgaaatttatcgaaaagtccgaacagtcaatataataaaactcgtctcgtaaaatcactgataccaaactgatccacctccgaaggatattatagcacagaccggcgaatatgtcaataatgtacccgattatgttattgaattttccgaaaatagattgagaaataccgggaaatgtgctataatgtatcaaacgacacaaatccatattattaatgatcaggaaggtgttatgaaatgaacagaaaactcgtggcgttggcgctgcttgccgctatcatttcgggctgcgtatcctgcgggaacgcggctgacgaagatccgggtacgacagaagaaaatgtatccggaaatgatatgaccgatacaacagaggcggaagagacgacagaggaagcatatgtgcttcccgaactcgactgcggcggaaagacgctgacgatactgaacccaacgacgacatggggcttctatactgacatcgacaaggaggagcagaccggcgacgcgctcggggacgccatatacgagcgtaatcgcagacttgaggagaaatacaacttcacactcgatgtcgtcgaagagaatatgtactctatcgaagcaaaggtcagaaattctgtcatggcagacgactcggcatttgacattgtgctcggcagttcaaagctgaacgtctccatgatatccgacgggctcgtctgtgatctctgcgatattccggagctaaacctcgacagaccgtggtgggatcagtcggtcgtgaatgaggcgacgataaacggttcgctttattttgctctctgcgatatcacgatgttctcattcgagtgcacatgggcgacttatttcaataaggatattctcgaaaaaaatcagctcgacacgccgtatgagctcgtccggagcggcgcgtggacattcgataagctcggtgagtacacaaaggcctgcgcgagcctcaacggcgacgagagcttcacgtggagcgcggatggctcgagcgtctacggactcgcatcctactatgagttcggtcacacaggtatcatcgcctgcggggagaggtatataacgaatgatgcggatggtacgccgcgcttctcgctcgagggagaccgcttttacaatgtagtgtcgaagctcgcgtctctcttcggccgttccggcgaatatctgtcgatcaacaatgattcgccgaataattatttctctgcgttctcctcgtcccgtgctgcgttcatggcgggagagataaaggagatacagaatctccgctcggtctatatggacttcggcatcgttccgctaccgaaatatgatgaggagcagaaggattattgctctccggtcacatctgtcgtgccggtctgcatgatacctgtaactaatactgacacggcgatcaccggtactgtgctcgacgcgctcgcatatgagagctgcatgaacgtccttccggtgttctacgagatcaacttgtcgcagaaggggctccgcgatgatgattcgatagaaatgctcgggcttatccgcgacgaccgtatatttgacgtcggcgacgcttacggttggacgacggaagtccgcgagggtatccgcaaggtcatagactccggtgacgcgaacgtcgcgtcgataatcgcgtcgctgaagccgtctgttgaagagaagatcagcgccacaatggaacttataaaatcacattaaaaaagaaacgtttcccgccgcgcaaagcggcgggaatttttttcttaaaaacgaaaaatctattgcaattcgcggaaaaatctgatacaatatatagaagcaatgataaacggggattcaacaaaggaataacaaagaaaatggaactgctaagaagactctacgctcccgactatatgctgaagaaaaagcagaagcgtcaggagaaatactcaacatctgagatatacagatcattcataaaggtcgcgtggcccgccaccgccgaatccgtccttctcgggcttgtcaacttcatcgactcgataatggtcagcggagaggggcaccgcgcggtcgccgccgtcggtctgacgaatcagccgcgcttcatcttctacgcggtcttcttcgcgatgaacgtcggcgtcaccgctatcgtcagccgcagaaaaggcgaggagcggcgggaggacgcgaaccgctcgctggctcaggcgctctcgatctgccttatgctcggcgtcctgctcgtcgggctcgcctacgcgttctcggagccgctgctcaggttcgcaggggcgaaggacgacactttaggcgacgcgatgaattatttccgcataacgatgatcggcctgttcttcacgtcgatcagcatggtgatcaacgccgcgcagcgcggagcgggcaacacccggatctcgatgactaccaacatgaccgcgaacatcgtcaactgcgtgttcaacgcgcttctgataaacggacttttcttcttcccgcgtctcggggtgaccggcgcggcggtggcgacgcttctcggtaatatcacgtcctgcgtgatgtcgatctggtcggtcgcggcgataaacccgaagaatcacgacaggttcctctgtcagggtctgcgcgggctctttaagttcgacagggagaacgtcacgctcatatgccgcatctcgagctcggcggcggtcgagcaggtcttcatgcggctcgggttcttcatggtctcgaagatggtcgctgagctgtcaactgtcgatttcgcgacgcacacgatctgtatgaacataacgaacctctccttctgcttcggcgacggtctcggcgtggcggcgtccgctctcgtcgggcagaacctcggaaagaagcgcagcgacctctcgataatctacggaaagaccgcgcagaggataggtttcctcgtcgcgtcggtgctgttctgcatattcatgttcgccggaaaattcatgatcggtctcttcatgaccgaggaagcggaagcggagcagataatcgtcatcggcgtcaggattctgcgtatcctcgcggttatctcaccggcgcagatctcgcaggtcatattcagcggctgcgtgcgcggcgcgggcgacacgaaatacgcggctgcggtcagccttgtcacgatagcggtcgagcgtccgctgctcacttatctgctgtgctacacattcggtctcggcgtcatcggcgcgtggatcgcgatgctgatcgaccagtacctgagactgacgctgatggcggcgagattctccggaggaaaatgggagaagatcaaggtctgacgccacgcggattcacacgattggagatgattgacatgaaaagaataatcacactgtttctcgctctgatggcgctcgcgcttacactcaccgcgtgcggaaaggtcgaacaatacgacacgagcgcgacggacgacaccccgatcgtctacaagacggcggatggggaagagctgaccctcgacgtcctgctcccgacgaaccggaaaagaatgcggaacccgaccgtcatagtacttcacggcggcggctggatatcgggcagcaccgaggacttctgccgcgagttcgcggttctcatagacgagctgcgcgcggaaggaatctgcgtcgtcccggttaactaccggctcgctgtgaacgggcggacatggtccgactgcctcgaggactgcggcgacgcgctcgactatctgatagcgcacgccgaagaatacgacattgacaccgaacggctcggcgtcatcggatactccgccggcgctcagctcggactcctgaccgcgatcggtcgggacgacataaaatactgcgcgtcgctctccgcgccggtcacattctcggacaatcccgaaagcccctactattccgaagtcctcggctactacacgtcgcaggcgttcggagcgagcatagacatcgtcagatacgacgcgagcccggtcgtgagactgacgagaagatgcggcacctccttcctgatggtaaacggtctcgacgacgacatagtctccccgcagcacgccgaactcttctgccgcgaagccgacagcctcggagttgacgtcgaactgatagaacagcccggactcacgcacttctactccgcatatccggacaacgcgaaactgatggaaaaagtagccgaccgcgtcatccgcggattgttctgagacgcccggaatccccatgaaaagcccgtctttggcgtttttcggaaaagatgaaaaaaatattttgggaaaatttcgaaaaccccttgacaaatgagtttgaatgtggtataatattatccgttgattgagcttgtgcccgtagctcagttggatagagcaactgccttctaagcagtaggtcgagggttcgaatccccccgggcacgccaattccccgggaaccatcccgaggatcggttaatacaggttgcggatccataccgaaagtacggatcagcagtcatggtggatgtagctcagttggttagagcgccaggttgtggccctggaggtcgagggttcgacccccttcattcaccccataatcaacaaagaaaaaagatccggtccccgggtcttttttcgtagtaagaatcagcgtgaactcccccgcggcggcgatggg

SEQ ID NO: 998 - DNA, 13198 bp, Unknown
  16S sequences of unknown bacteria
ctccaaaaccgtcagcgccgaaagcactcggcgtacagggatctgtgaaagctcggcgatatcgtccacccccataggcttttgagagagcgtctgcaaaacctcgatctgatcgtctgtaaaatgttctctggcgcttttcaagtcaatataggccaattcttctgcattgtcaactgctgtttcctggtgtttcggctctgccggaacattcgcttccgtttcccgatgcggcgccgtgcgtccaaccgaaggcggcgcatcgaatacacccatctcgattttgtccggaaaacggctttgccattcgcgcaatacatcccaggcccgagtaacgacgccggcgccctcctgcagcagacggttgcagccttggctgaaaggcgcatccaccgggccgggcacagcataaacgtctcttccttgttcggcagcatgccgcaccgtattcatggtaccgctgcgcagcgccgcttccaccacaatcacccccacgcttaaaccgctgataatgcggttgcgttccaaaaaatggggaccgcgcggctctgtgcccggcggatattccgaaatcagtacgccattcacagcaatgtcttcgaacaacgcacggttttccgccggataaactacgtcaatacctccccccagcaccgcagccgtccgggcaccggccagcagagcgccacggtggcctgccgcgtcgccgccggccgccaggccggacaccacatacgccccgcctttggacagctcataccccaaccgctctccgatgcggatgccgtaaggcgtagcttttcgggtaccgatcagcgccacggcagcctcactgtcaaaatcaggccagatgcctttgtaatacaggacgcagggcgcatccgggatggctcgcaagcggctgggatacgtcgcatcggtacgggagaggatccgtacgcccaaccgctcacaatcctccagaacggcttcggcccggtccagttttttgtccgccaaagcggaaagctgagccttggtaaccccctctgtctgaagataatcctccggcgcggcaaagtagatcttttccggatcaccaaactgctccagcagcctggtacagatttggttgctcaaaccgtgccgtgtgcgcagccacagccaatatttgattccggccatttccatccctcctcaacgatacatttcccacaacagcaccgccgctgctacggcagcgttgagcgactcgcaccgttcactcatgggaagacgaatcgtctgatcgcacaaggcgagcacttcttcgctcagcccccgcccttcgctgccaatggccacagcggcacgggtataatccacctgccgggcatccaccgtatcgcagcgcagcgcagccccccacaacgggataccggcggcggagagcagcgcctttgcctgcgccggcgcacacctccacaccgggcggcggaacagcgcgcccatggtagcgcgcacagttttggggttgtacagatccgcgcaggcccccaccagaaacatgccgtcgcagtcaaaggcatccgctgtacgcaggatagtgcctacattgccgggatcctgcacactgtccagcaggatataacggctgcccgtcagaacctcaggaagaggcgtttcctgcctggtgcacaccgccagcactccttggggcgtatccgagggagcaatatagtccatcatctcccggctcacctgcaccagccgtgcgccgggcacctccggcggcttttctccatcacagaacaccacagcagacacagggacatgccactgctgcgcctcgccgagcagtttgtgtccatcacacacgaattcccccgatttgcggcggtgcgcaccggaggaaacgagcttgcggatatggctcatcagcgggttgctgcggctggtaattgtctcgacgcccatcggctctctccttctccaaaaagcaaagctgcccgcgcggcatctggccgcgcgggaaaggcttttgcttattgcttcatttcctccgccgcacctttgctctcagcgttcagcggtttcatggtggggaacaaaatcacatcccgaatggaatcgctgttggtcagcatcatgacacagcggtcgatgccgatgccaagaccgcccgtgggaggcaaaccgtacatcaaagcgttaatataatcttcatccatcatgccggcctcatcatcgcccttgtcgcgcagctccacctgtttctggaagcgctcacgctgatcgatggggtcgttcagctcggaaaaggaattgcccatttcactgtggcagataaacagttcaaaacgctccgtcaggcgcgggtccttaggcgaacgcttggccaaaggcgacacatccaccggatgcatcgtaataaaggtgggctggatcagctgcgcttccaccttctggtcaaagcattcatacagggcgttgccccaggtcttgtccgccgtttcgggcagttccacaccgatggcctttgccgcagccaccgcttcttcgtccgtggaaatagccatgaagtcgataccgcagtactgcttgaccgcctcatgcatgggcatacggggccagccgggtgtcaagtcgatcttctcgccctgccactccagctcatacgtgcccagcagcttctgggccgcggaggtcaaaagatcttcaaacagatccatcatgtcgttaaagtcggcataggcctgatacagctcgatggtggtaaattccggattgtgcttgggatccatgccctcgttgcggaaaatacggccgatctcatacacccggtccaaaccgcccaccaccaggcgcttcaggttcaactccgtggcaatgcgcatatacatatcaatatccagcgtattgtggtgggtaataaagggcttggctgtggcgccgccggaaatggtattaagcaccggcgtttccacttcgatatagccacgcgcgtccataaagtcccgcacatgcttgacaaacttcgagcgcagcacaaaattctgcttgacttccggattcataatcaaatccacgtagcgctggcggtagcgcaattccttatcctgcaggccatggaacttttccggcagaggctgcagggatttactcagcagcgtcaccgcttcgcagcgcacagacatctcgccccgctgcgtacggaacaccgttccttccacgccgatgatatcgccgatgtcaaatttcttaaagcccgcgtatgcctcttcgcccagttcgtcccggcggacatagagctgcagtcggccggcggcatcctgcaggtcgcagaacgtcaccttgcccatcacgcgcttgctcatcatgcgtccggccagacgcacctgcgtgttctccagggcgtcaaattccgcacgcacccgggcagtggtgcagttgaattcaaatctggtccgctggaacgggtcctgccccgcctcctgcagcactgagagcttgtcccggcgaattttcaggatgtctccgatgttctgccctgccgcgccctgcttcttttcctctgccatggaatttcttcctcctttgtatccttttcgggtctgtgctcagcgctcgatggtgtcgatgcggtacacaatggcgcccaccggagcttccaccgtcacctcatcaccgactttcgcgcccagcagggccttgccgaaaggcgactcttccgaaattgcgccatgcatgggatcagcctcctgggagccaaccacctgatatgctcccttggcgccggttttaacattgatcacacccactttgctgccaatggtgatctgatctttgggctgatcattctcatcgatgatcaccgcatgctcgaggatattctccagctcggcaatacgggaatacagcttgccctgctcattcttcgcctcatcatactcgctgttttcggacaggtctccgaagccgcgggcaactttgatctgctcggaaacctcgtctgcgcgggtggttttatcatattccagttcctttttcagttcctcatagcgcgccgcgctcatgcggaattcattcgtagctgccatagttacaaatcctttctttctgcgccgccaggcgccgtcaattcaataggtggcaatggctcccacaaaaacagccatactaattgtattttattacggtgaattattataagtcaagaaattgtgtagtgtcaagcattttgcgcgatttcggccacttccagttcattgacgcgcacagcccccatctccaacagcagagaaagcagcgcgttttgcgcctggatcccctccatagccgcctcgacctccggcgcagcgctgtagcgcaccaccggagcagcgttccggtacccttctgcctcgtgtacgctgccgcagggcagccagagacagtccggcgcaccgcagggcgccgcgtcgccgaaggtcaacaccagttccgctgttttcagcagtgccgcactggcattgcgtgccacgctgacgccgtattcccgacgcagcaccgaacaggcttcaccgccaccgccgccggcacacagcatggtatagcgcacgtgcagggccaactccatcagtgcgccacgcagctccgcgctcatatggtcgcccagcaacgccacatggcacgcagccggatccatcccgttctgctccagcagtttgcgggcaatcttccccgctgtcatacggcgcagatattctccgcgggctgcgacaatgccgtatttggcaaaaaggaactgctgcaaaaactcttccggaaacagcgcccggcgcacaccggcacgctgcatctgccgggcggcgcgctgcaaccgccggcgctgccccaaaggcccgcgtcccggcagcaccgatacctcaaaaatgcgcacgccgcacacatcccgcaccgcgcactccaccgctgcccgccgtgctgcatctttttccgcaatggttaaaaggccgaacaaaaagcatcccctcccgccatagcttatgacggaaggggcccactttatgcttttaccagttcttgacgtagctcgtcagatattgcaggggatcaacccggattccgccctccgtaatctcaaaatggaggtgcggtccggtggaatttcctgtagagccggtgatacccagcacctgaccctgctgcaccttctgtccagcgctgaccaggcgcttgctcatatgggcatagagcgtcgtatttccgcttccgtggctgactactacatattcaccataggatctgctgcgctgggaaacaatgaccgtacccgccttggacgccagcacctgtgtagtgtagcccacaccgccaatgtccacgcccttgtggttcgtagagccaataccgccaggggaggatcgcgagccaaaaggagaattgatcttcttgctggccttctccggccacatatagccgccgctgcccatccaggaagtgactacaccggtggatgcgttgccgccggatgtattgttgcccgcagcctgctgagccgccagttcctgagactttttcacaatctgggcctggatttcatcctcttcctgagccagcgcatccagcgtatcctggtaaacatcgctctgcgactggatcttcttcatcagggcaatggcctcgtccagctgcgcctgcagttccgctttacggctgctcagttcctgcttggcttcctcctgcgccgccttggactcctccagcgccgatttttcctcggccagctgtgcctgcaggtctttcagatcctgaatcacgcgctcatcgtaatccatgatttcattgataaaatcgatgcggctgagcagatcggcaaagctggtggccttgaagatgacttcccaataggataccgttccgttttcttccatggcccgcacccgccggcaaaacagctcatactgagcctgctctttttcttccgtctcgctgatctgctgctccgtctgcgcgatcagcgtttcatattggctgatctgtgcgttgacgttgtcgatctcctcttgaattacagcacactgctcatcgagcaggtctttctttttcatcgcttcgtctttgtcctcactcagcgcagacaactgattctttaattccgattttttgctgctgaggctcgacgcctcttttttcagcgcgtcaatatcggcctgcgtcacagcggcttccgctaccgtcggcgccataaaggacaggcacagcagcgccgccaagaacacgcaggcggcacggcgcagggctgagggcatgtgcgtgttcatcccaagcctcccgttgcaatctgtgcaatcacagacaatgtaattaaaatgcccaatgcaatagcgcacttgaaaaacatctgatagttttcctcgcggctttttttgtcttttcttggtccatgcatcgtactcatgaaatcgctccttccattatcctgtgtttcctctttcccgcgcctctgcagcaccgcaggctgcaaacggcacgtttcttatacccgcagaaatttgcgaatcgccatcaggcttcccacaatacccaccagcaggcctaccaggacaaagatccccaacacgggcgcccacagctccgtgaatgggagaatgtccaacagctgcagtgtatccgaagcgccgatccctgcagaaatgcccacatacaggccccattgcaggaaaaaggcaatgacggcgctgaagcatcccagcagcaatccctcatagacaaagggccagcggatgaacccgtctgtcgcgcccaccattttcataatggcgatctcgtccttacggtcaaaggtggtcagtttgatggtgttggacataataaacagcgacaccaccagcaaaaccacaattaatgtgatgcacaccaccgcagcaatctgactgacggtcaaaaaccctttggaaagatcctcgtcggcccgcactttggcaataccctcgatttggccgatagcgtccgcagtctctgtcatggactccagttcttccagatggatactgaagcggtcacggaaaatttcaggggtgatatcctctgccaagctctcgtcttccagatattcgtccacataggtttccatggcttcttccttgccgataaagtcaacggacgccacattggaaatccgttctatctgcggctgaagcgcttttgcttccgcttcggtataggattcatccacaaaggcgagaatcacgctctgatcctgcaggctctgcagattcgcgttggcattcagcgacaccagggaaaaagtgcccatgatcagcaaacacgcaatggtgatgcctaccgttgcaaacgacataaagccgtgagagaacatattggagatgccctcatggaaaaaatattgaaaatcgtgctttttcatgatagtgcagtccctttgctcgtatcgtaataagcgccccgatggtcgctgacaatctgccccttttccagcgcaatcacgcgcttggaaaagcgattgaccaaatctttttcatgggtaactaccagcatggtggtacccagatcattaatgcgctccagcagcgacatgatttcaaacgaacgctccggatccagattgcccgtcggctcgtcggcaatgatggtttcaggattgttgacaagggcacgggcaatagccacacgctgctgttcaccgccggaaagctctcccggcaggcggcgggtcttattctccagtcccaccaactccagcacataggggatgcggcgcttgatctcgcccagcggcgcccctaccgcacgcatggcaaacaccatattctcatatacgttttttttctccagcaggcggaaatcctgaaaaatcacgccaatggtgcggcgcatatagggcacctgccgggatgaaatattggtcatattatagccgttgatcatgatccgtcccgccgtgggaccgatttcgccggtgagcattttgatgatggtcgactttcccgagccggaaggccccaccagaaagacgaattcgccatcctcaatctccagcgatatgccattgatggcctttgcgccgttggcatagcacttctcaacgtcttttaatcgaatcatgctgttttcaacctttccttacatgatcagcgcccggaacaactgtttatgcttcaatgccgcgggatgtgagatatttcttgaccatcagcgccaccttgaacgtgatggcatcgtcaaattcacgcaggtcaaggccagtaagctttttgattttctccagccggtagaccagagtattgcggtgcacaaacagtttacgagccgtttccgacacgttcaggttattctcaaagaacttgttaatggtgaacagggtttcctgatccagtgtatcaatgggatttttcttgaacacttcctggagaaacatctcgcacagcgtcgtaggcagctggtagatcaaccgtccgatgcccaggttttcataattgataacccggcgctcggtgtcaaagacctttcccacttcaatagcaatctgcgcttccttataggatttggccagatcgcgcaggtggctggcaactgttccgatgccgatcatcacgcggttgccgtggttcactgtgtcgtcgatctgcgcagcgatcttgtccagctcattttctccggcaccttcgctcagctgcttgatgagcgccacatccgcctcgccgatgttcagcacaaaatcgttctgccggtctgggaacaggctctgcacctggtcgatcagagaggaatcagacttgtccagctggcgcagcacaaaaacgccgcgcggcacctcagtggtcacatgcagttctttcgcccgcacataaatatcccccaacaggatattatccgagataatattcttgacaaaagaccccttgtcgtgcttttcctcatagtgcgcctttgcggtattcagtgccacagtggccatggagcacacagtgcggctgatgctgtcctccccactggcaaacacggcgtaatcaaaccgcgcgccccagccagccaacgctttaaacgtctttccgtccagcacgatggcggctccttccgccgaattgatggccgggacatattctggccatttttttccgatcccggataactcgctgcaggccaccaccgtcccctctgtgtcaatcaccccgatgaccttatccgttgtttccttcagctgcaggaccacgttctgaaaaattctcccggacatcccactgtcacactcccatcattctttctcgaaaggcgtgcagattagctttgtgcaatttgctattatgcaatctgccaagtaaatttcttatattatagcggaattattgacatattgcaatacttttcttctattttcaccaaatttccattttatttttgatgattttgctgtactttctacagtttacttccattgattaaagcagcaggagtgattccttctcttcctttgttaaatatcgccactttccgcactccaaagccggatccaggcgcaaaggccccatggaaagccgttttaagtacaaaaccggcgcgccgcatctggcggccattcgtttgacctgatggaatttcccctcgtgcagcgtgatcaaaacctcgctccgcccaccatcatcagcgagaagtctcagctgtgccggaaggcagcgatatccatcctccaacacaagaccgtcagcaaaggctgcgcagtccgcttctgtcagcactccatccagccgggcataatataccttgtccacatggcggcgaggcgaaagaaggcggtgcgccagtgggccgtcgtctgtcagcagcagcagtccctcggtatctttgtccaaacgtcccacagggaacagttcccgcttctgcagctccagcggcagcaaatccagcacggtaggcgtacagcgatcctccgttgccgacaggacgcccgtcggcttatgcagcattacatagcagtgttcggaaaaagagagccgttcaccgtctacctggagcaccgtatgttccgggtcatatttgtcatcggcggccaccgccggccggccgtcggccagaacccgtccctcccggaccagctgcttcacttcccggcgggaccaacgtccagtggaggaaagcaatttgtcaagccgcatctgtgccatctttttatctcctttttcttgtgttctgttttccttgccggaatattgtatcatactttcgcctccggcggaatagaatcccttcacaagggatgtgatggacttgtttattatgacgacaaagctaacaaaaaccaaggcagtggccggcgttttagccggcggcgtacttttgtgcgctgtaatcttcaccgcaggacacgcgtttgaaaaaaataccggcggcccgcccagtcccgcttccgtcagtgacaacgcgcaacgggtagcctatctggccggttggggctgggaagtggaaccgtcggcggttgaaacactggatttgacgtttccggagacactcgacgaggcctacctctcctacaacgagctgcagatggaaaacggcatggacctgaccccctactgtgggcagcaggcaaaacgctacacctatcgggtatccaactatcctgactacgaaggcaccgtgctggccaatctgtatctgtgcggcgatactgtagtggccggcgacctgactgcatcgggtgaaaacggcttcatcgcgtcactgcgcagtccctgaatcggaatgacacgcaaaaaagccacaccccggcgcacaacatttcctgtgccggggtatggctttttttgcgttttttattgtgcgcagcttcaatatcgccgccccaaatcctgcagcgcggcagcatcaaaaacggcgatggatccgctgtgctgtcataacgcagtttcgtcctgtctctcctcgaacaatgcaaccgttgcaacggaaacagaaaaagagcagcggaatccccttgggattccgctgctcgactacacatggctgaaacttagtcctgaacttcgatgaccacgccggagccaacggtacggccgccctcgcggatagcgaaacgcaggcccttctcaatggcgatgggggtgatcagctcaaccttcatgtccacgttatcgccgggcatgcacatctcggtgccctcgggcagggtgatggtgccggtaacgtcagtggtacggaagtagaactgaggacgatagttgttgaagaagggggtatgacggccgccttcatccttgctcagcacgtacacctgaccggtgaacttggtgtaaggatggatggagccgggcttggacagaacctgaccacgctcaatgccgttacgatcaacgccacgcagcaggcagccagcgttatcgccagcctcaacataatccagagtcttgtggaacatttccatggaggtgacgacggtcttcttcttctcctcggtcaggccgacgatttcaacttcctcgcctgccttcagctggccacgctccacacggccggtcgccacggtgccgcggccggagatggtgaagacgtcctcaacgggcatcaggaagggctgatccgccttacgatcaggagtggggatataggagtcaacagcgtccatcagctccttgatgcatgcatactcaggagcattgggatcgttggactcagacaccagagcctgcagtgcgctgcccttgatgatcggaatatcgtcgccggggaactcatagctggacagggtctcgcggacttccatctcgaccagctccagcagttcctcatcgtccaccaggtcagccttgttcaggaaaacgaccatagcgggcacgcccacctgacgggccagcagaatgtgctctttggtctgagccatggggccgtcagttgcagcaatgaccaggatagcgccatccatctgagcagcgccggtgatcatgttcttaatgtagtcggcatggcccgggcagtccacgtgagcatagtggcgcgcttcggtctcatactcgacgtgagcggtgttgatggtgatgccgcgctcgcgctcttcgggagccttatcgatggagctgtaatcttcaaaatcagccttgccctgcagtgccagccacttggtgatggcagcggtcagagtggtcttgccatggtcgacgtgaccgatggtgccgatgttaacatggggtttgcttctttcaaacttctgtttagccattgttgaaaatcctccttaacaatttcatgtgatcgcataaactactattatgcggatagtgtacaacaaatagggtaaaaaagcaattgcttttttatcaatttgccttggtgcgctcttcgatgatcttggcctgcaggttcttgggcagctcacagtaactatgaggctccatcgtgtactggccacggccctgcgtagaagaacgcaggtcggtagcgtaaccaaacatattcgccagaggcaccagcgcgtccacctgctgtgcgccgggacgggcttcctgacccaggatctggccgcggcgggcagtcaggtcaccgatcaccgtgcccagataatcatcgggcgcaataacggtaactttcataatcggctccagcaataccggatccgctttccgcatggcttccttaaacgccatggaaccagcgatcttaaaggccatttccgaggagtcgacctcatggtaagagccgtcgtacagcgtaacctttacatcgaccacgggatagcccgccacaacgccggcctgcagggcaccctgaataccggtgtccaccgcagggatgaattccttcggaatgctgccaccaacgactgcattgacgaattcatagcccttgccggattcgttcggctccagaatgatcttaacgtgaccatactgaccggaaccgccgctctgacgcttatacttggtatcctgatccacctttttgcggacagtctccttataagcaacctggggcgcgcccacgttggcttccaccttgaactcgcgcagcaggcggtccacgatgatctccagatggagctcgcccataccggcgatgatggtctgtccggtttcttcatcggtgtaggtcttgaatgtggggtcttcctccgccagtttcatcagcgcaatgcccatcttctcctgaccggctttggtcttgggttcgatggccacacgaatcacgggctcagggaagttcatggactcaaggatgatcggagctttttcatcacacagcgtatcac

SEQ ID NO: 999 - DNA, 1697 bp, Unknown
  16S sequences of unknown bacteria
ccggcgggcagaagcagcgggtggcttgtgcgcgcgccgtcgtcacgcggccaagccttatcctagcggatgagccgaccggggcgctggactctcgcaattcgcgcatgctcctggaatgtctgggagagatgaacagcgcgctgtcctccaccatcctgatggtgacgcacgacgcgttcagtgccagctatgcttcccgggtgatcttcatcaaggacggcagcgtgttccatgagatcttccgcggggatgatgcccgccgtgcgttcttcagccggatcatcgatgtcgtgaccctgctgggaggcgatgtgagtgatgttatttaagctgtcgctgcgcaatctctctcacagcatccgggactatgcggtctatttcatcacgctgatcctgggcgtcatggtgttctacctgttcaatgcgctggattcgcagtccgtgctggccatggtggggtcctcctcttatgagatcatccatcagatgatggcctttctgtatctgatgagctttttcgtcgccttcatcatgggctttctggtcatctatgccagccgtttcctcatccgccggcgcaagcgggagttttccatctatctgctgctggggatgagcaagaagaagatctcgcggatgctgctgtgcgagacgctgctcatcggcctgctctcgctggtgatcggcttgctgctgggcatcgcgatgtcgcagctcatgtccatcatcgtcgcccgcatgtttgaagcagacatgagcgcttatgtcttcagcgtctctccgtttgcgctgcagctgaccatcttctgcttcggcttcatgtatttcatggtgatcttgtttcacatgttcacgatccgcagctcctcgctcaacgcgatgcttcgctcacaggacaagagcgagacgacccggccaaagaatttgtggctgtgcctgatcgtctttctcatcggcgcggtcatgctcggctatgcatattatagggtgagcgtcgatgtcgccgggctggaggtcgtcacgctgatgcggatgatcgtctatggcatcatcgccacgtttctcttgttctggtcgctgtccggctttgtgctgcggatcgccatgtggcggcgcagcttttactaccgcgggctgaacagcttcacgctgcgggaattttatacgcggatcaacacgacggtcagcgccatgtcgatcatctgcatcctgctgttcttcacgatctgcatcttcgccagcgcgatgagcctcaacagcacgttccgcgatgatctggagcgccgtgtccccagggatgtgcaggtcatcagcagagaaagcgaggaagaggtcagcgccctgctcagcggcgccggcttcgatctgagcggtcttcgcgcggtggatgagggacccacttatgaggcgcaggagctgaccttgtccgatacgctgggcggcaggctggaggagacgatgtctcagtggtatgccatgatcaatttcgatgcgacagagacgatcatggagcagtccgattacaaccgcgtcgcaaagatctacggcgatgagcagatctcgctggctgaggatgagtatgccgtctcttgttcgatggacatctggaaagagatccgcacagaggcgctggcgatgcagacgcagatcgaagtcaacggccgaaagctgaagccggcggtgcagcagtgtct

SEQ ID NO: 1000 - DNA, 3122 bp, Unknown
  16S sequences of unknown bacteria
atatctgtatgggggaaaattttttgtctcttatcaagacgcgccgtagtgtacgggcttataaatcggaacctgtcccttccaaggctttggacgctgtactggaagcagggacttacgctcctaccagcggaggacatcaatctccaaccatcattgcaattacagaccccaaatataggcgggagattgcaaaactaaacgcagaagtgatggggagcaacacaggcccttattatggcgcacctgtcgtgatcctagttttggcagatggctccgcaagtacctttgtggaggacggaagctgcgtcctcgaaaacatgatgctcgccgcccatgcccttgggctgggaactgtatgggtacatcgggaacgtgagatttttgacagtgaaagtggcaaggctctcctgcgggagtgaaagctgccggaaaccttgcgcggtgtcggggcgattgcattgggctatccggcccgggaagccggtcagcccgcagcacgcaaacaaaactatatcgttcggatttaatgtcccgctgtccggcgcaattttttgcgccggacactttgtggagaggagggaaagtatgcagaccaataataaaatggcggtcgctcctgttggaaaactcatctggcaaatgtcgataccgccgctgatttccatgtttctgcaatattcctataatctgatagacagcgcgtttgtagcgcggctgagtgaaaatgctttgacggcggtttccctgtcgtttcccattacaacactgatgaatgcaacatctatctggatcggcgttggcgtgaatgtactgattgcagggtatcttggacagagaaagcagaatgaggcaaatactaccgtcacacatggattgttactggcctttggaattggtgctttgctcaatcttctggcattactgattatgaaaccctattttcgggcattcaccaataatgaagaaatttatcagctgagcatcgcctatatgagtgtgtgctccttcatgcaaattcccaatatggtgcatatcgccatccagaagttgatacaggccaccgggaacatggtcgctcccatgtggttccagatcgcgggcgtggtcgtcaacttcgtgttcgaccccattctgatttttgggattggtattttcccagctatgggaatccgcggcgctgcggtagctaccgttgcaggctatatgctgtccatgattttggcatttgctttactgctaggcaaaaagcagaaagtgcggataaagatcaaaggatttcatttgcaaaagtggctgattggccatattttcacccttggactgccgtcttttattatgaatgcccttagttcttttatgatgacttttgtaaacttttttctggtcgcctattccgatacggcaatcgctttcttcggtgcgtattttaaggtgcagcagttgattgtcatgacggtcaacgggctgatccagggctgccttcctattatgcggtttaactacggtgcgggaaacagagataggctgcactctgctttccgctacggaaccgctttggtctccggtatgatgatactgggaacattgaccgtcatcctctttccggcgcagcttttgggattatttacggcgtcggaagccatgcgctcctttggaatatccgctatgcggattatggcggtcagctatctgttttgcggtctctctactatgatttccacctattttcaggctacggaaaaagtaggttccagcatggcaattcaattatgcaggcagatgcttttccttgttcccgccttatggtgtctggacaaattgttccatctgaatggaatctggcttgcatttccggttgccgaaactgccactttactcgttgctcttgtgatgatggcatggcatcaccgcaaaaatatctcataacgtgttccagggaggaaaaatgatgaacgacacttttatgaaagaaaaaccggtattaccgctgattttatccatgaccctgcctatggtgttatccatgctggtcaattccctctacaacattgtggacagttttttcgtcgcgcagatcagcgaggaggctatgacggcattatcgttggtttacccggttcaaaattttatcaatgctgccggaattggatttggcgttgggatcaatgcagtgatcgccttctatctgggcgcgggggatcatgaaaaaacggatcaggccgccacgcagggacttgtgcttgccgtgattcatggcgttgttatgacagtctgctgtattacgatcatgccggttttcctgcggatgttcacttcatccgaagcggtcattgaacttggcgtccgctattctgtcgttgcgttcgcctttacactcattgttaccgtcagcatggcgtttgagaaattgttccaggcagtaggaaacatgaaaacaaccatgataagcctgatgtgcgggtgcatcacaaacatcgtcttagaccccgttctgatttttggctatggcccattcccggaaatgggaattgaaggcgctgcgctggcaaccggcatcggacaggctctgacactggcgatttaccttgtggtctatcttttgcggccaattcgcgtgcatatccgcaggcagtacattttgcccagcaaaaagatggtcatcaagctgtattctatcggcattcccgcaaccctgaatcttgcacttccgtctcttttgatttcggcgctcaatgcgattttagctgcctattccgaagtgtatattctggttttgggaatctattacaaattacagaccttcatctatctgcctgcaaatggcattgttcaagatatgcgccccttgatcggctataactacggtgcgggcgagaacaaaagagtcagccagatttataagatcgtcttgtgcatgagcggtatcattatggtgcttggaacagtgatatgcctgctgatccccggccagcttatggggctgtttacccaaacagaagcgacgattcaagccggggaaacagccctgcgcatcatcggggccggatttatcgtctcggcggtttctgttacatcttccggcgcattggagggacttgggaaaggaactccctctttac

SEQ ID NO: 1001 - DNA, 10137 bp, Unknown
  16S sequences of unknown bacteria
gcctccccgattcctgatctctagccggtaatcaccaagtctttttgccacctctgtctttaccgtatctgcggtctgctgactgcagtcaatgccataaatctctgtatcctcataaaaatgaaacccaaaatagattgccactgcaatataaatcccaagcacgcccgcaccgatacccgccaaaatccggttccgttttcgacgctttcgtgcgcggagcttttgctgccagccttctgccgcttcctgcaccgcagccgcctcccgccgcctgcttctccccctgtcataccttcttctatcttcggccgatgccctgtattttggtccagcaggtgatgtctgtctgcttccttcccctgtacatctgctgcgacgcggccgctcccctctttgctccatctcttttcttcccccgttactgttattgtaaagcggagattcgcaacccgctttcactgcctgctcatgaatgcgcctctccaaaagacgcttgtgttctatcataacactccgtctgcattttcgcaacgtgaaagaaagcgaaaggcaacgccatccaattaatgacactgccttccgctctcatattgttcggtccgatggccttcaggacctgcagctttccttttactgcagctggcttaagcgctcctttacctgatccatcatctgggtatatttttccagctttgccttctcctcgtcgatcttggactgcggcgctttgctgacgaatttctcattgccgagcattccattgacgcgggcaagctcctttgtcaggcgctcctcctccttcttcagacgctcgatttctttatcaatatcgaccagctctgcaaacggcatgtaaatgaccgcctccgggatgacagctgataccgcatcatcaccaatacctgacttatctgcctgtacgtgcacactgctcgcgtagccaagcgttgcaaagaataccttaccggtctcgaaaatctcacgcaccttctcattttccgaaacaacgaatacctgtgccttcttgcttggcggaacgttcatgccggtacgcacgttacggatcgcgcggacagcctctttgatcgtctcgacttccttttcttccttggcgaagttccatgcatcctgatattccggccatgcagagatcatgatggactcctcctccggatgtaaggtgcagaaaatctcttctgtgatgaatggcatgtacggatgcagcagcttcagcgcattcgtcaaaaccgtctttaatgtccagagtgcagctgcctttgtcgtatccgtctcactgtacagacgcggcttcaccatctcgatgtaccagtcgcagaactcctcccagataaagtcataaaccttctgaactgcgataccgagctcatatttatccaggttctccgttacttcttttgcaagcgtatttaccttggagagaatccacttatccgccccggtcagagtcgcaggatcgatctgctccggcacctctgccttttccagattcatcataatgaagcgggatgcattccatactttatttgcaaagttccgggatgcctcgacacgttccatatagaaacgcatgtcgttgcccggcgcatttccggtcatcagggtcagacgcagtgcatccgcaccatactggtcgatgatctccagcggatcaataccgttgccaagggatttactcatctttcgtccctgagcatcacgcaccagtccgtgaatcagtacatgatggaacggcacctctccggtctgctccagtgcggagaataccatacggataacccagaagaaaatgatgtcatagccggtcaccagtacgtctgtcggataaaaatactcaagctccggtgtcttgtccggccatccaagcgtggagaacggccacagtgcagagctgaaccatgtatcgagtgtatcttcatcctgtgtaaaatgcgtaccgccacacttcggacagatcttcggcatctcccgtgccacaacggtctcgccacagtcatcgcagtagtaagccggaatccgatgtccccaccagagctgtctagagatacaccagtcgcggatgttctccagccagtgcagatacgtcttgccaaagcgctccggtacaaactgcagctcaccgctcttcaatgcctcgattgccggcttcgccatctcctccatgcggacaaaccactgcggcttgatcatcggctctaccgtcgtcttgcagcggtcatgtgtgccgacgttgtgctcatgcggtacgaccttaaccagaagtccaagatcatccagatccttcaccatcgcctttctggcttcataacggtccatacccgcatacttgccaccgagctcgttgatggtcgcatcgtcgttcatgatgttgatctccggaaggttgtgacgctttcccacctcaaagtcgttcgggtcatgagccggcgtgatctttacgcagccggtaccgaactctttgtctacatatgcgtccgcgataaccgggatctcacggtccgtcagcggaagcttcagcatttttccgatcagatcctgataacgctcgtcatccggattgactgccactgcggtatccccaagcagagtctccggacgagtcgttgcgatctcgacgaatctgccctcttccccgacaatcggataattgatgtgccagaaatatccggcctgatccacatgctcaacctcggcatcggaaatggatgtctggcagaccgggcaccagttgatgatcctggatcccttataaatatagcctttttcatagaggcggataaacacctcctgcacagccttcgaacatccctcatccatcgtgaaacgctcgcggtcccagtctgcagatgcgccgagctttttcagctgattgatgatctttccgccgtactcttccttccatgcccatgcatgcttcaggaattcctcacggccgatctcatccttatcaatgccctgctctttgagctttgctgtgacctttacctcagttgcaatcgccgcatggtccgttcccggctgccacagcgcctcatagccctgcatccgtttgaaccggatcagaatatcctgcatcgtctcgtccagcgcatgtcccatatgcagctgtccggtaacgtttggcggcgggatcacgatggtaaacggcttcttgtccggatttacctccgcatggaaatactttttatccagccatttctgatacagtctgtcttccaggcccttcgggtcataggtctttgccaattctttgctcataaaatcctcctgtgtgtcgtaatgtaatctgcagtgcgcaacctgccgtgcgcaacctcgatttcgcttcgcttcatctcggtcgcgggcttcgccctatcggtctttacgggaaccctctgccggaagcaagcttccttccgagggttcccgcaaatcccggcacggctcattgccaagacggaaaaaacgcccttcacacttacgtgcaaagggcgaatgtctcgcggtaccaccttttcttacggaagcccttgatgctctgcctgaagcgaatatttactcacggcaaaatcgataaacagctccgtatctttccttctgtaacgggaagtcccgtgatcacctacccatcctttgacttcagcgatccggttcaaaagctaccttccgctcccgctctcctggatgacctctcagccggtggatcatcctctctggtggcgccggaaaacgtactcctctttctcatcaccttttcttacatacctgctatcttagcggagacgcactattttgtcaagccgaaatgaagaaaatatgcttccatactcatctcggccagcgctcttcctttttcaaaagcggagcaaacgcctgatgcggctcgctctgataccagtaagccacgcttgccacatcgtcctgccgttcaaaatttcccttatggcagcctccgatctgctgaagcgtcacgcgcagatcctcttcaaacagaattgggtccagaatatgccagcgataaaagccgcgctgcggaagtgtatcatcattgtgatacgcactccaggcccgctcatcgtgtgtggaataatacggatatccgagaaacggcgtattgtaattctgctccacagtcttcccgtccacctgctttgcaaagctccaggaaccgccgaaatagtcctccatcccggttccgcagatcgtcggatatgcctcatctccgtcaatatagaacttcatctcaccttcgccataccagtagcgctccagtgaggtatgggcaatatacgtgccgacataatgtccgcgtcccttcacgccatccaggatcgtataatccttctgcagctgcgtcagcttctccctgcgccactgtgcatggaagtataaggtatcctccggctgctcatccagctccagataatcaatctgataaaagaagcactccagctctgtctcgtgctgattttccagtgtgatcctcgcccgctttccgaacggcatctgaaaataacagttaaagcctctcgccggaaccacgcagattggaagggaattgacgatacagtccctggcaaagccgcagcagaagaagtccccgagcggactctccacagaaggtgtctcctcatcatcccagtacatccgcagcaccagatcgcgcagaacataatagtccttttccgtctgatctgctaccgtgatccagatatgattgatcacgcccggccctttgatatctgccagtgtcgtcacactcccggaagcaaggtttcgcagacacggagaaccttttctggaaggtcccagattgctgggcgccatcccgccctttcctttttcgcctgtcggattttctgcattgacagaacggcttctgcctctttttgctgtcgtcagatctgaaagaccaccaaatccattcattgctttttcctcctacaatttatcatgcacaaaattcttttttacagctttttcagataatagtaaccaaacgccgggatattgaccccgcatgccttcatcttctgtccggagatcagatcgacatacagaccgtcattttcattgatccatgccgtcttgtcgtactcactgaaattgaacagcccgtaaattttctccccgtcataaaatctgccgatacagagcacacccttttcccacgtctcgactgtccatgtatctgcataggagacaaacgccttctcttccttacggatctgctccaatttttgcaggccaaggaacattttcccttctacggtagacggatcgtttctcttttctgccagatcccagtgcatcacaccgcggtgaatgtaacgggaatctgccaccttgttcggatcatccttataggtataatcgttgacctgtgcgatctcgtctccgctgtagagtaccggaataccggactgcataaacatatacgcatgcaacatcagatccttgcggatcgccagatccatcgcggccggattctgctcaaagccggccttttcgattccacacatggacgcagttgtaccgcagaagcgggcatctccggtcaccggatcagcattgtacagctcgccgcggctcgtgctgtttcctgcatagccctggaaatagtcattcaggtactgtttatgggagcgctccatcatgccctcctgctccagtgtcgcgtaatccagtccccagccgatatcatcgtggcaacgcaggtaattcagaaatacataatcatttggcaggctgtccacgatatccagctgcttctttaaaaggctcacatcacgcgtcgccacggtatgccaggtcgtagccatcgtcgtcacattgtagagcatgtggcattccggcttctcaaccgtgccgaaatacggaacgaccttctccggctccatgacaacctcaccgagcagcagaatacccgggcagacgatctcaccgatcatacgcatcatgcgcacaatcgtatgcacctgctgaagattccgacaggtcgtaccgagttccttccatatatatggcaccgcatcaatccggacgatgtcgattcccttatttgcaagaaagaggaaattgtacatcatctcattgaacacacgcggattgcggtaattcagatcccactgatacggatagaaggaggtcatgacaaaatgtccggcatccggaagccaggtaaagttgcccggtgctgtcgtcggaaatacctgcggaacggtctgttcatattttgccggaatatcccagttgtcaaagaagaaataacggctcatatattcaccgtctccctgacgcgcacgcttcgcccactcgtgatcctctgatgtgtgattcatgacaaaatccatgcagacattgatgtccttctcatggcaggctgcggtcagatgctccagatcctccattgtgccaagcttttcctgtaccttgcggaagtctgacactgcatagccaccatcggaacgcccctccggggtatccagaaacggcatcagatgaatgtaattgacaccacactgttctacatagtcgagcttctcctgcacacccttcatattgcctgcaaaattgtcgatgtagaacatcatgcccatcatgtcattctgcttgtaccagtccgggcgtttctctctgctcgcatcagatgcacgcaggttggtatttcgctccatgtagaaacgtttcatattgtcgcacagctctgcaaacttggagctgttgccataaagttccatatacagccagcgcagttcctcaaaatgccggtcaaaccgcttccggtatgtcgcttcaattgcatcctcgcgtgctttttgagctgcctctgcctcgcgcagtgcagcctccttctcagctgccgcaattgcagctgcctttttctctgctgccgctttttctgctgccgcctttttctctgctgccgctttttcttccgctgccttcttctctgctgccgccttgtcctcagcagtcatcgtgatcgccacggtcggctgctgtaatgtctcctgttttgttgtcctctttctcgttcttttcatcttctatcctctccctcccgaattggaagcatgatgccctgtttctcctttatatcagtctctggcagtggaagcgtcgtcccgccgtcctgaaagacaatcggcagatccacgatatcttccactgcttctccgttcatcaatcgcatcagacagtcgacactcgtcttcgcaatcatgcctgtatcctgataaatactcgacacgaacggctgtccggtattcatccagcgcaacccgtcatagcctaccagctgcacatcctccggaacacgcaggcccatctgctccagctcctcctgaatgacgaccgccagatgatctgtccccgcaaagatcccgttcggccttccattttctgtcatctgattattcatatgcgcctgcaatacacttccgatcaggctgcgtgcagaaaaggatgagtacacggacggtacctgcttctcggaaaacgtaatgcttgcatatggaatctcgttttcttcacaatacccttcaaaaccaagtctgcgctttcgtacctcattgtccactgacataatggtctgcacaagcaacagattcgtcgcaccacgccggaccagattctctgctgccatacgtccgcccagataattatctccggatacacacggaatatttttcgaaaaacggcgctcaatcgacacaaatgccagcgtatcatccagatattcctccacatcactgaacgtgacaccgatgataccgtcgaccttattggctctggccatttcgatatatttgatctctttctctttctcgccgtctgaaatacacagcagtggctgtttatcataggcagaaagtgcatgctcaagcccctgcagcagcaggctgtaaaacggattggtaatatcaggcaaaatgacgacgacatagtcggtgcgctgtgtacgcatcttccgggcaatcccattcacctgatagccaagcttctgaatcgactgctcgacccgctgcctccgctcttcacttacatttccgccattaatgacattggataccgttcctaccgatacacctgcatccatcgccacgtctttgattgttgccatccctgtatgtcctcacttcttttccggtattcggattttttatctgttcaactatttgttctttggcgcctttatttcaatatgcaccactttgcagctcctggagccgcatctccacgcagcttaagcgtttttccaagtacattttcctcggtctcaatggtgccgcaaagccgtccgccgtccgccaggatatccagcatctcctggtcgatcacaactgtcatatcaagcggcttcgctggatcaaacacaccgcgcagctctccatccagctcatgcttccggtcggtgtccacccagagctcgccatgtgtaaagtctacccggatcgtcgtctctccgatcacaagaagttccgttccggtcattccggcattccagctaagcgcaacctcccttacatcccctgcaatggaaatggtctcgttttgcggaagcgcctcccagctgccgcgcagggcatgcagctcctctgccatggaaaatgccagctgcaatccgtccgctccgtccttcaggcagatttcctgcggaattcccattgcgccgcgataccagccgtttgcattatccagccgcacccacggaacgagtaatacccgttctccaacatttacaaaattctgcgcggcataggcccgtctgctgaaataggccatcttccgctccgtcttcgtacagaaggtatagccatcaaagctgccgatctgataataaccgtccgcagaccagaatacccattccttcttatccgtcccctctaccggaacctcgatcagaagcggacattcccacatccccggtaccgtcatcttctgcgtctgctcccaatgcagtaaatcatcagagcgcaggatcagaaaatcattttcctccaggtacataatcatcacataggcgtttgattccgcatgccagaataccttcgggtcgcggttttccccgacaatccacggaaccagctcttcgtcacgcttatgaagggttttcgttccgtctgtcgaccacatcagcttctgtgtgaagagattacctgcttccttcgaccactcgttcatccctcctgccgctgtatagaaaaacagcagtgcatcctttccgtaaccggctgtatttttctcatcaaccagcgcacaacccgaatacatcgtgccgtactcatccggtgtgattgctacctcctgctcttcccagtgcataagatccgtactggtggcatgcccccaggacatattctgccattccgtcgaatacggattgtactgatggaacatatgataaacgccatccgcatacaccagtccgttcggatcgttcacccagccgtatgccggtgtgtaatgcaggcgcggacggtacggataatcattctgcggacgcgtctcctcctggcggatatcaacgccatccagatactcctctcctttttcactgacaatccgaagctcttttccaagatactccgtcgccttccataccccgtaaaaatcaatatgctcttttccgagggaaactttcatctcctggattttctgatccccgtcatataccgacacccagaccatttctccggacatatccaccggaaaccagagatacttctcactcactgtaatatccataaacgttcctcccgttattttctccataagctgaaattatatggctcttttgcaggctctgcatccttgtagctcaaaagctttaccccctgctcctgtaaaaagctaagaaccgtcggatcattgtaaaactcatagtcatcctcccgttcccacgcaataaattccccggaataattgtgatttccggtcatcttcatctcatctgaggtctttgccggatgcagcaccagcttgtactggccctccagctttcggatctctttttcgaacagcgtccggtcatgagaaaacttatcgctatccggaagcatccggttgtaatagcggtggttgatcagcccctcttcctccacccaccggtcaaatttttctgccagtccc

SEQ ID NO: 1002 - DNA, 1792 bp, Unknown
  16S sequences of unknown bacteria
gccctattcaaatcccgtgctaaacagcgcctgccacgcctggagctgcacgcccagctattggataaggaaatcggaggaaaatcaatgaaaaaaacataaaaataggtataatagggcttggtcagcgcgggggcataatgctggaaaaccctataataccgatgatgaagaacggcgcgggcatagaaatagccgcggtttgcgaccttttgcccgatagggtgaccgcagcagcggaaaaactggaaaaggcaggctttgcccgccctatggaattcacggattataaagagctgcttaaaattaaagagcttgacgcggtgtatatagccgtatcgtgggaggcgcacgccgaggttgccgtggcggcaatgcacgcgggaaaatatgtaggacttgaggcgggtggagcatattcggttgatgactgctgcaagcttgtgcgcgcttatgaggaaacaggcacagagcttatgcttatggaaaactgctgctacggcaggcgcgagcttatggcgcttaatatggcgcgcaagggcgttttgggtaatattatgcactgctcgggcgcttactgccacgatttaagggaagaaattacaagcggcagggaaatacggcattacaggctgcgcaactatatccaccgcaactgcgaaaactacccaacccacgaaatagggcctattgcgaaaattctcgatataaacaacggcaaccgatttttaacgctttgctctgtttcgtcggctgcaatgggcttgcacgaatacgccgtacaaaaaaagggcgcggagcacccgctttccaatataaattacgcgcagggcgatgttgtaaccacggttattaaatgcgcgggcgggcagaccgtctgccttacccttaacacgactttgccgcacgcatactcgcggaaattcgaggtacacggaacaaagggtatgtatatggaggataacgacagcgtatttttagacggtgtcgccgaacacgcgaaaaacgagtgggactggaaaccgatgtggggcaacgcttcacagtatgaaaaggaatacgaccacccgctttggcaaaacggtggagtggggcaggatatgcacggcggcatagaccatcttgttttcgctgcgtttgtaaacgcggttaaaacgggcgcacacgcaccgatagatgtatatgatgcggcaacctatatgtgtataaccgccttgagtgaggaatcggtcgcaaagggcggcgcgcccgtcgctttcccggatttcacgggcggcagatggacagagcgctcggatattgccgataacgaatataatcttgataaattaaacaacggcagggatatatacttcgccgactgacgggcagggaaattaaataatttaaaatcccgaaaaataaaagctttgatcaaccgtacactcaaacggtcgaatcaaagctttttatttaatgcctgccgaacaattcaaaagtaccttaacccgagcatgcaggtgtaaacttttgaattgttcgggtgcaaggtttttgcgcaattttgcgaaaaacccttgcactttaaaaagaatcacattttgattctttttaaaatcaggcgacaatcaatggatactgacggtcaaaacaaaggttttgacccaaaaaaacgagattttaactcgattttaaataattgcatttgctaatgcaattatttagcagacattatttatatgaatataattacgaatagcgcgtttgtttatcgagtcctgcccttacaagccccataaacagcggatgcgcc

SEQ ID NO: 1003 - DNA, 15981 bp, Unknown
  16S sequences of unknown bacteria
aaaggcgtatgacgaattataatttttacacggatcagaaatggggaaaagcgagcaattatacgctgtgtctgaacagctcacagattggatatgacagatgcgaaacaataattgcggagtgtgcaaaataaaaatttattttcactattttgcatgttcatagagttcacaaattcttcacaaaaaaattagcactcacctcttgacagtgctaacaacaggtgttatagtatgaatagaacaagataatccttccgataaagaagcctgtttgccggtcagtatatggtgatccggtatggcttcggtgtcggaagttcttatagatatctgttgaaggatacgtctggtgcagaaatgcgcgggacgatggacagagatgggaggtacgtttatgaacatcagcaaatttacgcagaaatccatcgaagcagtgaataatctggaaaaggttgcttatcagtttggacatcaggagatcgaggaagagcatctgctctactccttgcttcatcaggaagacagcctgattgcaaagctgattgagaagatggagatccagaaggagtattttgaggaccgtctggatcaggcattgaatggaaaagtaaaggtaagcggcggcagtccgtatatcggacagtatctgaacaaggcgctcgtcagcgctgaggatgtggcaaagcagatgggagacgagtatgtttccgttgagcatctgttcctgtccattctgaacaatcagagtccgtccatgaagcagttcttcaaggaatttggcatcacgaaggagcgctttttgcaggccctttcgaccgtccgcggcaatcagcgcgtgacgacggacaatccggaagctacctatgatacattgaataaatacggacaggatctggtcgaaaaggcacgcagccagaagctggatccggtcatcggcagggacgcggagatccgcaatgtgatccgtattctttccagaaagacaaaaaacaacccggttctgatcggtgagcctggcgtcggcaagacggcggcggtcgagggactggcacagcgaatcgtccgcggggatgtcccggagggactgaaaaataaaaagatcttcgcactggatatgggtgcccttgtcgcaggcgccaagtaccgtggcgagtttgaggagcgtctgaaagccgtccttgaggaagtgcgcaagagcgagggcgagatcattctcttcatcgatgagctgcatctgatcgtgggcgcgggcaagaccgacggcgcgatggatgccggcaacatgttaaagcctatgctggcaagaggcgagctgcactgcatcggcgcgacgactcttgacgagtaccggaagtacatcgagaaggatccggcactggagcgtcgttttcagccggtcatggtcgacgagccgagcgtggaggatacgatctcgatcctgcgtggcttaaaggagcgctatgaggtgttccatggcgtcaagatcacagacagtgcgctcgttgcggcggcgacactgtcacaccgttacatttccgaccggttcctgccggataaggcgatcgacctggtcgatgaagcatgcgccctgatcaagacagagctggattcccttccgacggagctcgatgagctgcagcggaagattactcagatgaagatcgaggaggctgccctgaagaaggagaccgaccggccgagcaaggagcgtctggaagtgctgcagcacgatctggccgagctgcaggatcagttcaacagccagaaggcgcagtgggacaatgagaaaaagtcagtcgagaagctttcggccttacgtgagcagatcgaagcattaaataaagagatcgaggttgcacagcgcaattacgatttaaataaggctgcggagctgcagtacggtgagctgccgaagctgcagaagcagctggagatcgaggaggagcaggtgcacaagcaggacatgtcactggtgcatgagagcgtgaccgaggaagagatcgagcggatcatctcccgctggaccggtattccggtcgcaaagctcacacagggcgagcgtgcgaagatcctggcacttggcgacgagctgcacaagcgggtcgttggtcaggacgacggtgtcgaaaaggtgacagaggcgatcctccgttcaaaggccggtatcaaggatccgacgaagccgatcggctcgttcctgttcttaggaccgaccggtgtcggcaagaccgagctggcaaaggcactcgcagagaacctcttcgatgacgaacaaaatatggttcgtatcgatatgagtgaatatatggaaaagcattcggtatccagactgatcggagcacctccgggatacgtcggatacgaggagggcggtcagctgaccgaggccgtccgcagaaaaccgtactccgtcgtcctgttcgacgaggtcgagaaggcacatccggatgtattcaatgtgctgctgcaggtactggatgatggccgtatcaccgactcgcagggccgtacggtagacttcaagaacacgattctgatcatgacatcgaacatcggctctgcttatctgctggatggcatcgaggagaacggcagcatccgaaaggacgcacaggataaggtcatggagcagctgagggcatcgttccgtccggagtttctgaaccgtctggatgagatcatcatgttcaagccgctgacgaaggacaacatcggcagcatcgtcgatctgatgatgaaggatctgaacagacgtctggccgatcaggagatcacactgacgcttgatccgtccgcaaaggactacatcatcgacggaggctacgatccggtctatggcgcacgtccgctgaagcgttaccttcagaagaatgtcgagacactggctgcaaagctgatcctctccggcaaggtcggcatggaggatgagattgtcttcacagtaaaagatggcgagcttaccgcagatgtgaagccaaaggcagaagtgatcgaagcaaaataaaacaaaacaaaactaacggacaggaaaggcatctctttggagatgcttttctttttctgatttttgtatgcctgagtggaaatgattcgtgttgaaaaatgtagaaacccgtaaaaagtccgtgtaatttaatgcaaattcaggaaaaaaataaattgatttttacatgactgcgtgccatactgagatgaaattggaaaaaaccgtcagtaaaaggaggcaacctatgagtcagaatcttccgcaggatccgatcatcctgctcagctatgtgaacacccagctgcgtgaccactatgcgacgcttgcagaattctgcgcggcgatgggcgcagatcgggcggagcttgaaaaaaagctccgggacgtcgattacgagtacgacccggagcaaaatgcgtttgtgtgatttgttttttataaggtctggattttcttgcggtaaatgcggccgaagagcaggatcgaaagaaggatcgatacgatctccgcgatcgggaaggaccaccatactgcatgcagtccgaaggcctccgcgaggatccaggctgaaggcagtaggacaaacagctgtctcgccacagagacgatcaggctgtagacgccgttgccgagcgcctgaaagaccgagctgaggacgatgcagaagcctgcaaacaggtagctccagctgatgatgcgcagtgcattcgagccgattgagatcatatcctcagaagcattaaagagcagcagcaatttatctgggatgatctggaacacgatgagtccgagcatcatcatgataaacgcaaagatacagcttaaacggatcgtatgggtaatacggtcctttttgcgtgcaccgtagttgaatgcgatgatcggcaccatgccgttgttcagcccgaagaccggcatgaagaagaagctctgcagcttgaaatacacaccgaataccgcagctgcggtggaggagaacacgagcaggatcttattcattccgaatgtcatgaccgatccgatcgacatcatcaggatggacggcacaccgaccgcatagatgccctttatcgtcggtgcatcgaaacgcatacgcgtcggatgaatatggatctcatggttgcgcgtcacattgaagaagattgcaagcagcgttgcgacgatctgcccgaatacggtagcaagcgctgctccggtcacgcccattttcgggaaaccgaagtagccgaagatgaggatcgggtcaaaaatgatattcaggatcgcgccgagtccctgcgtcagcatcgtatagaacgtcatgccggttgcctgaagcagccgctccagagtgacctgcatgaaaataccgatcgacagtccgcagatgaccgtcatatactgtactccgtactcgatgatctgtgcatcgtccgtctgcatcgtgaaaaagatgcgtgagccgaacaggccgaacagacagaagacggcaaagccgatcagcgccagcagaatactgttgttcgcagccttgtctgcctggtcataatttttctcgccgaggcttctggagagcagcgcattgacaccgactccggtaccggaagcgaccgcgatcatcaggttctggatcgggaacgccagcgatacggctgtgagtgcattttcattgatctgtgatacaaaaatactgtccacgacgttgtacagtgcctgaacgatcattgagatgatcatcggcagcgacatcgtaaggagcagcttcgggatgggcatgatccccatcttattttctttttttggttcgccggaaggcccggcggctttggtagattccatacagtactccctcgtaaaatgaaaggtgatgatgtaggattgcgggagctgctttgcagcgaagcaatccgtgtatcatttgggttaaaaggcatgctgcgctgtctgccgaatcacaaagtgcagggctttgtgcaaaaaagcagccgcatgaaaaatgcggcagttcgtacagacatgcaattactactattctatagggaataacggggattgtcaatttgtttttctgattacccttgacaaatcggggcgaatttcctatactgagaaacaaagcgacgaagggaacaagtaagagaggacggaaggcacagaaagcagccggcagatgagaggcgcgcatggaactcttttccgaatacatccaggagctccgcaccgaacgggcgatggctcaagtagactgcggcgggcgacacccgttaacgaggtcagggtatgcagtacccaatgaggcaggcaatgtgagttgtctgtgaaataaggtggtaacacgggatatcagctctcgtccttagaacagaataaggacgggagctttttgatacccagttctgtacagcagcaaagtcgatatggacatgccgtgcagacttgtctgctaaggcatcagcctcagacagaagcttgcgtagcaatcggatagttcgcaaagcgaatgggtctgtggcctgcgtacagagcgtccggtttcatattccgtccgatatagtcaaagcggatattcgcaatccgcttcaaccgaatagctgttccgcgcaattgaagcaggggacttgcttgattcggttaaactgcaaaataaaaattatcgctaggaaaaggagtaaacaccatgcagatttacgacgaactcgttgcaagaggactgattgcacaggtaacagatgaaaaagagatccgcgatctcgtaaacaacggaaaggcgacattttacatcggctttgacccgaccgcggacagccttcatgtcggacactttatggcactttgcctgatgaagcgtctgcagcaggcaggcaacaagccaatcgccctgatcggaggcggtacggcgatgatcggcgacccgtccggacgtaccgacatgcgtcagatgatgacaaaagagacgatccagcacaactgcgactgcttcaagaagcagatgagccgtttcatcgatttctccgaggacaaagcactgatggtaaacaatgcagactggctgcttgacctgaactatgtcgatgtactgcgtgaggtaggcgcacacttcagcgtcaaccgcatgctgaccgcagagtgctacaagcagcgtatggagcgcggcttaagcttcctcgagttcaactacatgatcatgcagagctacgatttctacgcattgtaccagaaatacggctgcaacatgcagttcggcggcgatgaccagtggagcaacatgctcggcggtaccgagctgatccgccggaagctcggcaaggatgcatacgcgatgacgatcaccctgttgctcaattccgagggcaagaagatgggcaagacacagagcggtgcggtatggctcgatccgaacaagacctctccgtttgatttctaccagtactggagaaatgtagctgacgctgacgtcctgaaatgcctgcgtatgctgaccttcctgccgctcgagcagatcgacgagatggataaatgggagggcagccagctgaaccgggcgaaggagatcctggcatacgagctgaccgcacttgttcacggtgaagaagaggcgaagaaggcacaggagggtgcgcgtgcactgttctcttcgggaagcgccgagcatatgccgacggcagagctggcggcagaggatttcacggacggtgcgatcgacatcgtgtcccttctgcacagatccgggctggcagcgagccgttccgagggacgtcgtgcagtcgagcagggcggcgtagccgttgacggcgagaagatcacggatccgaaggcagtcattgcacaggagaaattcgacggagaaggcgtggtagtcaagaaaggaaagaagaatttccggaaagtgacagcaaaataagagctgcttacgaaaaacgtcatgagcgtttgcatacagacagagattcactatgtgagaattgtgcatgaaatcagaaaaataaaacgagcagttataagtatgattatgcgcagaaaatttagccgggtgtcaggagcgtatccattcctgccgcccggtttcttttctcatttttctgccggaaatgcggtttttttgtcgtgagtatgctataatgggccggatgagaccactcatatactgtagaaagcgtatgaggcaggcaggacatgaacagcaggtcagaagcaccattgaagacacaggcgaaagcacaggaaagcagaaaaacagcagctgcagtcctgggggttttggcttccgggatctgtgcagtggccgctgtgccgccggtgcagaatttggcagcgcagatggcggatgatacgccgcgtccccgcgtcgccctcaccttcgacgacggtccgcatcccgtttacacaaaaaggctgctcgacggcctgcagagccggggcatccgcgcgaccttctttgtcgtgggagaaaatatttccggcagcgaggagctgatccggcggatggcagacgagggacatgtcatcggtaaccatacctacagccacataaagctctccggtatcacggatgcggaggcgtgcggggaggtacagaagacagatacgctcgtccgagagctcaccggcagtgggacggagttcatccgcccgccatttggcagctggaaaaagacgctggaatgcgagctggagatgatcccggtgctctgggacgtggatccgctggactggacgacgaaaaatacgggcgtgatcgtacagcgcgtgctggaggacgtggagccgggcgatatcattctgctgcatgatttttacggatcttccgtggacgcggccctggagatcgcagatcagctgctggcgcagggctatgagctggtgacggtagatgagctgattctgatatgatataagggtcaaaaggtcaaaaagccgttcatgcttgcatgataaggcttttgaacttgggacccgccaaacatgagaaagtagcgatttacgtagtaaatcagcggatttcgaatgtttgcagaattgcgggagctgcttcgcagcggagcaattcgtaggcatcagtaggattgcgagagcatgaaatgcgaagcaacccgtgtatcatatggggccaaacaccttttgagcctggcatcattataacatcgataataatcgatatatcagacatgagctgcttccattctctacaggtggcggcaacaaataaaatcgatttaaccgaatcaagcaagtcccctgcttcaattgcgtgaggcaacaggcagtgggctggaaatacaggagacaaccatggacttattcgaatacgcacggacaaaaacaatgcagacggaggcgccgctcgcatcccgcatccgtccgcggacattagatgaggtggtcgggcagcagcacatcatcggcaaagataagctgctctaccgggcgatcagggcagacaagctgagctcgctcattttttacggaccgccgggcacgggaaagacgacactcgcccgcgtcatcgccaacacgacgaagtccgaattcacccagatcaatgcgaccgtcgccgggaaaaaggatatggaggcagtcgtgaaggaggcgaaggagaacctcggcatgtacgggaagaagacaatcctgttcattgacgagattcaccgctttaataaaggccagcaggactacctgcttccgtttgtggaggacggcaccttgattctgatcggcgcgacgacagagaacccgtactttgaggtgaacggcgctctgctctccagatcggtgatcttcgaactgaagccgctgcaaaaggaggatatcaaaaagctgctgcagcgggccatgactgacacggaacgcggcatgggcgcatatcatgcggtgctcgaggatgaggcggcagacttcctcgcagatgtggcgggcggagatgccagagccgcattgaatgcggtggagctcggcgtgctgacgacgcagccatctgcagacggcaggatccatatcaccctggacgtagcgtctgagtgcatacagaagcgggccgtgcgctatgacaaggacggagacagccattatgatacgatttccgcgtttataaagagcatgcgcggctccgatccggatgcggcggtctactatctcgcacggatgctctatgccggggaggatatcaagttcatcgcacggcggatcatgatctgtgcggcagaggatgtcggtcctgcagatccgcaggcactgcaggtggcagtggcggcgtcgctggcggcagagcggatcgggctgccggaggcacagctgatcctttccgaggcggcgatctacgtggcgaccgcgccgaagagcaattcagcgaccgaggcgatctttgccgcgatgcgtgcagtgaaggagcgtccggcgacgatcccgacacatttacaggatgcgcactatggcggggcatcgaagctcggcagagggatcggctatgagtacgcgcatgactttccgaagcatttttcgcatcagcagtatctgccggacgagctggtcggagagcatttttatgaaccctcggaaaatggatatgagaagcagatccggaagtatctggattggattcatgaggactgagcgcggcgtgtctcatacatttttgcagctgcagacgcacagaaaactgagacagaggaggatttgtacatgaaattagaagaccatccggagatccggcggctggagcatgtcgtaaatatcaactggattaagatcgcagtcatcgctgtggtcagtgtactggttatcaaatattccgatccgttcattggcgggatcaaggagctgctcggcacgatgcggccgctcttttacggcttttcgatcgcctatgtgctgaatatttttatgaaacggctggagcggctgtactttccgaaaaagacggatgcgtgggtgcaaaagaccaggcgcccggtctgtgtattttccagcgtcattcttgtgctggcgattgtgatctttatgattctgctcgtcgtgccgtccctgattgattccattcaggtgctgacaaaggacattccggaagccttcatacgcttccagaaatggctggtaaagatctcggcagatgcgccgtggatccagagctacgtggaaaatgtggaggtcaactggaattccctgttcggaaagatcggcgaatttctccagaagggcgtcggcagcctgtttaattctgctttttccatgacaaagctgctggcgagctttgcatttaccggcatcatctcgctgatctttgcgatttacatgctgttcgggaaggagacgctccggcagcagtttgacaagctgctgcacgtctatgcgccgcgcaagccgcgcggggagatactgcgctttataacacttgcacatgagacctttacgagctatatcatcggtcagatcacggaagcatttatcctgggctttttatgcggcaccgggatgtttattctccggctgccgtatgcactgatgaccggtgtgatcgtcggtgcgtccgccctgatcccagtcatgggcgcctacatcggcgcgatcgtcggagccttcctgatcgtgacgatcagccccttaaaggcagtggaatttgtcgtctaccttgcgatcctgcagcagatcgagggcaatgtcatttacccgcgtgtcgtcggcggatcgatcggcctgccgggcatctgggtgctcgcagcagtctccgtcggcggcggtctgctcggtatcccgggcatgctcatcggcgtaccgctcaccgcgacggtctacaaatggatccggatggacgtaagcacgaagctgcaggcagaagcagaggcaacacaggcacaggaaaacgaaaaaaattctcaataagtattgcagtctaccaaagattcgcctatactgactcaggaacctgacaagcgaagcgggaaagtaaaagctgcttcgttttgacggaacagtaagacataggagaaatcaggaggaatgcatatgacactgaaggatctgctgatcggtaagacggcgacgatccgtacggtaggcggcgagggcgcgctgcgccagcactttctggacatgggcatcatcccgaaggcggaagtgacgatagttaaatacgcgccgatgggagacccgatcgaagtccgggtacacagctacgagctgaccctgcgtctggccgatgcggagaagatagagatagaagaagtacacgaggaaaaaacacatccgggtacgtcaagaattccggcgggagcacgcaccctgccgcatccgggactcggagagggcggcaaataccatgataaggcagatgagaatccgttgccggacggcaccgtgctcacctttgcgctggcgggcaaccagaactgcggcaagacgacgctgttcaaccaactcaccggctcgaaccagcacgtcggaaatttcccgggcgtgacggtcgaccgcaaggacggtatgatccgcggccgcaagaacacgctcgtgaccgaccttccgggcatttattccatgtccccgtactccagcgaggagatcgtgacacggaacttcgtattaaatgagcacccgaagggcattatcaatatcgtcgatgcgacgaatattgagcgaaacctgtatctgacgatgcagctgatggagctcgatgtgccgatggtgctcgccctgaacatgatggatgaggtgcgcgacaatggcggctccgtgctcgtcaatgagatggagaagctgctcggcatcccggtcatcccgatctccgcagcgaaaaatgagggtatcggagagctgatcgagcatgcattgcatgtggcaaagtatcaggaaaaaccgggacggcaggacttctgcgacgcggaggatcatggcggagcggtacaccgctgcctgcacggaatcatgcacctgatcgaggaccatgcagaaaaggcagggatcccggtgcggttcgcagcggcgaagctcgcggagggcgaccacctcatactggatcagctcgggctggatgaaaatgaaaaggagacgctggagcatatcatcgtacagatggaagcagagcgcgggctcgaccgtgccgcagccattgcggatatgcggtttacctttatcgaaaagatctgctccgagacggttgtgaagccgcacgagagcaaagagcatctgcgcagcgtgcgcatggaccggatcctcaccggaaagtacacggcgatcccgtgcttcatcgcgatcatggcggctgtctttttcctgacgttcaatgtgatcggagcagcgctgcagacacttctggagctgggcatcggctatctgacggacgtggtggatcacctctttaccgtatggaacgtcaatgagacgctgcattcccttgtgattgacgccgtattcaacggtgtcggcagtgtcctgagcttcctgccggtcatcgtgaccctgtttttcttcctctctttgttggaggacagcggatacatggcgcgtgtggcgtttgtgatggacaagctgctgcgcaagatcggcctgtccgggcgcagcatcgtcccgatgctcgtcggctttggatgtacggtgccgggtgttatggcgagccggacacttccgtctgagcgtgaccggaagatgacgatattgctgactccgtttatgagctgttcggcgaagcttccgatctacggatttttcacggcggcatttttcccgaagcacggaggactcgtcatggtagccttatactttggcggcattctgatgggcatcctcatggcgcttttgctgcgcggcacgatgttccgcggcgaggcagtcccgttcgtcatggagctgccgaactaccggatgccgggtgcgaaaaacgtcggccagctgctctgggagaaggcccgcgatttcctgcagcgggcgtttacagtgatcttcctcgcgacgatcgtgatctggttcctgcagacctttggcacacacctgaacctcgtggcggactcaaaggacagcatcctcgcggtcatctccggcaggattgctccggtctttgctccgcttggctttgacgactggcggatatcgaccgcgctgatcaccggctttatggcaaaggagagcgtcgtctcgaccttatccgtgctgtttggctccacggaggcgctgcttggcgtcatcaccccggcagccgcggcgagcctgctcgtattctgtctgctgtacacaccgtgtgtcgcagcgatcgcctcgatccgtcgtgagctgggcggcaaatgggcagccggtgtcgtgatcggccagtgcgtggtagcctggctggcagcgggcgttgtacatatcatagcgatgctgctgtaaagtataatagaagaagccgttgtgcgaaatgattcgcgcagcggctttttttcgtatccggacacgaaagtcacacgaaaatcgaaaaagaaattatgcacaaaaatatgtgactaaaacggtaaaaactatacaaaaaaacggggacagaacaaaaaacagttgatgattacggagtattacggtataatttataagaatattgcgaaaaggattgcgtgaagaaacaaaagaattgggtgggaatttgaacagctgcaaaagaaaaggtttgcggctattttctatatgtaaaaactgcaaatgagataaaaggaagaagaagtaatcttactatataaagaaatgtcgttttaccgcttgtttggatgttttaccgcaataaaaacgtcatttcacggaaacgcgattgttcccatgaaatattcatgctatattttaaccgaatcaagcaagtcccctgcttcaattgcgcaaagcaataagcagtgggttgggacttgcttgtatcaggagtggtacaagccactcctgataagctgcgaagcagctattcggttatgagcaagtagcgaagcggattgcgaatatccgctttgacaacaaatataataacgactacgataatgactatagaatggagagtgacttatggcaagctgcaatcaacataccgaagggagaaagaaaaacagatgcgggaactggaggtaccgggatcatgattctggatagctgaaaaaaattccaaatcaggtgagagaaattttgaaaacaggtatttatgtaatacagaaaaaagcagcgtgaaaggagaacgacgtatgaacagacgagacagggtaaaacggtatttggcgatgctgctggcctttgctatgatctttcagcaggcaggcatcacgaccatcgctgatgagacagaggcagtagtggcgcagcagagcgaggcagcagagacaaaggtgcaggcaagtgccccggagacgagtgcaccggagacaaaggccccggagacgagtgcaccggagacgaaggccccggagacaagcgcaccggagacgaaggccccggagacgagtgcaccggagacaaaggccccggagacaagtgccccggagacaccggcagcagtgacgagcacaccggcgacagaggcgcagggaatatcggaagcagcgccggagacacaggcttctgagaagaatgagacgacggttacggagacacaggcaccggaaacaggtgctgcttcagagccggagacaaagctcacagagaccgagactctggtgaccgaggcaccggaaacccagctcaccgagacatcgcagacggagaccgcagcgacggagggcgagacggaagcgaaagaaacagagacagagacagagagcgaaacagagacagaggctccgaagacaaatcactttgccacatcctttgcaaatggaaaggcagacgtgactctgagcaaagctatttccgagaaagcacagtttatcgcagagcagaagtcagaagagtctgcttactttgatgatgccctgaatatcgtagggccatggctggatgcaaagggactgatgattctggatgcggcagtatatgacatgcatttcgaggaagacggaaaagaaattgcagtaaatcagaaagctaatgtaaatatgcagtttgcttctccgattcttacgatggaaccggagacaggtattcagacacaggtgtatgttcttcatattgtaaatggaaacgtagaagatgcaggaagtgttacacaaaacggcgcaggcgcagtgaccgcagcgtcgatccatacgaatggattttcaccgtttgtgtttgtaaaagtggcgagcggagaaccagttgtgataccagacggaccgatcgatttgagcaatgcactttacaacgcagcaatatcacaagtcacttatggtggaaaaacagaagcatttgacccaaacaaacagtatccgcgtgatgctaaatttacatttaaacttgagtatgcatttgctgaaaataacaagccaacggtatcgggagtacagcaggcaacctatcagctgccggcttgcctttctgttgttgaggcatcaggtacgatcgactgttctggctatgcaggtaaggcaggaacgtatgagattaaaaatggtgttgttacatttacgtatgaaccagagtttctgacaaaacgcccaagcgatatcaggggagactttttctttacaggagctgtttcaaagtcggagagcgaaaacaaagatcaggtcacaattgactttggtggaagcggtacgacaacgccgataacggtaaaatttgaggaaggaaaggttacaggagataagatttacacactgaatgcagatggaacgattgattttaccatccggctgaaagtgacagaaaaagacgtcaagaatcttgtactgacagatacgcagggaagcaatctggagttcgcaaatcctcctgagtttaggctggatggagaattattaaatccaggtcagtatacggtaagcggaaaccagatgacactgaatctcggataccgcacgcggggtgagtatacacttacttataaagcgaaaattggtcctatgtcaagaaaaagtacaaattaaatgcaaccaattttccttttttat

SEQ ID NO: 1004 - DNA, 7525 bp, Unknown
  16S sequences of unknown bacteria
ctcccgccgctgaactgtccggcagccccgcggcacaaaaaacgcggctttttgcaaaaagtgcttgcattttttgcgatcctgtgttattatattcgagcgctgagaattcgcgccatatccgggtgtggcgaagtttggtatcgcgcttgaatggggttcaagaggccccgagttcgaatctcggcactcggaccaaaaaccaccgaaaacacgtcgtttccggtggtttttctatgcgaaaagttcgaagttttttatacccgtagcaaccccgtagcaaccgccaaaacgtgcgatgttccgtcaaaacgccaaatttacaaaccctcgccggtcggcggctgctgtgcccgctccttttctgcgtgatctttggcatggggagcgggccggatagatgcaccacaaggcaggctttccgtctcccgtcctgaccctgtccaaatggagcgggccggatgacgtcgccttgtatgccgctatgcccgctcccgatctgtgcaaggtcaaaagcaaatgcacaagctcgggttcttcctttctcccctgcacccctctatctatctcctgtgttctttttttctccagggttaatatatgggatgttgcggttattgctgccgccgccgttgcgtgtgccgttgtggttaccgttattgttgcgttaccgttaccgttgtagttaccgttgtggttggctaggtttgctaggctttgctagcatttgctaggtttgctagcgtttgctagcgtttgctaggtttgctagattttgctatgttttgcataattctaggcgatataattcgacgctgattatttatattaactaatttctttgctgctttcgacgcgcggcgggaaagaattctgtattatgtaaacaaaagttgggttttccaaagttttcaccgctcctgtccagccaaaatagatccatccgggcaaacgaaaagcccgccgcagcgcttgacaggggagcggggcaggctgtataatgggcatagaaaaaggcgttgccggttgacggtcagccccctttcagttctttgaagtaatcgccgatcttttcgagggagcggcgattacttcttttttgcctgtatgaacaggctgcaaataccgatgatgaccaagcaaagctgtaagacttcgttcgtgctcatgggcagcccccctttcatccaggggtagaagccgcccccgtaagtacaggggctaaccgcctaccgtttccatgcaacgccttagcgctttcgcgccatcgacagaataacacgccctttggcaaaatgcaagcgcgatctgcaaggccagctttggcccgcacggtcatgcctgccgcctggcccgctcatcgtggacgccctgcgcccggcctgtgacataagccagggcgacaagctccagcaggtcgccatagccgccgctgcttccattctgcgacacgttggcatcgtaggcatcacacagcaccgccgccgttttcaggtcacgtggccgcacggtggggagcaggcggagcgcttccgccggggtgatgcgctgcggatattgtttcttacgcataggccaggccctcaacgcgatcccgcgccatttctgcaaggcatgcgcccgcttgggctgctgcatataggctgtcataatggcactgcatccagtcaagcgccgcggttgcccgctctcgctgtccgccgccggtctgctgctgtaacatcccgtcgagtcgatacccatcaaaggccggaagaatgacgtcagtaaaaaggccatggacgcagcaaatggcatctaatgcgcctgcaatataatcgctcatgatctccaccccctcagctgcagcacagcgacccgacgaaccgccggacctggtatgtacgatctacgtcgctttcggccagctgcgcgacgatctcagcgatccagcgcgtcttgcaggtggtggcgctgtcctgggtcatcccccgggccgtacgccatagcaggtcgcctaggcgctcagactcaagcgctgctgtaagaatcgtctccaactgtctttcggtaagcatttatatacccctttcgtttgtccgttttgccctggctatttctcagggctttttacctcagcggcgatccgccgccctgggcggggcagggggagattttcccccgctccatgttttaacttgaaaactccggagaaatccggtataataaccgtacaggctttttctatgttcgcctgtatcagctcttttggctgttgggtctgtgtccgtttgcattggcgtgccgggacacagacccgattttttatgccacacagaagcggcgcgcggtcgtctgcttcgtgaattgacgcgccaggtcgggcagtgcctttttcagtgccgccgtgtcgatgcgggaagtagtaacggccttgtaggtcactttccaatctgtgccgctgaccgtctccaggccctcggcgtccatctgggctttgattccgtcctgcagcccctcgatctcgtgggccagctcgtcggccatcctgcgcagctctcgcagctcctggactgctttttccatgtcggttctttccatgttcgttttgtcctttcgttttgtatttgcctggggcgtttgtgttcgctcccttgactgtgattatattatacactagaattgcgtgtatgcctattgacgcattacacaaactgtacatcctttttctgtgtatattgtacattgattttctgtgtatattgacgtataatagctacagtgaaaaaggggcttatccatgatgccccacacgccaaaaagcaaagggggctttactatgccggtaaagtacaaaatagacatactggcccagctaaaagacgccggttattcgacatacaggcttcgcaaggaaaagctgctgggggaaagtgtgctgcagcagattcgagaaggggtgcccgtatcatgggcaaaccttggccgcctgtgtcagctgctgcattgtcagccgggggacctcctggagtatgtccaggacgccggggaggaagctgtggagtgatccccggctttctttcgttttggggtcggcggctggtggctctaagttatctagcaagggcttttctctcaggcttctccgggccagctcttacgttgtcgcgttggctgttcgaccttcgccgttccccgttttgatttccaccgctgttgtagtctttcatatcggggtggcttaccgggtgggctctctgtcatcccctcaactcatggccttattatacatctatgtacggaaatagtcaatatggcaatataactatatttccgtacatatatttatctaatttgtatattgacgtacatatacatgttgtgttatactgtggacagtggaaaaggggcccgctcatctggggtccctacgaagggagttgatataatggcaatatcaaaagcacagcaggacgcggtcaacaagtacaagcgcgcaaattatgaccggctggaaatgctcgtccccaaagggacaaaggacgcgatcaaggcacacgccgccggagcgggggaaagtgtaaacgggtttattaaccgtctgattgatggcgctttgtctggcgatgccaatgtggggccgtcagacgccgcaggagcagagaatgaatttaacatccatctgcacccggagacgataaaagccgcgcaaatcgccgctgacgccgcgacagaacccatcggggagtttatcgcccgcgccgtcacccatgaagcggagcgggacaaacgcgccttggcgctgcgcaggatgtcagaaccgattgcagcagccgccgcagagaaagagggtggccaggaatgagggtgtacacgatcatcggcggcgttaatggcaccggcaagagcagcttaaccggcgtcttgcgggcacagcggaacgacctgggcgctatcgtggacgtcgaccgcatcacggcgcaggcgggcgtcagcccgatagagggcggcaagatagcgatccggcgcattgacgattgcctggagaaggggatctcgttcacgcaggaaagcaccctgtcaggctatcggacggcccagacggcggcaaaggcccgagagcggggttataccgtccggctctattacgtcggcctggacacgccagaggaaagcctggcccgtattgcaaaccgggtcaagcgcggcgggcataatatcggcactgaggacgtactgcgccgctttgctggccgctgggaagctgtggcaaaggtgctgccgtactgcgacgaagcccgcttctttgataacgacaatggctttgttgaggtcgcagagtatcaaaacggggagctgcagctgcttggcgatctccgccccgcctgggtgcaggaattaaagcaatacctcacgggcgcagattgaccagcccggaaccagaaaacaaaaggcccacaccccagatttggagtgtgggcttttctgcgcctgtataacgcgcgtttttggggcgaacgtgtccaggggtattttaccctcggcgtatgggttatgccgttatgcccccgttattatcgacggtttttttgcgagagtgggccaaaagcgccgccctctgtgcttcgctgatctcccgctttgcccggtacgggtttttaccatatcggaacgggtgcaagctgcaatcttccaacgcgcaggctgagacctccttgctgctcccacagcagcagtcaaggcacttttcgcgaattgctttcactgggtttgtctgcatggcgttcatctccttttttgtgcaactattggcgactttccgcatttttccgggggcggccctataactgccccgcgtattttttcgatggtctcccccccggtgttttccccctctggctgccgccgttcatgtgggggagcgggtggcccgctccacggtcaaggtctggcggagcgggcacaaggcccgccgcctgggccgccaggcaatacggacaaccttggccgcattgcccagttgctagcccttgcggcgttatgactccgtcgcaccgtatagggcaatcgtgaaccggcgcagggcgttttcggttcgcttgtagacgctgcgggaatcggaaagccccagctcgtccgcgagacgctcggctctgcctgccgtggtgtgaatgtacattgcttcgagtaaatgccgctcgtcgtcctccagggcctgcaggccggtctggacgatgctgcaggccagctttgcccgctcctgcatagacaatatgctgaaggtcagcacagacgggcgaaaagctgcgcttgacctgagattggtgggaaaagagcagccagcgggtgagagctccaaaatctgtcaatgcgtggagcgtgtgacggcgctgtacaacaagtatccccaaatgacacagctgatattttgcgactacgctaccccaaagagtgatgcattcaatgtttacgatgcactaaaggagaatctggtacagtgcggcattccggctgcgcagatcgcatttatccatcactaccatacagaaagccgcaaactggagctgtttcgtaaattcaatgcgggggacatacgcattctgattggttcgacctttaagctgggtatcggggccaatgtgtaggagaggctgaaagccattcaccatttggatgtgccctggcgccctgcggacatgatacagcgtgaaggcagaatcctgcgccggggcaatcagaataaaaatgtgatcatctaccgttacattaccgaaagcagctttgattcctattcctggcagattttagaaacaaagcagcgctttattacacagtttctcacgggaaccacctatcagcgctctattgaggatctggagaaccaggtgctgacctatgcacaggtgaaagcgcttgcattggctgagccgctgatgaaaaaactggccgaaaaagaaaatgaggtcaagaacctgaaaattctgctgtccagagagcgacagactcttgcagagcagaaaaaggagcttgcgcaaatcgatgaaaaaatcaaagcggccaggcagcgctgggaaacatcgatagccgcagcagacgccctgaaaaaatatgatgccgatgcacgcaagaatgcctatcagcgaatcaagtcacttctgacagatgactttctcacctccgtgagcacattgcagatgccaatggttttgggaatgggcatggagcttccggaaaggcaggatgaaaagaagccttatatcctgctgaaatacgcggaacaaaaataccttgttcccatgggtgacacaccggcgggcaatgcccgccgtgtgatcaacgccttgaaagattttcagaagcttgcggatcaggacaaggagcacctggacaaggtggtttccagaaaagaggagcttcagagccttgtgtggtcaccggatcattcctattcggatcaattggcggcctgcgaaaaagaggtcagccggcttcgcgagcagatcgccgtgcgtgcggagtgtggagccttcacggattagcaccatgtgtgcctgctccggtattctgtggcctgtttttgccccacgtcatcttgtattataagatataccgtgatagaatatggtaaaagaggaagtgatcccatgcctgtgaaacagccgaaaaagctgctgattatgaatatcctggacatcctgcggaagtactccgacgaggaacaccgtctaagccagaaggacatcgctgaaattctaaaaaccgaatacgacatgaccgctgaccgcaaagccatccggcggaacattctgaacctcatggactgcggctacaacatcgagtacagcgagtctatccgcatggtgccgaaccccaaaaccggccagccggaggagagctacctgtggtcagacttctatctggagcgggacttcaccgatggcgagctgcggctgctcattgacagtctgctgttctccaagcacatcccttacagccagtgcaaggagctggtgaacaagctggagggcctgtctaatgtgtatttccgcagccgggtgaagcacattgcccgcctgccggaggacaagaccgacaacaagcagctctttctcaccatcgagttgctggacgaggccatcagccgggggcggaaggtcagcttcaagtatctggagtacggcacggacaagcggcagcatagcaagacccgccccgacggcacagagcgggtgtacatcatctccccctatcaaatggcggccaaagagggaaaatattacctgatctgcaactatgacaagtacgacgacatttccaactatcggctggaccgcatcacggagctgaagattctggacgagcctgccaagccctttgagcacctgaaatgggccaacgaccggacgctggatctggccacctatatgagggagcacccctatatgtatgccagcgataatgtccgggcggtgtttcgggtggccaaggccatggtcagcgatgtcatcgacctgttcggcacgggggtgaccttctccgacgagga

SEQ ID NO: 1005 - DNA, 2163 bp, Unknown
  16S sequences of unknown bacteria
gatatattcggcacattgtatgagggcggcccggcactttccgacgcacagcgccaaatggcaaaaatcacaaataaagaaaaattggccggcactcttgccgacgcaatgaaaggggcagacgcttttatcggcgtttcaaaaggcaaccttgttacaaaagatatggtccgttctatgaacgataagccgattatttttgccatggcaaaccctgtgccggaaatcggatatgatgatgccaaagaggcaggagcttatatagtcggcacaggccgcagcgatttcccaaaccaaataaacaatgttttggtattcccgggtatatttaaaggggcattgtcggtaaggtcaaaggcaattaccgaagaaatgaagattgccgccgccaagggcttggcatctgcgatttccgatgaagaaataaaccctgaatatattattccggatgtgttcgataagcgtgtgtgcgatattgttgcaaaagcagttgcggacgaagctattcgccggggtatagccagaatttaagattaaaattcaattttcaagctgaaagttgtcataattccttgcaaaatcgacggtttttccgtcgattttgtttttttacaaaatatgaataaaaataatgtgcagtttatataattgcaaataatcggcaggatgatataatataagtataaacataacccaaaaataaaggaggactgtatatgaaaaaagaaaaaagcagaaaaattaaaatcggcgtttcttttaccgtcacttttatgttggctgtaatcacatttttaatttacaaatatgccgccgccaatccttttcaaatgctgtggcagtataagttgtcctcgtttttgttaaagtgcagtttcggggtgtcagctgtttcccttgtaatttaccttaacaatctgactttcaaaagaaattttaaaattatatccgccgtgttgctggcggcgtgcgtaattgcctgtttgccctctgtgctgtattttttaaatctgtgggagggtgttcggcaaatcttgccaaaatctgcacaaatttactatttctcaataaatctgttcactctgtgggatattgccccatacatagggggatttaccgcagttttactccttggttgaatataaaacaaaatattatttaaggtgcggcttgtgccgcactttttgccttatgaattacctacaaataaattgcggcaaattttgtgtaagatgtacaacacgccaagattgcaaaatgcggttgaaaccgccgttttaaaatgttaagatgaaattgtcattttttgttttattcaggattttaaggagaaattaagatgaaaaaaattcttgtaatcggttcaactgttgccgatgttattatcaatgtggacaaattgccggctatgggtgtaagtgctcatgcgttaagccaaaaaatcaacttgggcggttgcgcttacaatgtttccgatgttataagaaattttaacctgccgtacaggcttttttcacctgtcggcacaggtatctatggcgactttttaaagaaagaacttgccaaaataggtgtggagcctataatttccgatgaagataacggttgttgttactgttttgttgacaaaagcggtgagagaaccatactttcaaatcatggcgccgaatattggataaaaaaagaatggctggaatccgttgatttaagtgagatacaaagcatatatgtgtgcggtttggaaattgaagaaaaaaccgggccggatatagtggagtatcttgaaaatcataaacaagttccgtttttctttgctccggggccgagaattgtaaaagtcgaatcggaacttatggacagaattttaaatttacacccgattttacatcttaatgataaagagatagccgcttatacaggtgtttccgatgttgaacaggcggttaaaaagatgtatgaaaaaacagagaatttaattattgtgacaatgggtgcagacggagcctgctggtacgacggcaagacttttgaaaaggcagcccctgtaaaatgcgaaaatattgtagatacaatcggtgcgggggatagccacatcggtacaattatggcttgcctttacagaggtgatgacataagaacagccgtggaaacagcaaataaggt

SEQ ID NO: 1006 - DNA, 3383 bp, Unknown
  16S sequences of unknown bacteria
cggcttcacgctacttctcggtaggaaaaatcgatgacttgcccgaaacatcgcccagcgcctttttaaaaagggccagctcgctttggaacaggttgtcgttttccataaaccaggcgtcatactgcgccgcatatccgtcaaatttgggtttcatataaaaaattcctttccgatttaaatttcgggttttcggttttttaccgtctcccgcggctttcgggcaaaggctcggcgccctgccgcacagccgaattaaccgctttattatagcataaacaccggccgaccgcaatatttttatatctccctgcggcattttcaaaaaggaaagacggtgccgcacggaaaaagggacgggcggaaacgttatagtcatcgcccttgacgggaaaaatatgctgacttccacggcgggacacgagcttttccacatgataaagaaccttgcggcggaatatgccgaagatttcacggcttttgttatagatcaccttaaagaggcgggacaatatgagtcggtatttaacgactatgcgcggcgttacggcagggcttatgcaaatgacgagaactttaaggccaaaatcgaggaggagattgttgccgagcattgctttgaggcgctgaccaacaaggagcaatgggagaaagacgtggccgaaatgacggccatgttcggcaccttcggcgcggcatacagacaatatggcaaaaaacttaacatgcgggcgcagggaaccgaaaacgccgttcacatcgacgagatttgggatgacctttgcgccgccgtcattcgggacgttttatatattttccaaagtccgacccgccctcggctgccgaacacatcatttttgcaaagctcatcgggtcctttatttgcagctgcatatggttgaatccttcgaatatcggatactcggcaaagggataggccttcataacggcgccgcgatatttaaaatgttcctcggcgcttccgaattcaaaaatcatttttctttgaaaatcctccgaaagaggcggaaagggcttgtcctcgagactgtctccgagctgtcggcggagatttcggtatttaagcgccttgcccgccgcgataaaatatggctttatcgaatcgtcggaacaccacattattttgccgagagttttgccctttgaaaggtaaacgctcttgattgcgagatatagaaacggagtcatgacacgccgcatacttttcccgatttgagcaaactggccgccgtcgaaaaacaccctgcccacgggaatttttgtttttgtcaaaaaatacagcgcaaggtcggcgccgatggacgacgcagcgacaagagacagctctttgacgccctcactcttgagaaattcttcaatctgccgcacctcgtcgtcctttccgatatatttttggcctccgcaacagacggtggatgtgggcataatgcaaaaatatttatccgccataaattgggcaacacgctcgctgcttgctcccgtcacgcccattgcgtggaaaaagagcacggcgggattttctttttctcccattgttttgaacagcataaaatcactccaatgcgtaacatataaacttactaacaaacaactcaagcagcgacaggtgataaatcaaggggctcatttggaagcttacaatccctcagtcagcttcgctgacagctccctttacacaagggagccggagttatgcaaaaatttctttttatttttcacaagagagccggggctgcggaaaggccgatttcagcctttacacaaggtaaccgccgttacgcaaaaacttctttttgttttttacaagatcgccggggctgagcaaaaatatattttcgtgtttttatgaggacaccgaaaccaaacaaagaacgattttatattttttatgtatagaaaaacaattggaattgtacaacattcaagcctcccttgtgtaaagggaggcggcgcggcgcagccgtgacggagggattgtcattctttttcccgtctctttcaattaagaaaaactatttcgattcgtccgctgcaaaagttagcaagagctaaccaaagaacatcaaaagacacattcggcaaagcaaaaccctttttcacctttaatttaccacagcgcggcgtttttttcaacagaccgttaaatattttttctttctccctttcaaagctttttgaccgaaaggtcaatttgcgaccgataggtatagacaaaagggcgatttatatgatataaagaagccaatcgtcgtcgatagaaggtatgccgtttgtatcgatataaatcaccgaagagggcaaatcgatatagtttaccgtcatgcccatatggtatacgaattccaccgcctgaatatactgcggaacggtcagacggtagacatggtcgtccgccttgtcgctgccgttatagtttgtgagggtctgtaaataggcataactcgccccgtaatcgacttccgtgtttgccgagacctcataattgcttttgatccaatgggtgaacacctcgacctgataggcgtcgtcaagcgccactcggtttgccggctcgagcacatggcggcccacagtcgggctgtatataaagggaacggattttccgtcctatgtccagccggggaacagctcggtcacctttgtggtttttccgccgacgattttgttctgataagtgtaaagattgacatagtcggtccacacgtcgatatactgaccgtaaaggtttacaatgctgtctctgctgatggtctccccttccttggtgagcaccttgtcgagcagcgtgaccttggaattataaagctcgtaggacacaccgggagtgggacccaaaaaatcttctcttatgtagcttgtccactcgtcgccgagactgaatcggtaggaaacgtaaatggtgatataatcctcgtcggcgggaatgtcgacgggaaattcggtcaccgtttcggtgggattttcgccgaaagcgatgccgtttatttttatatagctttttgaatcgtcctcgccgtttacgcaaaggtcgtcaagagtccagtagaaattaaggtcgctgtcgtgatcccacacaaaggcctcgatgctttggaaaattgcggccgcatcgacctgctgctggccgcggtaaagagcctcgcccgaggcttggtttgcgctgcttgccttggaaatacgaacctcgtagttgccgcttttttcaagcctgtcggaggtgctgtcgtcgaatttttcgtcgccctttccggcataggagggacggacataatcagtgttgagctcgtccttggaggaggaaccgtagccgggcacagggccgctcggagtatctccggggtcaggccggtgttttccagcgc

SEQ ID NO: 1007 - DNA, 8192 bp, Unknown
  16S sequences of unknown bacteria
tttgggttagacccataattaggggctaaccctgtaacttaactaaatgacattgggctctgaacagttacataataaggacatggtggtgcaggatttttgaaagaccctgcgccgcccgtattttataaagtatcacataaaaataccaatcgcttttgaatacagacatttatctgctcctgccacgatccgttttgcttcatgcatcccgggaaatcagtcctgcggagtatggtttgcgtccgtatcttccaaagtctctgtgatgatatgctgccggatcagaaaacggatcatattatagagttccgggcggatctgctcaagtgaagcaggctgattgtagagcagcggattgtagatggctccgccgaccagctcgatcagaaggtagatcatgatctccggatcacggaattgatagccggaatcgtgcagaagctgctgatagacgaggtagacactttcttctttctcgtcattgcctgcaacgagattgttgcggaagatgccccagcttaaatgtttggaaataaagccaagtaaagagcggtcttcctggagcttcaggataatataatcgacaatatgaagaatctgctcctcaaaatccgcaatctgtgcttcgcagacggaatgatacgcatcaaggaaaagcgtagcggctttgtgggcgatcagtttgttgcgcagatcatatttgtcagaaaaatatagataaaaagttccctttgcaacgcctgcactgtttacgatatccgaaatggaagttttctggaatccctttgaagtaaacagcgagaacgccgtgttcagcagagattcctttttctgcttcttatttacttctatttttcccaattcaaatccctccatcatttatgcgttattactgtatttctaatacttaacacaaaaccgaaaggaagtcaataagttacaggaaaaatattgaccaaaagtcatttttacaaaaaagaaaaaagaattttagcagaaagaaagaatcttcaaaatatgtcagataatgggggcgaaacggcggattggtgagaaaaagcagttgacgggtatgaaatgattggtgtaggataagctgtagagtgacagacatcaagtgggaggcagaaaatggaaagaagacaggaaaaaataaaaaaattagcgatcgatctcgtggttgatgttcttggaggactgatgctggcaattgcaatttacagttttgcagttccggctaattttccgatgacaggtgtgtctggcattgctcttgttttttatcacttattcgggcttccggtcggtacggtcacagtacttttaaatattccgatcatcatttgctgttataaaacgctgggccgctctttttatatgaaatcgctgaagacgacgctgctgacttcggcggtaatggatctggccggaccacagctgccggtttatcagggagatctgatcctggcggcgatctgtgccggtgtgctgcttggtgtcggctatgcgattattttcatgcgtggttcttcgactggtggctttgattttgttatgatggcagtaaaattctattatccgcatctctcacttggcaagatcgcatttgcgatggacacggcagtaattgtcatcagcggccttgtaatcggaagcggcggaagcagtgtgatctatggactgttactgaattatctgtattcgacggtgcttgacaaggtgatctacggtacgaattccggcaagctgaccctgatcattaccgatcatccaaagcagatggttgatgagatagaccggatcgcagggaggggcgcgacaattttaaaggcagtcggcggatactccggagatgcaaaagaggtcgtgatgtgtgcgagcaacagtaaggaaatgtatgcgatccgcaaacgggcacatgaaatcgatgagcgggcctttgtgattattgtcgagtcgaacgaggtgatcggagagggatttcgtgcaccgggagataccaatctggtgtaaaaaggaagggttgtttcggcatgacaggaaaaaagaaaacgaagagatagaaaaagtgaatagacagaaaattggtaagaaacaggagaaaacgatcctgacagaaaaggtgccaggagtatcagaaaaggtgattcacaggccgtgtattctcgtcagcgcctgcctcctcggagtaatgtgccgctatgacggcaaaagtaatggccttgcaggcctggaaagactgcaggaaacaaccacttttcttccgttttgcccggaagtatacggcggactgccgacaccgagagagccgtctgagatcagggacggaaaagtctgttccaaaagcgggcgtgatgtcacggcacaatttgagaagggtgcgcgggaggcacttcggatggcaaagctgcttggctgcagcgcagccattttaaaggaacgcagcccgtcgtgcggcagtcatcagatctacgatgggacatttcagggaaagcggatcgaaggccgcggtgtcacagctgctttgcttgaaaaaaatggaatccggctgtttaacgaggagcaggcggaggaatgccttgcatggctggagaagtacggccggcgggaagaaaggcggtcatcagaaaaataaagccagaacggaaaagataaaataaaggtaactgttcagagccaacctccaaaatgctacgcatttcgtcggtgtggcgtatccgccaaataaaatttcaaaaacaggcttaaaaatgcaagcattttccgcctgttttatgaaattttgcctggctctgaacagttacaaataaaggtaaaagcagctcagaaagaaagggataaaaggagtacaaatcaatgttaaaagatttgatcagagcgaaccgaagctgtcgcggttatgacgagaacagaaaaattacaagggaggaacttctggagctggttgactgtgcgagactgacaccctcgagcaccaacatgcagccgcttcgctactatctggcatgggaaaaagaagaagttgaccggatacagggactgacaaagtgggcaggtgcgcttccgcagatggaacttccgcatccgggaatgcgtccgaccgcatttattgtgatttgtcaggatacggcagtcagtgcttcacttgcgaaattccagaaggatgtcgggattgccgcgcagacgatgctgcttgctgccacggagatgggactgggcggctgtatgatcggtaattttcaggcaggtaccttaaaagcagagcttggccttccggagagctttgcaccgctgcttgtcgtggccatcggaaaaccggcggagaaaatcgtgctgacggaaatcaaagaaggagagagcaccgattattaccgcgatgagaatgacgtacattatgttccgaagcgaaagcttgccgacattgtatttgataaagttaaattggaaacaggtaattgataaatgattttatcagtacctgtgtattttaccgccagaggagagaaaatttatataaaacaatgaataaagcccaataaaatcaagggtttatggtgtttgtaaaacgcctaaaattggaaaataaaggagaaaacagatgaaaaacagaaatcgcttcatttaccagcctggccttccactcggaaaaaacgggaagagagtgactggaggaacagagcatatcgcactctcaagagaggcagccgcagagggcatggtgcttctgaaaaatgaaaagcaggttctcccgcttgcaaaaggaacaaaggcagcggtatttggcaaggcctgcgtagactatgtaaaaggcggcggcggaagcggagatgtgacagtggcgtacgtccgaaacctgctggatgctctgcgcaaaaaggaggctgagggaaaggtaagcatttatgagccgctcggagccttttatgagaaggaagttgcaaagcagtatgaagcgggcattgtgccgggcatgacatcagaaccgcagattccggaggagcttttaaagggagcaagtgcgtttgcggatactgcgatcgtgacgatctgccgcttttccggagaaaactgggatcgtacagtaggcggcgaaccgcagatgtgcgagtacatggcagaggaagagctggcacttctgcgcagggcatccgaggtatttgagcgcggagatttttacctctcaaatgcagaacagaaaatgatcgaagatgcaaaggcaaatttcaaaaaagtcattgttgtgatgaatgttggcggtatggtagattccacgtggtttgcgaaagatgatgcagtcgatgcggttttgatggcatggcagggcggtatggaaggaggacttgcgacagcggaccttctggttggagatgctgttccgtccggtaagctggtcgacacatttgcacagcgcctggaggattacccgtcgtcttacaatttccatgaatcacagacacatgtggagtatacggatgatatttacgtaggctatcggtattttgagacgattccgggagctgccgggaaagtaaattatccgtttggttttggactttcctataccagctttctggtcgagataaaacaggcagaggctacggcagacggagcagaggctctggtgacggtgacgaacaccggtgactatgccggaaaagaagttgttcagctgtatgtatcagcgccgcagggccgcctcggcaagccggcaaaggaactgaaagcgtttgcgaagacgagactgctgcagccgggagaagcacagacgattcgtctgactgtcacaaaagagcagatggcaagctatgatgaccttggaaaaattcagaaatctgcttatgtgctggaaaaaggcatgtatacgatctgggttggcacgagcgttcgtgatgttacaaaggcgtgtgaatacatgaaagcggcagatgaagtggtgcttcagctgacttcccagtgtgcaccgaatatgctggcacatcgcatgacggcagatggtacaatggaagacctgccgatggatgaatccgcggtgcggatctcggcatggagttatgaggcaactccgccgaaggagccggatgtcagaggcagaaagggtgcgctgctcggaccggtgaagtatgaggcggatctggagaacgttgcagcgggcacgatgtcactggatgaatttgtcggcaagctgccaacagaggatctgattcatctcgtatgcggccagccgaataccggtatcgcaaatacatacggatttggaaatcttccggaatacaatatcccgaatgtgatgacggcagatggaccggccggtcttcgcatccggccggaggtaggtgtgaagacaacggcgtttccctgtgcaacgcttctggcaagcagctggaatacaccgcttgtggagcgtgtaggcgaagcaggggcagaagaggtacgggaaaataacatcgctgtgtggctgacaccggcaatgaatatccacagaagcccgctttgcggacgtaactttgagtattattcggaagatccgctgattgccggaaagatgggggcagcgttggtgcgcggtatccagtcccagcatgtgggggcatccgtgaaacatttctgctgcaacaacaaagagacaagacgagtggaaagtgattccagagtttccgagcgtgcactgcgtgaaatctatctgaaaggctttgaaattgttgtcaaagaggcagatccgtggacgatcatgacttcctacaatatcgtgaatggacagagaagctcggagaacaaagaccttctgacgcatattctgcgggaagaatggggctttggcggtatggtgacgaccgactggtggaatcatgcagagcagtatctggagcttcaggcgggaaatgatgtgaagatgggttgcggttatccggagcgtctggtaaaggatgtggaagaacaccggatcacgagagaggagattgccgtatgcgcgaagcgggtactggaactgatccttaaggtgagcgaatgaaagaggaaaaaaatacactgaaaaaccatacaaagaatctgacggagggaagcccggtgcggctgctcctcctgttttctctgccactgatggcaggaaatatttttcagcagctttacacgatcgtagatactgcaatcgttggaaaggtactcggggtggaagcgctggcagctcttggtgcagtcgactggctgaactggctgacgcttggcgtgattcagggctttacgcaggggtttgcgatcctgatcgcacagaaatttggcgcgggtgaggaagaacctttgcggcatgccgtggccaattctattttgctgtctgttttctgcggattatttattaccgcagcgggagaaggggctgccggttttgtactggatctgcttggaacgccggaccatatctatccgatcggcatggcgtacctgcgtgttctgttcgcaggactgccggtggtaacggcgtacaatctctgtgcctgtatcctgcgttcgctcggtgacagccggacaccactgtatgcgatggtggtcgcatcgcttgtaaatatcgcgcttgacctgttgtttgtgatgggctttggctggggcgtaagaggtgcggcagcagccacgatcattggccagctgatctctgttttttactgccttgtaaaaatgaaggacatccggctgcttcatatgaagcgggaaaattttcagccgcagggcaggctgatggggcggcttcttgttcttggcctgccgatggcatttcaaaattcggtgatttccgtcgggggaatgattgtacagagtgtgatcaatggatttggagttgcttttattgccgggtttactgcgacgaataagctgtacggtctgctggagacagcggcaacctcctatggctatgcgatggtgacatacgcaggacagaatctgggggcaggaaagaaaaaacgtatttcacagggcatgcgaggtggcttgctgatcgcacttgtgacgtcgcttggaatcggtgcattgatgcttggctttggaaaggtgattcttggctggtttattacggcagacggagaagaggggatacaggcgctggcgattgcctatcattatctgagcattatgagtgtctgtcttccgatcctgtacgtgctgcatgtggtgagaagctgcatccaggggcttggaaataccgtgctcccgatggtttccgggtttgcagagttttttatgaggaccggtgcggcgcttctgcttccgcttgcagttggagagagcgggatcttttacgcggagattctggcgtggcttggtgcggatctgatcctggtgccaagttatttcctggtgatgcacaaaatccgggaaatgtaggacttctcacttatttttgttaaactattgacaaaagagaaaaattctgctatacttcatgacagttaaagaaacacaggttttgattgctgacggatttatgtggagcaccacagtgtaatcaaaattataaagagtcgaccgtctggacagcatgaaaatcgtttatgctgtcctttttaaacgggttggacaagcggcaaatcgtatagcgaatgtcctctttgtacgagtcagacagatgcggcttcgtgttttctttaccttatattctatgaaagtagagagatacagtacgttaagtgtcacatgacgggaaggtcagtaagtgtgaacgaaggagcatctgttccgcgttacggtatcgcttccgctactgcgttaagatggattttcgattatccttttttgcgcagtttttttattgctcaaaatcagcctccggcagggatgaccgaaatttccgaaattaaaacagacaggtggaaatgaaaggagaactgaaaacaatgggattcaaaacagacattgaaattgcacaggaaacggagatgcttccgatcacagagattgcgaagaaagcaggaattgattccaaatatctggagcaatacggtaattataaagcaaaaattgattataaccttctgaaagaaacggataaaaaagacggaaaactgatccttgttaccgcaatcaatccgacaccggccggagaaggaaagaccacaacgaccgtaggtcttgcagacggtatgcagaagcttggcaagaatgtaatggtagcgctccgtgagccgtccctcggaccggta

SEQ ID NO: 1008 - DNA, 15329 bp, Unknown
  16S sequences of unknown bacteria
cctttagctcagttggtagagcaactgactcttaatcagtgggtccccggttcgagcccgtgaaggtgcaccaaaagcgttcaagagtaagttttggacgcttttttttcttttaaagcgggtttgtctaggttatttgcatgtcaaataagtgtcaaacgctgcttttattttgtctgaattttattttacatctacgctttgttcgtccagccgtcaaaaattttattatctttttttgaatacccccttgacaaactgaatttttatggtacaataacagcatattgcgacccgtgtcgcaatatgtcaacaagtgcaaggaagttattcggcgcactctctttttcatcattatgcgacacgtgtcgctatgcttaaaaaaattcggcaaattgccgaaaaatatagatggaggaggaaacatgaaaaaattaggtgttgttttattggcggtcgctttggcatttggtgtgatgggagggggcgtgtcttatttgtcggcagaggattcggcagaaaaagttcccggggattttacttctgcggcaaatctgtttgtggaaacagacgatttactggattcatatgccgtcgatgcagaaagcgtttcgaacaggccgtatcccgccgattgggggatgaaattcggcaaaacgaatgaaggggaatacacctgcatgaacaacgaaaggcaggaaagagcaaaccaagcccatacggctgtgtatctgccgatgagccgcagcgttgccggcacagccgcctactatgtgtctgcggatatcaccgtgggcagcagagcggattggggcggtctcggcatcgtgatcggcgagggaacggacgacgcgaagtcccccgtcggtatctggtactgcgtggatgatccgaagttggtgcttgcgtcgggcggaaatgaatttgcggcgtttttcggtacggaacaggaagacggttcggtcgatccgggcgttgcgtttgccgtcggggacacgttcaccctttctgcggtcgtggacgggcagaaaatttccgtatacgttgacggaaataagatcggcgccgcctatacgctcggcgaagacagcggatttattcctaagatcggggcggagttgaaaaattataacggacgttatacgaattttgtttttaaaactctcgaagcggaacccgaagtcacccttgccgaatttgagcaggctgacaatcttttcgtggattcggcagggttggcggatacttatgaattcgataaaaatatgaatgtagtaggggcatatccttccgattacggaatgaaattcggcaagacgagcggcggttattatacgcgcgtcaacaataagatgcaggatttctgtacttcgggggcgcatacggcttcctatctcgcaacgagcaaagatatcggcaatgtggaaacttattgcgtatccgctgaaattacgataggagacagagccgattggggcgggctcggcatcgtgatcggaaaaggcacgacggaaagagaattccccgtcggcgtctggtactgcgtggatgcgcccggactctttttagccgcggacggaaacgaatttgccaatgcgttcggtttggggcagagcaacgctctcgtcgtcggggatacctttacccttgccgcagtcgtggacggacaaaaagtttccgtttatatcgacggggaaaagatcggcgatacatatacgatcgcgacggaattcacgcccgcgatcggcgccgaggtaaagcagtattacagcaagtacagggactttactttcaaaactctggatacgggattacaggcagccgaatataccgtcacctgtatttcaggggcggtggagatcggaacgatcggatatacctacggtgaaggcgtcgcgcttgcgcccatcgaaagaaagggctatcagtttatgggatggcatctcttccccgatctcagcgatcctgtgattgaaagcatcgatgcggcgatcggcggaaatataaccgtatattgcgaatataagatcgcgaattattcgatcgcctattacgacggcgagaccaagatagaaaacgacaaactagtcaaatcgtacacgatgcagcaatacgtacagttgccgggcgcggaagacatggagaaggaagggtatacctttgaaggttggtacaccgccgccgatttcagcggaaacgccgtcaccgcgatagagatgggctcaacgggcgataaagttttctatgcaaagtacacgaaggtcggaggaacgtcgtccggcggttgcggcggctcggtgatcggcgtatcttctgttttcgcgttggctgctctcggtgccgcggctgtcatgctcaaacgtaaaaaggcgggcggaagatgaaacgggcgatattgaccattctcagtatttttctgatgttttcaatcataggttgcgcgccggatacggaaaaaggacagggggatacgctggatgccatcgatgccgaggtcgatacgtgggaggcacccgaagccttcggcagaaacgatcgttataaagtcgaggtatctgaagacggggaatcctggcgggagatcgcggtctataacgtaaaaaacggacaccagaagggagatccgctcataacgcagggaggagccgtgtacttcggtgaaccgtataccgcatcgcttgccgtctttgattttacgggtacggcaggcatacgcgtcacgtataacggcggggcgttggcggaaaagggttacgtgatcagcccggcgtcctacaacataaagagcatacaggagggaaatacggtcactttcacgctgacgcagaatgcggaaagcccgagaaaagtggtatttcgtcctgcggacgagtgggaggcggaaacgctgcacatcatgacgaatgtccccgaggacgaatacgccgcagaacaaactgcggaaaacgtatatgtcgtcgaagaagggcaggaagtcccccgtatgctgcccgagggcaaagatacttattatttcaagaaaggtatccacacgcttccgggcggctattgggtggatatcgatctcggttccgaacggcaggtcgcgagtttcgaccttctgacgcctcccagacaatcgtttgttctgcccggcggagtatgtttcgaaattcaggcgaaaaccggagaaaacgaggcgtggaaacgtgtttacgaatcttcgggcgaggcggctgaaaataattttaaccttacgggcattccgttaaacgtcagcgcgcgttatttccgcctgatcctgaacggaaattacaacgtcgcgcccgtcggggacgacagatatgtgcacgccgtccatattcaggaatttacgctgtacgatgcggatggcaacaacgtttcgctgaacaaggcgacggcgggttcggcgagcgacttttcggtcgtgaccgacggcgcgcgcggggcgaattacgggtacgcgtatgcgggcgaaactttcagcgcgcagagcggttatacctattatttcgaaaagggttcggtcgtcaagggcgcgttcatttccgaaaatacggaaaacgtgacgctctgcggcagagggatccttgacagcggcggcctgctttccacgcatgaactttcggagggcagaaacggttccgttcatttcgaatattgcaaagacgtcgtcgtggaaggtattaccgtcatgcacgctccgatgtggatgctggtgatcaatcacagcgaaaacgtgctggtggacggcgtgaacctgttcggctactgcacgaatgcggacggtatccatttcagcgcgtcgaaaaacgccgtggcgacagggtgctttatccgtacgacggacgaccttttcgtcgcataccattacggagatgcggacggactcacgtttaaaaacagcgtgctttggagcgacggcgggcgcgtactcctgctcggtttggataccaggggagatatacgcaacgtcacgatggaaaactgcgacgtgatcacctatcagaacgtatggagtttacaggaatcgggcggctttgcgcagatcatcgccacgggcggaaatacgatcgagaacgtgacgatcaaagacgtgcgcatagatgcggtacgctttcccgtcatcgcgcagtttttacagatacgtacgggtaacgatgcgttcgggtcggggtttatcaaaagtatttcgctcgaaaatgtttcgtttgccggcgaatgtaagccgaaatccttgatctccgtcgtgattcccggcggttcgattacaggcgtatctatgaaaaacgtttccgttcacggcgttgccgtcaccgacggcaatatcgcggagtatttcaacgtcgatcccggcatcgggatacgattcggataaacagcgtatggtgcccggggcgcagggagcataatattgtgttccctgcccttacgggcggatccgtcggcggaaaatgccgaacgtttgaaaattcaggaggaagtttatgaaaaaaattttggcgctgctgttcggcgccctgttggcctgttgctttatgtttgccggatgtgatcagactgagatcggcgatgaaccgatcgacggcctcgatccgaatacggaagtcaaaatttcgtttatgcatatgtggagcgaacattccgcggcgatccaaagcattatcgacgggtttgaaaaaaagtatccgaatataaccgtggaaatttcgatcacgccgtatgaccagatcgaacaggtgctgcaagcagcctttatcagcggaaaactgccgaacgtgtacatattttacactcactatatgaacccgctggtgtccgcatccgacggcgtgatggcgggaacgctcaacaatctgcacgatgagatcgtcgattcgttcattcagcccgatgcgtgggaaatggggaacatcaacggaaattattattctgtgccgttccgcgcgacgggggaactggttttttataataagacgctctttgaggaaaaaggttgggaaaaacctgatacgttcgaggaatttgaacaacttatggacaaaatatacgccgacggcgattatattcctttggctgcgggcggacaggacgaccagatcacgtatctcatcaacgccatgtcgctgttcctttccgtcttggacggcagcgtcgacgaacccggatatcaggtcggccgcctggaaccggacgaggatatttcggatgcggtagcggtgtacgaaaaggtgcgcgattggtacaaacaggaatatttcggcaggggagcgatcgctgtttcaagttcgggcgccatcaagcagtttacttcgcgcaatgccgccatggtattcgcgaacgtcaataatctgggcgacatcacttcgatcatgccgaacgatcagatcgacgcgttcgcgattcccgcgcccgaagtgatttccgatgaagtcaaatatgtattcggcgggtacgacggcatttcgtacagccccgttgcgagcaaggatgaaatggcggcttcgctcatgctgatccgctatctggtcagcgacgaagtgcagcagattcttgccgacagaacgcagtccattatcgtgaacaagaatgtagaatatcacgacgccacctatgcggcgtttgcggaagaatacaaatatgtcggagcgtacgccaccggtatcgattatatgacgggcgatcattcggcgggcaataacaccattatgtctgcttacattgcgggaacctccggtctgacagccgcagaaacgatcaaacttttgaacgataacgtgtatatggatatgcaggatacgctgatcaacgatccccctgtcgattggtacccccgtcaaaatcccaagaaagattttgatcggagttggttgaattgatcgaggggaaaagatggttaatgtaagatccattcagcgtcaggcaaacatagtcggctggcttttgatgatccctaccgtcgtcgggatcgctctgttcatcctgtatcccgtcgtattctccctgatcatgagttttacgaactggaaattcgtattttacaacgtccgctttatcggtgggggcaactatgcgtggctgttcagcgcggcgggatcgcaattctgggtatccgtatggacgagtatcaaatttacctttatatccacgtcgatccagacggtcttgggcttttttctcgcttatacgctgtacaatatgaatcccaaggcgcaggcgatctataaagtactcatctatattcccgtgctgctgcctgcggccgtcgtaagcgtaatgtggacgtttttcttcgagccgaacgtaggtttgatagacgtattgcttacgaatatgggattcaaaaacctgccgctttggctggcggatgaaaatatcgccctcgggtccgtgatattcgtcaatacctggcaatatctgggcgtgacgacgatcatctattttatcgcgatgaacgccatttcgcgcgacgtgctcgaaggcgccacgatcgacggcgcgggaaagtggatgattctgtggcggtttatcctgccgctttcgtggagttccacctcagtgaatctgttgctctccatcatgggcggattaaaatctttcgacttgttttacctgtttacgaacgggacgggcgatcacgggctctatgtggtcgggctgtatatatggcgtaccgcgtacaaattcaaaacgttttgccgcgcagtcacgatgtccattattttgtccgtcattatcgctgcgatcagcctgtctttaaactggctgctcggcaaaacggaggataagatcgatgcgtgaaaatggtatggcgcaggcagtaagacagcagagcaggacggtccgcaaagttaaaaaatatacggggaccgcggttacgtggacgatcatgctattgctcacagttttggtactgtatccgctgctgttcgtgttttccacttcttttaaaacgtacggggaatttttggagagtcctttttccatctcgttcgcgcatccggaaaactatgcgcaggcgtggatagacggcaatttttcgacgtattttttaaattcggtgctcgtaacgggcgttacggtcgtcgccaaggtctttatgagcggccttgtggcatactgcgtcgcggtattgaagatcaagggctggaaaatcgtcatggcggtcattatgtccacgatgttttttacgggcgagatcacggggatccccacgttcctgctggcaagagaattgcacctgctcgatacgatatgggcgttgatcgtgcccggcttattgggcccggcggggctgggcgctcttttgggtatggggtacgcaaagaaaattcccaaagaactgcatgaagcggcgcttctggacggggcgggcattttcgggatcttctggtatatcgatctggtcttaatgatcccgatgctgacgttcgtcgcgattcagacttttacggcgacctggagtgattttttctggccgttgatcacaattacgaccaacgaaagcgcaaagacgctgccgttgggattgatcaatttccagtctcaaaacaattcaaactacggtgttctgtgcgcggggctgtgcattatgacggttcccattattctgctgtatagtttcctttcaaaatattttatcgaaggggtcgcggcaggagcggtcaaaggttaaataaatataaggcggtaaaaataatgatcgtaaatgaaaaaagtattcaaaacaaagttttaggctgttggttcggcaaaaatatcggaggtaccttgggcgcgccgttcgagtggcggcgccagatcaaccatgtgacggattatacgcaggatctgggagggaaggcgcttccgaatgacgacttggatattcagttgctttggctgatcgccctggaagaacgcaaactgaacgttgacacgcgcgatctggcttattatttcagtattttcgtcacgccgcactggggggaatacggtacggcgaagacgaacatgaaactcggtatggagtctcctttctgcggcctggaaaataacgcttaccggcacagttgcggcagttatatccgcagcgagatctgggcgtgcatcgccgccggaacgcccgaacttgccgtccgttacatgatggcggattccgccatcgatcacggcggaaataccgagggtacgtatgcggctgtgatggtcgccgccatggaggcggcggcgttcgtggagagcgacgtaaacaaactgatcgagatcggcttaagctatattcccgaagggtgcgacgttgcggcggtaacgcggctggtacaggattgttaccgcagcggaaaatcgtatctggaagcgcgcgacgaggttcttcggctctatcgcggcgctccgttcagttatgacgacgggaaaaagatcgtcgtgctctgtgacgagcgggatcgggaaatggggtttgccgacggcgtcaagggctacgacgtggtagacaatttcgggatcatcatgatcggtcttttgtacgggcagggggatttcggaaacactttgtgttatgcggtcaactgcggcgaggataccgactgtaccgcggcgacgctcggctcgatgctgggcattatttacggggcggaaaagatacccgaaaagtggttgcggcccattggttctcagatctcgactttgtgcttaaatcacggggagatcgaaggaatggtgccgaagaccgtggaggaactgaccgagaggacgatgcggcttatgcgcatgagcgacgcgctgaacgacttgaatctgggaactacgcccgttacggacctgatatgtcctccgttgctgaggaataaattatacgcccgcgcggactgcgccgtatacgatttcaagttttttgagatagcggtaagttatccggatggtatttatctgaaaggaaacagcggtaaagtgcgtatccgcgtagaaaataaattccgcgtcacggaaaacgtcgcctatcgctggtttgcggaagaggggtttgcgaccgattatgcggagggatacgtgtatttgtcccggaatacgtacggcgacccgtcgtgcgaaatggactttacgttcagcacggaggggaatcccaaactgaaaaacagattcgttttccaactgaccgccgaggggcgcgcctccgcgatgacggttcccgttttatttttgaaaggaagagaataaaatgcgcgatatgcggtatgttttgaccgaggaaaaatacgatatggcaaaagagcggcatcacgccactctttttgccaccggcaacggatatatgggtgtacgcggcagtttcgaggaatactctacgctcggcgtacaggggctgtacgtgcgcggcattttagatgagatcacggaaatatgcactcccgttcccgacgattactatatgaagaagtattacttcaacgaagagcggctgaaagatttcgaaaagacggaatgcggcgtcaatcttgcggatatcttgaccgtgcgtatcgccatcggcggagaactttttcagatgcacgagggcactgttttatcttatcgcagggaactggactttcggacgggcacgctcgtacgccgagtacgttggaaaaatgcgtcgggagatatcacggatttacgcttcgaacgctttgcttcctatgccgacgagcacttctattgtcagaaagtaacggtaacgcccgtcaatcacggaaaacaaatagaaataagcagcggtatggatcttcgcgcgaagacgaacgggcagcgcgtcacgaaaattctttcgcagtcggtacggggacagagtatccgcgcggagatcgaaagcggaaaccgttacgcttttgcctgcgcttttgccgttgaaaatacgttgacgggaaattatacggctgaaaaagcagacgaacaggggatactctgcgtaaaatacagcggcagcggaaagtgtgtgctggaaaaaatcacctgtgtcgtcacttcgcgcgatacctgtcagccgctcggcgcgtggatagagcgtcgcctgcgggaaacgccgggtacgtatgacgcaaaatacaaagtccatctttccgcctatcgccccgcgtttgaaagaggcaacgcggaaatagaaggcgacgacgaaatggcgcgggctgccgcgttttcctgctggcaaacgctcatctccgcgtgtaaagccgacagcgtccacggcgtcggggcaaaagggctcacaggcgaacaataccaccagtacgtctggtgggacagtgagatctatcagatgccgtactttatttataccgcaccgcagattgcgcggcatttgctggaatatcggtataaaactctggcgcaggcgcgaaaaaatgccgaaaatgccggtttccgcggggcaaggtacgcgttctgttcgggcgttacgggagaagagtgcgtctggtctttctgcaatcatccgtttatgcaggatcacatctcggccgacgtcgcgttttccgtcctgaattacgatgccgcgacgggcgatcgtgattttatggaaaaatacggatacgagatcttgttcgcttgtctggaatattggctgagccgagtcgtaaaaacagagcgcggctttgaaattctgcgcgtgacgggaacggacgaacaccatccgttcgtgaataacgacgcgtacacgaattatatggtccgatatatcgccgatcgggggtgccgtatcttgcgggaacgggcagactcctttgatttcgggaagatcggcgcgggcggcgatcttgcgcgcaaattggagaagctcagcgatgagatctatcttcccgtcgacgaaaacggtatgataccgcaattcgacggttatttcggattgctgcgggattcggaaacgacaaaatacgtgcagggctcccagatgaaacataagggctatcatcaaagccagtttatcaagcagcctgacgtcgtcatgctctatacatacaacaatgtggacatggacgagaaatattacgcgcggaatttcgattattacgaaaagatgtgcgaatgcagttcttccctttcgtacgcgccgcatgcgatcgccagcatcgataacgacaggctgctgtctttttacgaatatctgaaaaagactgcggagattgatctgaaaaatctgcacggcggatcggaagacgggatacacagcgggtgcgccgcaggggtatggtattccgtgttccgtgggatattcggatgcgtgtgcggggaggacgggatacgcctttgtcccaaacggctgccttggtggaagagcgtgcggctgaggtttttttacaaaagcggcttgattaaaatggaaatatgtggtaatattatatcgatatcgaagttgagcgggcctcccgcacagatatcaatatacggtaaggaatatttgctgaaaaaaggcaaattacaggttgagattcgatgaacggtataaaagtgaccagagaaatggtcgcgcaacgcgccggtgtctgtaaacagactgtttcatgctatctgaataagacgaggggagtgtccaaggaaagcgcggataagatcgaggctgccataggagaactgaattatgttccgaatatggtagccagaggactttcgcaaaaaaagacgatgtcgcttgcgatcatctgcgatgatttgggaaacccgaattacagtgagatcatcagcggcgtagaacgggcagcaaaggcgaaaaattattccgttttgattttcgatatcgcgatggacggcgattccgtagcgaaacagatcatcgcgagacgggtcgacggcgtgatcctcttgacctttaaagaaaagttgggcgaaaaaaatatatgcgatctcgataatcacgacgtcaaactggtgataacccacagtgcgggagagatttcggataaatatatgcaactcgaacccgattataccagtggtatggaagaaacgctgctcgcattgcgtgagcgcggacataaagatatcgtcatgctgtcctgtttcggacttgacgataaatatgacaggcgattgaagatctttgccgactgttatcaaaagatcttcggccgttcggcaaaatatttgatcgacgatgcgaacggcggggcgtcgcttgaaacggggcgtcgcctggcggaacggctgtgcaatgaaaatttggccgcgagcgctattttgacgacgaatgacttgatggcgatcggcgccgtcaaatattttaatcagacggggctgatcgaccgtatctccgtcgtcgggttcgacgatatggcgttcaacgaatatatctcgccgtcgctttcgtcgatcgggtacgataagatcgaatacggaaaaaaattggtggaactttttcttgcaagcagcggcggagcggaagcccgtacggaatacgtaaagacaaagttgtttatgagggaaagcatccgccgcgtgaagtagtcgaaccttcacggtatcaggaggaaaatgaaaatggatacggcggtcagagaaccggattttgataatattttgcgggttttacagcgcaaagaaccgaatagacctacgcttttcgagttttatctcgacaacgagatcagcgaaaggctgacggggcaaaaggctaagtctttgtgggattgttcttggaattacgaaatgatcatacctgccatgaaaaaggtggggtacgattatgcgacgatgcatgcgtccgactttgggtttcccgtggtgcgcccgcaggggcgcactgtttccatgagccacggagtgattacggacgaggagagttttcaggcatatccgtttctcgatccggacgcttgcgacacgggtcgtttggcggaggtcgaaaaggtgttaccgcagggaatgaaagtgatcgtgttcggaccgagcggggttttggaaaacgtcatttctttggtcgggtacgaaaatctgtgctttatgctctatgacgatccggaactcgtcggacgtatattcgcagcggtcggggatcggctcgtccgatattacgaaaggtgccttcgctacgattgtgtgggcgcgatcatatccaatgacgactggggattcaacagcgggacgatgctctccgaagaagatatgagaaaatatgtgtttccctatcataaaaagatcgtggagatcgcccataaaaacggcagacccgcaatcctgcattcctgcggaaatctggaacgggtcatggacgacatcatcgacggtatgcgatatgacggaaagcattcttatgaagataagatcttgccggtcgaggatgcctttgcgcgattcggcggacggatcgccgttctgggcggtgtagatctggatttcgtgtgccgccgcccgccggaagaggtcggcgaacgcagcagaaaactgatcgagcgtacaaagtgcaaaggctatgcgctgggtacgggtaacagtattccgaattacgttccccccgaaaatttcaaagccatgatccgcgcggcgaatcccggatttaccttctgacggaaaaaatgggagcgcaatgatgagagattgcatacgaaaaaaattggatttgatccatcaactttatccctcggagcgtatcgccgcgtcgaagaggcgttgggaatccgtttgggataaggacaagagggcggacaggcgcccttttgtatactatccgcctctgtttgacgcatacaatgctctgcatacggcaaaagagcggctgcttgcgagccttgacgaaatcattatacgcggacaggtgggcgatgactttataccttccatattctgcggttgcagacaatccaccataccgaatatgttcggcgcgaaggaagtcgttcggggcggggacgccacctgcgataaaatactattttctccaaaggatatcgaccgtttggaatgcggaaaaataaccgacggcaccgtcgcgaaaatgtggctggatatgcaaagttatatcattgacgaaacagaaggtgaaattccggtacacgtcgtcgatatgcaggggccgttcgacgttgctgggcagatgttcggttacgataatctgtttgtttgcgcatatgaagagccgtcgcgctacgataagttaatgtcgctgatctccgatgcttttatctgtttttggaaagcgcaacagaaaacttgcggtgaactgttcataggaacgcatcttttcgcatgggattacgtaccgcaaaatacgggtgcgagtatgtcgatagacagccttgttatggtttctcccgaattttatcaagggtattatcggaaatatatcgaaaagatggcggatgaattcggcggattggtcatccattcctgcggcgatttccgccacgtcgttcccgatctgatgcggacaaagggcctgaaggctatgaatgcttcgcagttgtccctccgtcaactggtcgaggcgggcatgactgcggatacggtcggtattcttactttgccgctagaagggttggaagatctggccgacgtgatacggcacacaaatatgcgcgtcaatcctacttttatcggaaactggtctgttttcggggcggatgtgcctcccgtggaagaatggacttccgaacagaaatactgcctgaaagagatagacgatcgcatcgtgcggacgctaggatcttaacgtttttaaatgaggttcgatcatgcatagtattgaagaaaatacggtcaaagcggaaaaccaagtgcaggaaaatgaaaatattttttttctcgggaatcgagagggaaagatccgaatcgcggttttaggcaattctattacccgtcacgggccgtctcccgagatcgggtggttcggattgtacggaatggctgctagcagcgaagataaggattatgtgcatctgctcggaacatccttaaaatgcgaggggctggattactgccttatggtaaatcagatcgcggaatgggagcgtacttttgtgcagttcgatttggcaaaactgaatccgatacgggatttttccgcaaatataattcttttccgtttcggggaaaacgtggactgcaggtgcgaaaaaaaacagttttacaattgtttgcggcagatgacagaatatatcgcgccaaatgatgcggcgctggtgtttacgacgtgtttctggaaaaatcccgtcgttgacgagtgcatacgggaactttcggtatcgaaaggaggaaaactgatcgaactcggcgatctgggggacgatgcgtcgatgaaggcgggcggtctgttcagccacagcggcgtcgcggcgcatccgggcgacagaggaatgcgggtcattgcggacagaatttacgaaact

SEQ ID NO: 1009 - DNA, 32759 bp, Unknown
  16S sequences of unknown bacteria
aaagacaaatctaaaaaatcaacctattccacaacctttggtgttgacccaaaattaccgcttgagagtacttgtagaatgcggggtgaaactatgaaagacaaatctaaaaaatcaacctattccacaacctttggtgttgacccaaattatcgattgagggtccttgtccaatgcggcgtctttcattaaaatccactgactttggtgttgacccactttggtgttgacccaaaacctcgcaagtggcttacttgcaaggttttaaagtcagagccgaaagtcggacttgaaccgacgacccacgctttacgaaagcgttgctctaccaactgagctatttcggcttatttttaaagtttcaaatatgctttattcttgtaaattagtcaatatatttttctatatactactctttttattctctaccatatcttgcgactgcactctcaatatgaagcaatttgccgtaaaaattcttgtattcctatttcttgccgtagctttcgaatacattttcggatggcgcaaattgctcgatttgtgcctgcaatttgccgaatcaaacaataatccatttatcttccttgcaattatgggaatagggtgcgcattgccgttttcgctatcaatatgctatctttttgcgggagcggctttcccttttttgcaggcttggattatttgcctcgcgggccttttcataagctcatctataggatatgtattcggaagatttatcgttccgccaaatatactcgaatcgcttttgattaagtttaaaatcaaacccaatccgtacaatttggctaatgtcaatttttttgtcagagcggtaccgggcataccttattttgtacaaaatctgatattgggaggcttgcgctctaattttgcaacttatattgtcgtaaatctcgctgtacaaggcgcgatcggggctgtcgtcatctacataggctcagccgcagcttcggattctctaatgttgcgcaacttgtgggtgttcgcgctattgataggtgtcctaatcgcggtgcaaaggttgatagcatggcatttctcaaaatcggaaccgaaaaaatagcataattatgcgggctatgtttaaaaaatttttcgcaaaatttcgcataggcttgtgctaccttttatttgccctggcaaatattgtttttgccgcggttataggaatttgccttatcctctcgctctttgggttgcgcgactacaaaaagaaaataaatgcagccttgcgaattatcgttcggctgctttccatcacaattttcccgagcgtcggtggctataaagtaaaaatcgatggactcgaaaatatccaaaaatctccggccatttatacttttaaccacatatcgttgctcgacccgttatttgcaatctcccaaattccaaatgcggctgtcgtcgtcaagggcaagtacgattcgattcttgccatatggcttttgacgcgcttttttgactttatatctaccggcgacggctcccgcggagacattgagcgggctatgggaaaaatatccgacgctgtcggcaggggctgcaatctcatagttttccccgagggcacgagaatgaacggagaacggttgggcgattttaaaagtatggcttttaggttgtcgcgcaggacggggatagatattgtgccagctgcaatagtgtcttcggagccggtatttacgcgcggaactccgctattgcccgaaaagacgggatttgcgttccatataaaaatactgcctccgctttctccgtcggacttcaattcggcggattcgcttgccgcaaaagcgtttagggttatatctgccgagtgtaaaattatgcgggtatccaaaaagtcttgaatttgacgccgcattttttctattcttttcaaatgttgttggaaaagtcggaaattatgaacttcctccctcagagggagccgtttctcatggttgacagggtcgtggagtgcgacgcttcaaaaggaattgtcgccgagcttgatattccgccgacgcttccgttctttaagggccatttcccgggcatgcctataatgccgggcgttatgataacggaatcgctcgctcaaacttgcgggttgctgattgccttaagcgcgcaggcgtccggcgacaaatcgcacgaaggcaaagtgttttttctcgcagcggcgaatgtaaaatttaaatctgttgttaaggcggggggcgttttgagcacaaacgcaaaatttgtgcgcgaatacggcggcttgtacagcttttcggtcgaggccagaaagggcagggatattgccgcttccggcactatagtattggcttcggataaaaacgtcaaactgtgaagatattgtatgtcagaggaaatccccgcgacaacggggggactgaaatcgtcgggaaccttttcttgcgcgggttaaaaaagggcggggcagagatactcgatttccgcctgagcgaaaaaaacataggcgattgccgcggctgtttcgcatgcagcgcgggttttgacaggtgcggaaagtgcgtgattgacgacgatatggcagaggctatcgaatttctcgattccgccgacgctctcgtctgtctatcgcctgtatatttttactctatgagcgcgcagatgaagcgcttttttgacaggtgtttcccgtttgtgcgcgggtaccgcttcgattcggaaaacggcaagatgcttaacgagacgggatttgaaaagaaagacaaaaagttcgtatctataagtgtaggctcgggaatgcacgacgatgtatttgaggcgttgtcgcacacgtacaagatgatagcagacgcaatgggctttgaatacgtagcagacataacgaggggagagtctgcatatttcgccatgcgtgagctcggcagcgtgagggttcgcaaagtcttgtccgcatttgagtcggcgggcgagtgcttcgcaaaaacggggcgcattccgtgggagcgcattgacaccatgtgcatgtcgcttagccgcggaagggagtcgttcgcaaaaaatgcgcaggtcttttggcgattgcggcgcaatggaactccatttgaaagtttttcaatggtttccgacccgcggattcttttgcatgagatgtgcggaatgttaaatcctaagatggcacctgaaaaggcggacttcaaatttgttttcccggataaaaactggtcaatgcttttaagcgtgcgcggcggcgaatgcgcgttcttggacaatgcgcgcgacaatccggcagacgtcactataactgtcgcttcaggagattgggccgatgttatgtctgcgcgccggaatgtttcagctctcatgcgttccggccgaatgaaggtgacgggaaatatgtctctatttgcctcgatgaaaagaatttttagccttggcgaggatagaagggtaggcggggtttagcttttcttttggagttagcgccaccggcaaaattcttgagacgtcgccgatagtattgccaatgataaacgaggcgtgtggggaatctctttcggagggtttaacgcagccgtaaaatcgggagaatgtactgacgttcccagttaggttaaacgaggcggcaggactgattctttcggaagggttaatgcaatcaataatgttaacacgtccgttagcttcgggagaatgtcggcgacgttctcgggagtgaaaaagggcgcttccttgctctttcggcctgctttcaattttttttagttagcttttgccgtctcttagtttcggaggaaatttttttttagcggattttttctaaaaaattccgaaagtgtctgtctttttttaagaatcacttaaatattcggaaatgtagtagattatttatataaaattattataatcaaattacaataaaacctatattcatttagtgtttaatattgacatataaatatattatatattatttttcgatttgtaaaaatgaaaggaaattatgtctgaacataaagtagaattcacaacgacaaaggcgtatcttggcaaaggcgcgaccggtatggagtttaccgtattttgcggggacgataactccactaaaaaaatgggaactttgctcgtttccagaggggcggtttactggattgggcgctttaaaggcaaggataagaaaataagaaagacttgggaagatataagggatttctttgaaagagaaattagacggtaaaattgcggaattttatattttatccgacaggcaatatgcggaggaaaagagcgcgcagcaatgcgcgcaacctttttttattcgcaggcaaagtttggtcaaattacaaaaatcaccaaactcgcgccgcaaaaatacgttaaaaaaaattataaaatttttaaggtaaaaaatattagacgcagcctgtgagccccccatcgactacgagagtctggcccgttatgtacgacgccccgtccgacgcaagaaaaaacgcggcttctgcaacttcctcaggttttccaaagcgttttaaaacaatccgctcgcgctgcttgtttgcaatgtccctcgggatttttgcggtcatgtccgtatctataaaccctgggcaaattgtgtttacccttattgattttgcgccgagctcggcggcgcacgcccgcgaaaacgcgcatattgcccccttgcttgcggcgtagtttgtctgccccgcaacgcccacaagccctgataccgacgatatgaatattattgagccgcttttgcgcgcgtacattttttttgctacgcactttgtccattcgtaggctccgttgaggtttgtctcgatcacttccctccacgacggttttggcattagcattagaaaattgtcgcgcgtaatgcctgcgttgtttacgagaatgtctatcgccccgttttcggcgtatattttatcgactgtttcggctattttttcggagtcgttttgggggcagcgtattgcagtcgcgccgcattcccccgcaagctttgccgcggaatcctcagagtttgcgtatgtgaaatacacctttatccctgcgcccgcaaatttttcgactaccgctttgcctatgccgcgcgagcctcccgttactatcgctactttttcgcccattctatttcagttgcaaatatttttcggctatttccggggtgaagctccgcacgagtttcatagtgcggatatccgccacgcaacatacgcactctccgtaagcatgcaggacccccgtccgcgcatttctaagttcgtgcgtaaattcgagcttgcccgaaaacggatcttctattttatggcgcgtcaataattcaaggctgtcgccgagtctcacaggcacttgatattcgcatgaatttttgacgacgggaactgctatatttagtttttttgcatcgtcaaaattcaaggcttcgttcattatcgaaagtctgccgcgctcaaaccattcgaaatacacgcagttgtggactacgcccatgaggtcgatgtctctgaactccggcgatatcgccattctgcgcgttattctcctggccatatttttattgttgcattccctttatcaggctttcggatactgtcatgggtctcgtgacagtcctcgcattgacttcgccgccgggggctgttgagagctcgagcgatggatacgcgcattcgctatccattagcgcaagccctatattgtctccgagggacacagactttgtcgaggtgatgacttcccctatttttttatctccgtcgtacagggcggcgcctttttcgactcccgagccctcaacagcggtgatttttgctttcgcctcttcttcgcgcactttatatacggcttccgaaccggaaaacgagtcctttgagaagtccgccatccattggagaccgagcgctatggggtcgccgaccaatgcgccttctttgtatatgttaaaaaatccgctttccaagcgcgcgaccgcgtgcgcctttgttccgcaaagagctcctcccgcattttcaactgcttggcagagcttttgcgccatcgcctcggcctttgcagaggggactacaaaactgtatccaaattcccctgttttgccgttgcgcattaggtatgcgcaatcgccttcaaaatcgtatttttctattgcaaggtacggcaggttgaaaatgtccgagccgaatatgtcgcgcgcgacttcccacgcctttggcccgtcaacagagaaaatcgcgtaatctttggtggcgtctttcgcatttccgccttcccccaaaatttccgcgctgtctgttagcgattcggtgaacgcaaagaccttgtcgtctatgttggcaacgaacacttcggcggttatcttgccgttttcgtcgcacaagaatgtgtctattattcttccgtagcgcagcttcaatatgtttgcggcaagcgccgtatcgaggtagtcgatgccgtccgattccggaaattccactattctcatgaaggagaaatcgcaaaggccggcggaattgcgtatcgccttgtattcgctttccgcgtccgcaaacgactccacgcattgcgcccctccgagttctccgaattttgcgccgcgctcctcccaaaattttttcagggcaagttctctcatttcttatcctgttccgatattataaagtctatgagtgtgtttagcgatctcagcgcgagcgtctgtccttccgggaccttgaccccaaaattgttttcgacgcataatactatttcaagcacgtcgagagagtccaggccgagcccggagcctatcagggctatgtcttcggatatgtcgcgcggttcgtatggaatgtcgagcgcctctattaatttttccttcaacagcagcgatatttcttttctgcgttgcagcttttccttattattgggcatttgtgttgcaaagattttgtttttgtaaaaaagtaataaaaattcttaacatatgggcgattcatttcaagttcaaagagagcgggcggcaaacgtaaaaatttgcgcgataattccgtcgcacaacaatgccgatactatcgacgccgttgtccgcgccctgcctgatgaagtttttgccatcataatagacgacggctccgatgttcccataaagaactcgcgtcaaagatgcgaagttttgcgctcggagcaaaacaggggaaaggcggaggcgttaaagaccggcttttccgccgctgcggagcgcgggtttacgcatgccgtgacgctcgacgccgacgggcagcatcctccttcaatgttcgcaaagtttgcggatatggcgcaaaaatatcccgattgcattattacgggcgtgcgcgatttctcgtccccgtctgtgccgcccaagcggaggttcatgaataaattttccaatttctggtttcgcttcgagacttccgtagatttgtccgacacccagtgcgggtataggtgctatcccatagcaaaggtgtcggccttaaaaaccggggtgggcggattcgcctacgaggccgagctgctcgtccgcgccgcgtgggcgggcgttagaataatagagcttccgattcctgtaatttatacgcctgagagcttgagggcgtcgcattacaaaccttttaaggatacggtaaaattctccataatgaacgcaaaattggcttttctggctgtatttcttccaaagggagcgttaaaaaaaatctccgtaaaaaaatgaattttgtaaagaaaatcgcggagtttacttatttccacaggcttcttttttcggtagccgccgccgttctctgtgcggctgcggtaattgtcgcaaaacacgcgccgtttaaaaccgacgtgtacgaccttatcccgttttgggattcccagctcgaaaatgcgcgcatggccgccgactggttcggcgtttctaactccgtctattttaacgtctcgggcgggccagagggcgccgcgcgcgcgtgcgcgttaaaactgcgcgaagagcttgaaaaggagggattcaaattcgactccttccccgatccttcccgcgccgccgcggaaatcccgaaggtctatccgcaaatttgcaatatatcggaattggagcgttcaatatcgcctgattctataaaaaagcgcttctcatactatatgcgaagaatgtcgggcttcgaggcgcccgtattcaaatcggcttttgtttcggatccggcgggaactataccgctcgttctcgaaaagctaaaaaagctgtccggcggaggggctgaatacaaattcgacggctctttgatatcagacacggacggcaaaaattttctgctcatcgcgcgctccgacgccaatgggcgcgattcaacagcctcggcaaaagtgtgcgaatcaatcgacagagcgtgctcgagagccttagaaagcggcgttaaaatagactggaccggctcttatagaatatccgccgacaacgcaaaaatcgcgcgctcggattcgtacgcatgcatggctgcaacctgcgtattgatgcttgcgctgtgctttgtctcttttagaaacaaattgtttgcgcctcttgccgttatgccgtcgcttctcgggagcgcggcggcgttttgctttgcgggtgcggttttcggcaaaatttcgacaatttcggtagcgtttgcgtctatcgcgctcggggtcggaatagactacgcagtgcatgtgctttgcccgctcgatttaaaaggcaggtttgacatccgctttgcggcgggagttgctggaaagctcgccgcgccaatattggtgatatgctcgactaccctaatggcatttgtcattgtcgggtgtctcgggggcggaatggtgcagctgggagcattcgggtttgtgggtgtttttgcgtctgccgtgttttctctatgcgcgctaccggcttttgcggtttcggcaggcggaggaagcgtgagggctgcgctactcgaaagggtgtcaaagcggattctaaggccgcaattcagcagtccgcgcgcttttttaattttagtttttgcgatttccgcggctgcggcgccgcttgctttaaatgtgcgctttgacggcaaaatttcttctatgaatgcacttttgcctgagagcgaagcggctgattctaatatccgaaggctgtggggcaatatgatttcatctccccagatagtggcgtacggcgacaatttggagtcggcgctcgcctcgctaaaatcggcggaatcggcggcgctgtcgtatccgaaggtaacgcctgctatgctttcggggcttctcgttccgcgctccgatagttgccgcaacataggcgcgtgggaggaattttggactgccgagaggctaaaaagcttttcggacagtctctcggccgaatgcgcaaaaaacggggtatccttcaaaatttttaagcctgcattggattttatagcatcggcgcgggcgcaatctgtgggaatagaagatagcggggagctgtcgaaaattttctcaaagagaatttttaaaggcggcggtgtcgcggccgtatgtgcgcccgtgtatttgaatgacggtgcgtcaaaggcggaactcgcgcggatagtcgaggcggcagacgggaatgcctttattttggatatggagtatttgggcgagcatatttccaacaaaacgcgcggaattttcttgaagtgcgcgctgtgcgcattggctgtggtcggaatatttttggctgtttccctcaggtcggcggcaatggcggcatgcgcaatggcgtgcgtctgcgcggggcttgtgtggtgctttgcgctgatgcgcgtgtgcggcgtgccgataacgcttacaaactttatttttgtgatattctcggtatgtctcgcccaagactatgcggttatgattatgtgggcggcagtaagggagaaaaaaggggtgtcggcggcgggccccgtactgctttcggcgcttacaactacggcggctttcggcgcgcttgcgtttgcgcggcatcctgtcataagcgggcttggggcggcggcagggatttccatattttcgatattgtgcgcgtcggtattggcggcgcctgccttcgcaaaaattcttggaggggaattcgatggcaaataaaaaagtggcttggagcggaaagtcctacggcggatattgggggactctcgcgtttatatccctcctgaaaatagggctcgttccggcgtacgggctgcttgtgtttgtcgctgcgttttttattctttttaggaggcgcgcggtggcgccgatttgcgcgtatctttcgagaatttttggctgccgggtgccgacaatttctttgcgcgcgtataagtcggttttctcgttcggcgtttcaattctcgatagaaccgcctatttttcaggctgcggaagcattaaagtgcgcgattgcgccgaaagtataataagggaatccgcgaaggaaggccgcgggacgctcgtgcttgcctcgcacaccgggggctgggctattgccgcgggaaaacttgcggagaatttcccggaggccgcaattttgggcgccgaccgcgagaggcttgaaattcgcaagcttgtagagtcatcgcgcaggagagaaaagccgaaagttgtcttggacagttcggattcgatgtcggcggttgcgatatacggaatattgcgcgggggcggaattgccgcaatgcatgcagatagaaatgctggcggaaggagcgcgggcgccgattttctcggctcgcgaatcgaggctcctggggcgccgtacatttgcgcgtggcgcgcgggggcgcgggtgcttcagatattttgcatgagggaatctatgtttaagtaccgcatgttctgcaaagacatagacctttcaggctgctcgacggcggacgaggcggcaagcgcgggtgcttcgcaatacttttccaacctcgaaggagttttgagaaaatatccgtaccagtggtacaacttttacgatttttttggcgacgaaaaataatttctttcccaatgggaaatggggcattttcggaaatccttgcgctcttaaaaaaacgtttgcggcgcatttggcgcctgttaaaaatatctgtttaaataaaaatttccgcgcatattttaggaagggaaaatatattgcggaagacagggctttttttgcaggttttttatccgattttaaaatgtaggcttagtcgtagcgtagggcgccgcgcggtagcccggctattttctagcgctgtttttgcttgtcggcgcgggctagcgcagatagattttatcgctttaacaaattattgaaaatggacaaagaagctctcgtttcagacataaagaaaaaaatgatttccgccctaaacctccaaggcatgtcgcccgactcaatcgactcagacactccgctatttggagacgacgggctcgggctcgactccgttgacgccctcgaactcgtcgtcatggttgaaaaagagtatggggtttctgtcgaggataaaacttcggcgtccacggtgttcgcatcggtgaatgcgctcgccgactacatagcggcaaacgccaaatgagaaggcgcccgacagtaatatcttacagcctatgctgcgactccggcaaaggggcgggcgcggcgtttcgcgcaagcttcggcaagtccggatttttatttaagcctttcggagattgcggactgtacgcttcgcgccgtttcgaaaaaacgcatgtcggagaggcatgcgtggagcactcagaaaaacttccgcggtgcgcaaagattttgtttgaggccctcgacgaggctcttgaaaaagtgtcgctttcatgcttcgagcctgaaagaatcggcgtttatgcgggaacttccgtagggggaatattggagtccgaaaatgcgtttgaaaaaatattaaaaagcgccaaaaaaggagcgccgccggcattcaagttttacgaatgttccgctatggcagagctggttgcgcggcgcgcgggggcggagggagaatgcgcgacgtactccaccgcgtgctcgagctcgtcgcttgctctcgaatccgcgtgccttgcgatatcggagggcaggtgcgacgccgcgatagtctgcggcgccgacacactctcgcgcataacggtggagggctttggttcgctcgggctcttgtcgaagtccgattgcaggccgttcgattctgaaagggacggcataaatttgggcgaagccggcggcgtggttattctgtgcgcgcgcgaaaatctcccaatcggcgcgcgggcgcttgcggaatttatatctttcgggtcaacttgcgacgcgtaccatgcgacttctcctcacccgggcggcgaaggcgcaaagaaagcgattgagaagtgcatgcgcaagggagggcttactgttgccgacatatcttattactgcgcgcacggaacaggaactcccgcgaacgactccgcggagctctcggccttgaagggcgtattcggagagaacgtgccgccgtattcttctgtgaagtcgatttttggccatacgcttggcgcgagcggcattttaaacgcaataattgcaattgatgcgctgagagagggaatgcttccgccttcagctgggtatgtttccggatcttgccctgggccgctcgaacgcgctgaaaagccctctcacgcaaaggctgcgctatctgtaagtctcggcttcggcggaaacaattcatgtgctgcgatatatgtcggcaatctcgaagcgggagggatttttgaagaaaatgcgcatgagcctatttcagaaggcggaatttttatatatggggcaggggcttcccgcgcaaatgcaggtttcgatacgctgcctgagcccggagaaattgcgctggtggacgaaaattctcttttgccggacattcccgtcctcaaaaaacgcaagtgggcaaaacttcaaaaaatgtttatctcggcgtctcgcgaagctgtttcacaagcaaaagtttccgaattcggggattctgtttgcgtcagctgctcgacaggccttggaatggtgtccgagacttccaggtttttggaaaactttatggtttccgacgcgcctttgccgacggcttttacaaattccgtgcacaatgcgccgccgtcggcgatagccggatattttaaatgctttgcgtacaattgcgcttcgactgccaaggaaatatcttttgaggcggctttaatggaggcttgcgcgcggataagaaacggcgattgcgccgcggcgattgtcgccggcggcgacgagtacaacagcctcgcggcggaatacgccatgagaaaacgcttgccgaaaggctcgcgcgcgttttcggattcttgcgccgcctattttgtcgggaaagagggctgttgtgaaggcagtccgctggctgagattatgctgctaaaaataaggcgctcttccaagaatccaaagcatgaaactgcctggattgaagaatcgctctccggggcgggaatttcggcggacagcattaaagcttggtttacaccatgccgccttacgggccttccaggaaaacttgtcgaaagggtgtcgctaaattttggaggattcacatatttggaggatttatccggaaggaattacagcgcttcggcatttggggctggcgccgcactttcaatgggaatcggcctttatgcgcaatattcgctttcgagcgcgtcgatggccgctcttactgtttatagagttttatgaagaggttttttttattgttgtgcctgttttttgcgtgtgcgtccgcattcgcgaaagggggagcttgcgccctgctttttgaaacgaaaaaatacgtgagcttttttgacgagcccatagaaggaaaatgcctgcttgcctccgacgcctccggcagggttagatggcagacgctcgcgccgtttgtttcggcgatgatttttgacggggcggattcggcggcgtttgagttcgataacggcaagtggaagcgcgtagatatgccgagctcgcgcgcggtgtcggaaataatggcggggttaaagggcgtgctttctggcgaaaaagtccccgacaaccttttcagtgtgtcaaataagtccggaaacgaaattgtgcttacaccaaaaaatccgcttatggcaaaggctattaagtcaataaagataacgggcaagccgccaaagccggaaactgtcactatatacgacgcctccggcgacagaactgaaatgcgcataaagaaatcgtcgttcggaagtgcggatttgactggggcgttcgacatatcgaatcccggaagctttaattgcaaattggttttcggcaaagaatgagattttttatttcaatactgtgcgctttgatttttgcgttcccgccaatttgccgggcagacggagcggtattcgggctttcgcgctgcagctcatatgtgcagaggggggtaatgtccttttggggaagggaacttccgatttccgtgtatgtcgtaaaaaaaagcggcggcgaaacagcaatggcggtggattctgcggcgggaactttgataaagggcaggttttcgcccggggctgaaaagtgcgagcttttcgtttcggagctgcttggcgacaaaaataaggtcggcggactcgccgcggatatcttccgcctggctctcggattccacgattgcgtaaaatcgcgcgagctgcgcgtccattccgttgacggaaagccgcagtttgcccgaactgaaaatgtcggcgtcgaattttccgactacactacaaaaaatggcgtatatcttccgcgcgttctcaaaatagaatctggttttttgcgtattgatttgcgccttgcatcttcaaaaattgggggcttaaaatgaaagtcacttttgtatatccgcggtttgaaaaatttctcgaatcggtctcaaaaatggaggccgaaagcaaattctttacggttggcaagtttacatgcccgccttcgcttgggattcccatcctcgcaagcctgacaccgaaagacgtggagattgcgtttgttgacaacaatgcaggggaaaagttggacttctgcgacggcacagacttgtacgcaataaactgctttaccccgcagggcacgcgcgccctcgaaatcgcccgcctatgccgcgccgcaggaaagcccgttgtaatgggtggaatgttcccgagcttcatgcccgacgaatgcctcgccgtggcggacgccgtatgcgttggcgagggcgaatacacttggccggagctactcgccgacttctcgcgcggggagcttaaaaaaatatataaatcttccaagccggtagatatgtcgcaaatgcctatgccgcgccgcgatattttttacgacaaaaagtgttacgactgggacgaggatttaatacagcttacgcgcggctgcccgtacggttgcgccatgtgcatcattcccgcccacatgggaaacagaatgcgctttaaaccggtggatatggcggttgaagagataaaacagctaaggcaccagaatatataccttaccgatgattctttgtttttcccccagaaggcggtaagggagtacgcggagagattctttgacgcagtggaggggctggggcggaaattttttgtgtcgtccactatggcgttaaactcggacgaggcgttttttaggcgcgcggcaaaagcaggcgtgcggaatttttattgtacgctgaatgtggatcccgcttcgattgcggttatgaggggggacgactcgggactgtcgaagctcgcagagtttgtagatatgctccgcggaatggacataagcttctttgcgtctttcgggctcggccgcgattgggacggcgagggcgtttcagacagggttctcgaaatatgctcgcgcgctaaaattacgatgtcggaattttttattttttctccgtacccgggctcgccccactggcgcaggttggagtcgcagaagcggattacatcgcgcgagtggtataaatataacggcgcccacgtagttttccagccggcaaaaatgtcggcgcagaggcttaaagacgaatttgtaaattgttggaagggattttatgaaatgaaccagtccagaaacctcgcccagatggagccgagcgtttggtgcggcgacgaattaaaagtgtccaagcgcttggaggtgcgcggagtgggttcggaggcggccgtcacaggaataggcatagtttccccgctcggctgctcccaaaaggaggtcttggattccctaaaaaaaggcgtagacggaatcgcgcagggaactaagctcgacctatccgcgtttgtatcgaaaatttgcgccgaggtcaaagggtttgatccggcctcgcgcatgagcgaatcggagcttaaaacatacaccgacccgtttataaggatgtcgatatgcgcggctcgcgctgcgatagaagattcgggagttgatttgggctcgtattccggaaaaatcggatatgtgcttgccacttgcaatgcggggctgaattcgggagaaatcgagtaccgccagaaatacggggagaaagtagatttcaacaggagcgtatcgacgcaatccgagttctacgccctacaaaaggccttagtttcggctgtcggtttcggaggggagtgctggatggtaaatacggcgtgttcgggctccaccgcggcgataggtcttgcgcagaccctcgtcgaatcgggaaggtgcgacatcgtgatagtgggcggggcggacgcgctcgcattgtcgaattttgcgggttttagcgcaattaaagtagtttcgcctgaaaagattgctccattctcgacccccgagggaatgaatataggcgaaggcgccgcattttgggttgtggaaaacctcggcaaagcgcttttgaggagcgcggagtgcaaatgcaaaataatcggccacgcaaccacagccgacgcacaccacccgacccagccggatccgcgcggcgacggtgtcttccgcactttaagaaacgccgcggccgacgcaggcgttgaagtgagcgacttggggtgcatcaatgcccacggttctggaacttccgccaacgacaaggcggagtcaaagggaattgctaaattcctcggagggctcgatgttcccgtgacatcaacaaagtcctacatggggcactgcatgggagcaacaggcatactcgaagcaacatgccaagttgtttcaatgaacgacgattttatcccgaagacactgcgcaatattggcagacgccctggatgcgaaatttccgccctttcggagcacaaatacggcaagtacgactgtttcatatcggcaaactacgcgttcggaggcaataatgcggctgtcgtaatttcaaagcgcgattttatcgccgggcagaggccgcagcgcaagcgcgattcagaaattgttgtgacgggcttcgacatcgtttccccgctcggcgcgggaattgaagaaaatatacgcgcattggaaaacggagagtcggcgattgcaaaaattgagaggtttgagtcggggtgtttgggaggattagttcccaagctcgacgtcaggcgcttggacaggcgcgtggatttttcgggaatgaacaatataagcacctacgctactctcgcagtaaagcgcgcctttgacagggccggcattaggctcgcgcgtgcggactccgaaaagacgggcttagtttcggcgattgccagaggctcttgcgaaagcccgcacatggacgcggttttctcaaatccagagaggcgcggagacgtcgggtgtttttcaaacgtaacggcaaactccacggcaggctgggtttcaaaggcgcttgaattgaagggtgcgaacctgacgcttacgcctgggccaaacggcggcttgcaggcgttagggtacgcggcggatgtcttgcgcgaagcccgtgccgaaagaatggctgcgtttgccgccgacgagctctacgtgcagcagattgcgggctacgacaaaatcggaaatatttattccgaaagcgaacttcaaaattttaggccgggttcgccggatccatttaaaacagtgtatgcggaaggcgcatgcgcattcattctcgagacgatggagtccgcacaaaaaagaaatgcggaagtgtttggctcgattctatccttcgcttcatacgaggagccgggcgatttttgcggtgcgaatctcggttctgagggttttgagattgcagtaaacgacgctttggctaaggcgaaaacggcggattctgagatagatttgctcgtttggagtccgcgcggcgacgcccaggacgaaaaaatcctgaatgtctggcgcaggcgcttcccaagtgctggcattgtcacaaatgtattcaatacggggtatatcgagtcggcttctactatatccgcgcttgccgaagttctgttttgccttaaaaaaggcatcccaatttggcggcaaaaaacgggtattgcggaaatagacaatttcccgctcccgaaatcccccaaaaagattctttgcgcggcgtcgagccatgtaggcaacaacttcgcggcggtttttgccgtgtgacgaattgcaggcgcgcggcaatgcgcaagcacatagcaagcttgaaagtttattgcagattttcggcattgcaattgcattaatcaacccgcagtggttttgtatgcatttgctaatgcgcttacgttgcaaatctgatagcgccagatagtttaaaaaagttcgacgtccgctaaaactgttttgcgcgtttgtctgcagaaaatatgaaatccgccgcaactgtatggcattgggaggcagggcggcgccgcaggagcattattgtttccaatacttaatatcgaaaagggcggggcaaataaggggaagatttttgccaaactatgcgatgtctgccgcccgctggcttttcggcttttcaggagaattggaaaagtcggcatcggtaaacgcccctgtgaatgcacagttccactccaatatcgcgctcccccaagacagcccgactccaaaggcgcatattagcactttcatgccgctttttagccttccggttatggcggcgtcggcgagcgctatgggaatgctcgcgcccccacagttccctatgtcgtgcattttgtaataaactttttccgtcggaatacacaagcgctgggcgcaagacttgactatcatttccccagcctgatggaatacaaacaggtctatgtcgcgcacagacatgccgtttttttcaaggacttccgcgaccgactccgcgacccttttataggcgaatgtgaaaatcttaaagccgtccattgccattttatctgcgcgcatggtttcccctccatagccgcgcaagcccgaatttggccatattatgctgtcaaatcccttgccgtctgtgccgaacgaaaagcccaaaattccgtcaatctcgctctttgagactgtgcaagcggctcctccgtccccgaaaatgcaggcggtcgagcggtcgagcgggtcgattatctttgtaggggtatcggcgcacaatacgagcgcattcttagcgagccccccgcatatccaagcgtgcgccgtcgcaagggcgtaaacaaactgcgagcatccgagatttatatcaaacgcggcgcatgaattatctattccaagcctttgctggattatgcatgcggttgtcggaatcaagtagtcgggggtttgcgtcgcaaaaatcaagaggtctatatcttttggggaaattttactgttctcaaaaatcagccgggccgctctaacggcgaggtcagacgcacatgtatctccttttgccgtgcggcgctccaatattccggaaattgattctatttttgcaacagtttcgcttccaaaccgctcggcaagctcggcgtttgtatttttctgcccgggcaaaacgtatgccaaagatgttatggaaattcccatttgcaaattaagttttattttaaagcaaatatgttaaccgttccgacctttcttgcaactactctttggggttttggtaaatttttgcgctaatgcgcatttttccgaatattaataaaattttataaaagtttattcagaaccccaatcactgaattacgcaatcagtttgcggcaagttcataaaaactacccataaaatatctacttaaaagttattcgagaattgcgctttctattaaaaaattgcgcttcactcaaatgttaagtcataactcatgcgggcaaattttcaaattttgaaactaaaattttttttatataaacgctcccaaagacatattgccttccacatgcataaaaaaaagcgcacccatttttgggagcgctcgcaaatttaacaggcgcaacgcgccgcacgattaacccccagtgaggttttgaatgatctggataatcggcaggaacagcgcgataacgattgtaccgacaactaccgcgaggaacactatcattataggctcgataatcgaagttatcgcgcctaccgaattgtcaacttcgtcgtcgtagttgtctgcaatgcggttgagcatctccgggagctggcccgtttcctcgccgacttccaccatacttgtcaccattgtcgggaatatgttctgctggtcaagcggcgtggagaggttttcgccgtctcttacgcggtcgtgcaccctcgaaagggcgtcggatatcaggctgtttttgatggtaccgcgcgtgatggtcagagcttcgagtatcggaacgccggaggcgagcagtgtgccgaatgttctcgtgaacctcgcgactgtcgatttcatcacaaggtcgcctatcttcggcaacttcaacgctgcggtgtcccacaccctaattccgattttcgtcttgaagaaaatttttacgaacaatattacgccgactattataaggccggtcaatatgtagttttccttcatgaaatcggatatgtcgataatcatctgggtcagagcgggcattctcgcgttgcctttgagcatatccgtaaatattttctggaattgcggcacgacgaatatcataagaatcgcgacaatcgccactgcaacacccatgattacgataggataaaccatcgcgctcttgaccttattagtggtttttagcgccttttcctggaacgtggagagtctgtcgagaacgacgtcaagcacgccgccggcttcgcccgccttggccatatttacataaagtttgtcaaaaatcttggggtgttgtgacaggccgtcggagaatttattaccggtgcgcacgttgtcggcaagctgctcaaccaccgccttgaagtaggggttcttttcttggcggccgattacctcgagtgcgcgcaaaagcggaagccctgctttaagaagagtagagagctgtcgggaaaacacggttatgttttccttctttactcccgtcccgaatagcggcttcttcgccttggcggcggtcgccttcttgtcggaggctattgccgccacttccgcgattctcgacaccgagaatccctgcgcggcaagctccttgcgcgcgcggttttcgcttgtcgattctataaccccgctaagctcgcggccttccttatcgagggctatgtatttgaattttgccataacagttttccttttctactaagtgtatttcaaaacttcctcaacggtcgttgcgccgtcgaaaatcgcgcgcaaaccgtcgtcgcgcagggtgcgcatgccaagctctatcgccttttgcttcaatacgagcgtcggagctctcgcggttatgaggtctcttaacgagtcgttgacaagaagcagctcgaaaagcccctgtcggcctttgtagcccgaaccgttgcattccgcgcagcccttaccgaagaagaattgcttgtcggcaatctctatcggatccaccccaagcatatctattatttcttggtcgggctcgtacgccgtcttgcatgtcgggcatattctgcggacgagtcgctgtcccaatatgccttccaaagacgccgcaatcaggaacggttcaagccccatatctatgagtcgcgtgacggctccgggggcgtcgttagtgtggagggttgcgagcacgacgtgccctgtaagagacgcttgaaccgctatctgggcggtttcaaggtcgcggatttctccgaccattattttgtcggggtcttgacggaggaacgctctgaggcatcgggcgaagtccaaaccgacctggtggtttatctgcacctgcatgataccgtcgatttcatattcgacagggtcttcggaagtcagtatttttatgtctaccgtgttgacctcgcgcagggcggagtaaagggttgtagttttgccggaaccggtcggaccggtgactatgaatatgccgttgggcagctttacgagccttcttatgttctcgacaagttcgtctgtcatactgagcttgtcgaggtcgaggttcacgacgctcttgtcgagaacgcggagcaccacgctctctccgaattgggtcggcagcgtggatacacgcaagtcgacagggcgcccggatatcgtcatttttattcttccgtcctgcggtatgcgctgctctgctatgttcagatttgcgagaacttttatacgcgaaattacgggcagggcaaggctctttggcggcggcgccatttcgtacaaggcaccgtcaatacggtagcgtatcctgaacatgtcttcaaacggctcgaagtgtatgtcggaagccttgtcgcggattgcctgctgcaataccaagtttacaaagcggataatcggcgtctcgttcgccatatttgccgcgtcggcttccgaggattcgtcaaaatcgacggtagatatttccgacaaaagatcgtcaatgcttgaatcttcctcgccgtagcactgcacgatgagggtctcgacttggtcggggtccatcaccttcagcgtcacgtctttgttcagtgtgaaggtgaggtcgtctattatcgagttgttgaacggatcctttgcaagcagcgttatggaggtgtctgtcgcctctatcggaactacgccgtaggttcgcgccaaattcggcctcagttgcttatagacactttcgggtatgttcgccggcggaatcggaacgtattcgtagttgagatagtcggctactacctccaaaagtttcgttttctcgactaacccggaagatattatcgtgtccgcaagagattgcccggtgtttaagtgcgtctcgtttaattcgtcaagctgctcttttgtgagcatcttgttggaaagaaatatttcgtatatcgaattgttgtggtcttcaaacattttgcttcgcctccgattatgcttcgttcagggtaaccttcaatacttcgtctgcggtcgtcaatccgccgcctacttttcggataccgtcttcgcgcatggagcgcatgccaagctccctcgccttcgttcgcagctcgacgagggttcgcccttcgtaaatcatctgttgcaactcttcgttgactataaatatttcaaaaatacccattcggcctttgaagcctatgccgttgcatttcgggcagccgtcgccgtggtagaaggttatctttgcggcttcgatttcatttatgcctatcgcctgcaaggtgcgcggatccggcgcatatacggatttgcagtttgtgcatatctttcttacgagtcgctgggcgagtgccgcgcgaagcgatgcgctgaccaagaacggctttacccctatatcgacaagtcgggtgacggcgctcggggcgtcgttagtgtgcagagtactgaacaccatgtggccggtgagcgaggcgtttattgcaatttcggccgtttcgaggtctcgaatttcacctatcatgatgatgttcggcgcttggcgcagcattgagcgcaaagccgcggcaaatgtcattcctacctcccttcgcacttgaacctggtttatgccggtcatctggtattcgacagggtcttctaccgttatgatttttcggtcggggtggtttagaaaatttagcgccgagtacagggtggtcgatttaccggatcccgtcggaccggtgacgaggaatattccgtcggccattccgactatcctctcaaacaccgcttggtcgtcggagaagaatccgagttcgggcagcccgagcctcaaaccctccttgtcgagaatacgcataactatgctctctccatatacggtcggaaggctcgatacgcgcaagtcgatttctttattgttaaaagttatttgtatgcggccgtcctgcggtacgcgcttttcggcgatggatatgttcgccatcagctttagcctcgatattatcgacggttgcaggcgctttggcggattctcaacctctatcagcacgccgtctatgcggtagcggattctgaagcgtttttcgagcggttcaaggtgaatgtcggacgccctgcgctttacggcttcagttatcagcttgtgcacataccttattatcggggcctcctcctcggacactcccgcttcgttgccggtcgccaacgtattgccggccgccgcagacgaattttgcccggctatctcgtcgccgaatacgtcgccgtatgcgtttaccccgaagtggtcgtctatggccctctttatttcctcggggctcgcgagcctgagatccaccgacatatttagtatatggcttatgtcgtcgacggagtccatgtccatcgggtcggatatcgccaattcaagctggccgccggaggacgatatcggaaacacgttgtatttcctcaaaatatcttgggggagcaattttaatacgctttcgtcaacccgtatgtcttgcagggaaattagcgggatattgaattcctgcgacagcagataggtaatgtcttcgtacttgcagtagcgtttgtctacaatcaagtcgatgagtttcgagtctatgtccgttgggggaactccttcggatacgagctgttcgcggccgagctttattatgtccgggggtactaaacctttatcctgaattagttgcaaaacgaaatcgtcagcagatgtcacgtttattgtctccgttggtaaatatgcgttttaaggtagaaagctaactatctattcaatcctagcaaaaattcaacatttgtttttaccttttttagcctttgtatgagcatttccatggaatcggctgcgggaatgcccttcattgccctcctaagcgtatatatcttagtgagttcgtcggggtggtagagcagctcttcctttcgggtgccgctcttctctatattgattgctgggaaaattctcttgtcggaaagcgagcggtcgaggtcgagctcgaggttcccagttcccttgaactcttcaaatatcacttcgtccatcttgcttccggtctctataagcgccgtgcctattattgtaagcgaccctccgccctctatattgcgcgcagagccgaaaaacttttttggcttttgcagggcgtttgcctcaacgccgcctgacatcgtcctgccgccgtttggcatcagcgcattgtaggcgcgggcgagcctcgttatggaatcgagcagtatcacgacgtcgtcgcccacttccaccattctgcgcgccttgcttattaccatctcggccgcatggacgtggctggaggcttcctggtcgaatgtggaggctatcacttcggcgtctatcgcgcgcttgaaatctgtcacttcctcggggcgctcgtccacgagcaaaattatgacttttgcctcgggattgttgaagcgaatggacttcgccatgctctgcataagcacggttttgccggtgcggggcggggcgactatcagcgcgcgctggccaaaacctatcggcgtcaataaatctaccgcgcgcatagacaggttgtcttttgaattgtgcagggggctctccaagattatcctgcgcgttggatagtacggaacgaggtctgtaaacggtattatgtcgcgcgcggaatcgggggaggcgcccattacggaggtgattcttaccgcgaacgggcagttctctttttcatttaaccttggagctgccgcgagcgcgccgacaatatggccgcgttttagcgcgtacttgtctataaaaatctgcggaacgtacaccgaggagcattttagggcgtagctgtccgaagcaaaagttatcgctcctcccgcgccgtcctcaaacacgtccaacacgccgtttacgtaaacgagctttctcttctcgcacgcattcctgaaaaactccgcgagtatctcgcacttcggaacgccgcccttaaacggtattgaaagctcggcatattttgccctcaaatcctttatgtgcatggggcagagctcctcgtacccctcgaccgaatctattttcgagccgtcgggcagcggaaaaaacttttgctcttcaaatttttcgctttgctcgccggagtccgttttgctgttgtcttcggcgacaacctctgccgaagcctgggcttccgcgctttttgcggtttcgccctctaagacttccggcgcttccgaccgctccacgcgggtgtcgttggagcttgcaagcaattcccagtacgacatatcttccggcgcagtcggcggtatttccgcttttgcgggcccgcctacttgggtatcggccgcgccagtaccagacgcgcttgctgattcgggagcggcttcgggagaggtagtctttgcggcttcggacagcgtaggcgttgcggattcggattcggttacggacagcgtaagcgttgcggcttcggcgccttccaaaattttccggctttcttcggcggcaggctctgccgtctttccctcgaaaagcctctctatccattggcatatcccggcctcggtttttagcgtgtcccattcggggagattgccgggattcatcgcttcggcgtcattttcagcctgcttccagatattctttttaggcttgttttgctgttggcgctgctgttgctggttttgctgcctattctgctgctggcggttctgctgtggaatattgcggttttgacgctgctggttttgctgcctgttttgctgttggcggttctgctgcctgttttgctggtaattgccgcggaaattgtcctggcgcgcgttttgcttccaattcttgcgattgttgcgcctgtcttggcgcgcggcttcagcgtccgcaaacgactcgtacgaagggtcggacagtatggcttccgattcgtcgggctcgggatttccctcggtgtaggattcggaacttccctcggcgtcggggacattgcggtatgcgtccgggtcgaggtcttcgtcgctcgtcgaaaaatattgcggaatttcctcgtctgacgcctcctcgcgcgaagatttggagtatgcaaaatcgtctccgctatcggtgccagtgaaaatttcgttgtcgggggagtatgagtcttccgcttccacatgcacgtcgcgccattgcggccctgaggacgctgccgcattgttgtcggaggcattggaggaagctgtttccacgcttccgctttccgcaacgctttcagttggcgcatcttcagactgcgcgcccgtcccgacagtttcttcttcggggaccttggcttttttggggcgccccctctttttagcgattttcggagctgcttgggaatctgacgattctgctgtttgattttttggtttgcggcccctttttttcttctcgggcaatccgctttctggcgcggagggcggaattagtgtgtcttcgtccattgggttttcaaattatttaatgtaagcgcggcttgcttgtacagaaaatcaaaatcgccttcgttaaacaaagcaaccgtcgccaaacgtactttttgggagagcggcagttgataggcgtcgcgcgcgtcgatatcatgctcggacattcccctttttaagaggcgttcgcgtcgcgccgtctcgctacaaaaaacagtaatgcagatatcaaaatttttttcaagccctttttcaaacaacagcggcatttctacaaccaacgccgaaaattttccatcgcaagatgcctgtatttccctcagcctttcaagccacatggcattgattgccgggtgcagggcgttttcgagcgcggcgagcttctccttgtcggaaaaggctatttttgcgatttccgcgcggtttggatttgcgtcaggcgggaatgccttttccccgaaaatttttgacagggattctcttacgcccatattttcagcaagcgcaatgtgggcgagtttgtcggcgtcaagcacttcaacgccaagtttccgaaatgcgtcggcggcggcgctctttccgcaccccatgccgccggtgaggccgatttttagggttttcataaaaacgcggcgcgtttaatggcttttttgggatttgagaaaatcgcgggtctggcggcgcaatttttttaatttaggctcgattttaaaaagctggcgcggagtgagcctgtcgacaaagcaaatgccgtcgaggtggtcgttttcatgctgtacgcaccttgcgaaaagccccgaacactcgagtacatgttttgccccgtcggtgtcttggtaggtcagccttacttctgcgctgcgctcgacttccgcaaaaatcccgggaaatgacaggcatccttcttcggctatttcgatatagtcgcctatttcctcgacttccggatttaccgctatcaggggcattgctatgtcaagcggcagcgatttcccgtcgattgtaaattcgcacggcacggaatcgtcgctcctccttcgcatatcgattgcgaatatccgctttgaggagtcgatttgcggcgcggcgagcccgagcccgttctcctcgtatagagtgtcgacaaggtcgcttgcgagttcttttagggattcgtcgaatacttctacttcggcggctttcttttttaggacgggttcgccgaattttgtgagtctgcgggtcatggggtttattcttgtttgctttcgcggggaattttattgtttgtgcggactatcaatacgggctctttcgtctttatccagactttatgctctttaaaaattttcgccgaaccgaattcgcatgcttcggcaatcgtttttagcggcatgcgcctgcctttgggggtcaggttgtagtcgtacgagcccaaatgtatgcgttcgagggctgtggccgggttttcgtcttccggaatttgcacgacccaacctgtgtagtcggcgtcggtgaattttccgtacgggtcgctcacgacgactacatattgtttttttacctgaggttctttttctttttccgcctcttgggcttttgattcaaaagtgatgtcctcgataatttgagctatttttttcgcgtcgagctccgagcgttggagtacgaccttaacgagttcaagatcaattttagccataatcggatagaacgatactgatatgccttggcgtgtcaaagggaaatttttatggattgtggggagggcggattttggaaaatttattttatcgctttgttttatttgtatgtaaattctggcaggcgcgggattttgcgcccactgtggcgcggattaacgcgacacgctggggcgatgaaacaaattgtggtatttcgcgctcacgcgctaagcggattcgtcgtatcaatctgttcaagtcgagtcgttcgcggtgtgattttgcgcgcacggaggtgcggattatgtgccttcgtcgaggcggcttgcgccactgggggtattttgagcgcacgcacggagcaaacaagtgtatctatcgtcaaattttaaataaaaaataaaattgctgaactttttataaaaagaatctctaccttaaaaaaataaaattgtccgatttttaagctgattctatgtttttcttaaataaaaaacttgaataaacggaaagtttgtcctcaattttacaaaaatgcgctatttagctacaatgtttgttgctgtatgctttcgcctaaattccttggcgggaattgtgggaacggttgttgtttgcatacataaagacattgtgcatataagcgccgttccgaaccattgctgctctttttacggcaatattcaaagcggtaattctatcggcaagatgcccgctgctctgcgccgtcggattgctttgatttactcgttggcgacggcaattctgtaaagttggcttccgaaagaatgaaactgccacagccgacaatttttgcactctctgctcctccgcaacccgaacattcaactccggcgcgcggattaaaatcaacggattttacaaaacgcttttttcgggcgcattttacttgtcgaacgcgaacgccgataccgcttataatttgagaaagtgacgtttaattccgcgcaggagttgcgcgggtttaactgtcaactttctaattataaatggtatgaaaaaaattttaattattgcggcaatatgcctgcaattcctcgctttggcgggcgagcaaaataagccggcgctcgggttgtccagaaaatccgcggtggagctcgccctgcgcaacaaccaggacttgaaggctgtaaaggaaggaattaacgcggcaaggggcagggcgagccagtccggcaggcttgataacccggtgctcggcgcggaatacggcaacgatgtactcttctcggacgagggcgaatattcggtaatggcgtcgatatcgcaaaaatttccgttgttcgggcggcttgccaaggagagggaagtcggcaacatagacataaaacttgcttccctcgaatacgaagacgcttgcagaaagctgtcgctcgacgtcgaaaacgcctatcttgacgcccttgaaaaaaaggcggtttcagacgctcggcgcgccctcttaaaggcgacccaagagctcgcgaaagagctgaaagcggcctccgaaaaagcggaagtttccgcgcttgaagttagacgcgccgaaagcgaatcttcaaagttgcaaatcgagattatgcgcgacgaagtggactttgccgccgcattgtcgcgcttgaaggtcttgattggcgcatcccccgatgtcgatataaaccttgccgacaaactcgcggaaattcccccaccgactgaaaaattttcgcgccagacattggagtctcgcccggattggcaaatgtattctatagccgaagagagcgccaacgcgagaatcgcccttctaaaagcgggaaggtttgaggacgtagaagtgggtgtgtttttcgaggcgtccgaatccgtggacgagccagttgggaaatcgcgcgagaagatattggggctgagcttctcggttccgttgcctttcaaatcttacgacggcggcattgaggagcagctctcgctaagaaagcaggcgcaggcgcgctcggccgcaaaggagaatcaaattgcggcggaaatttccctgtataggctccgcgcaaacaaatatgcgcagattctgaaaaaacacagggcggaagtggaggaggtctccggggaaatatacggcgaatacttaaccgccaggcgcgaggcgcgcgccggcatagccgatgtattcggcgcatggcagacacatttgcagatgaaacttaccggagtttcgattctcgcagagcaggcgagaaattcaatagctttaaaatacgcattggcgttggaggataaaaatgaaaaataagacttttatttatattttgtttagtgctgcgatggctttgcaggcatcggcacagcacgagaattgcgaccacggcgacgctcccgacgcgtcggcaaatgccgggatatcaaattttgtccgcgtcgacaaaatgtcgatggaggcaataaacctaaaaactgcggcggcagagccgagaaaaatcgacgatattgtggccgccattggcaaaatcgaaaatatcccctccaaagtttccgccgtttcggcgcgcatagcaggaaggattgcggagctttacataacgcccgattcgtccgtaaaaaaaggccagcctatttgcaaaatagagagcctattgcctggcaatcccccgccgtcggtcgtgataaaagcgccccagagcggaattgtggaggttttgaacgcttttgaaggcagcccggtggagccaaacgcggaaatagcgcggattgcggatacgtcgtcgctttacgcagtcgcgaacgtgtttgagaacgatatcggaaaactcaggcttggattgggcgcgcgcgtcaggctcgaagcttttggcgacaaaatcttccgggcaaagctcgccaaattcggttcaaagctatctcccgacaccagcacgctgccggtatatttcttgattgaaaatcccggcggagaaatcaagagcggtatgcgcggaattgtatatatatcggcgggcgaaggcaagccggcggtgtccgttccaaagaccgcaataataggcggcgaggggcagaaatttgtgtatgttgaaaattgcggcgaagacgggatatttgaaaaacggcaggtaatagtcggccgtacggacgatttgaatgcggaaatcctgcatggcttgaaagctggtgagactgtcgcgacgagcggcgtttaccagctgcaatttatgcccgctgcggatattgttgcagatgggcatgcgtccgccgcgtctgaaaatactaccggaggcgcggcggcggggttgccgctttttgaaagattggaaaaatcggggtattttggctacctcttatgggctgttttgggcggctctattttgctaaacgtaa

SEQ ID NO: 1010 - DNA, 3575 bp, Unknown
  16S sequences of unknown bacteria
cccccttgtgcaaaggggggacagcatggcaaagccatgcaggggggattgtgaaactcagtgcatgattcagccggggtctgttgcccggtgtagcagcaccgcctgggtgcggcagcacgctgccaatccctcagtcggcgttcgccgccagctccctttacacaagggagccgtcttggctgcccggcagacaaccggccttcgttctgtttcccgacgctgcaaaaatcccccggagaaatccgggggatttttgcaacgggtgctctggctctcaagaacggataaccgcgaacttgacgccggtggcggtgccggagaagggagactccggattctctccgtcgcacagcttcagcacaaagccgcccttgttctccccttccagcttcttaaagcgcatgctgtccagcaccatggccacttcctggccgtttgtcaccttgccgtggaaatcgccgatgcttttgcgcaggccgtctccggcttccaccgtaacgccgcagtctgtgccgctgtcgttgcgcaccagaatcaccgtgcgctcgtccttccctgccggggcccacagctcattttccccgggggtatactggatggcgggagaaaaaccgtcccgcaggcaatcggtggccgtgatctttgtcatggaaattcctcctttattttataaggtgctttatcagatcttgtcttctgcgccgtagccgcacttgatgacgcacatctcatcggggcgcaccaccttggcgccgtagacatgcaggcccttgagtgcgtcctcgaagctgtcctcggggcggtaggcctccacctggctcatgttctccacaaaggcgatggcccgcttggtgcgcaggatgcagcagtccttgtcctcttctttgcagagattgttggtcatgtacacgctcacattgagccacttgcccactctgcccacgaaaccattcttgaaggtatcgccgttgggattgccgtagatcacatcggccagcagcattttctccaggaaatcgggggaaacttccaggctgaatgcggcgtttttgggcacattgttcttatagagggctttgatggcggcggtgatggtgctgagcacattgccggaagtgaggctctgctgctccaccacctggcccgcttcgggatagaagctgtacacatagcggtcggcagcttcactgagggccaggttggcttcctcccggagggctgccatcagatccccctgggcctggcgcttgtcgatatcgtccacgccgaagttaaaatacttctgctggtcgatcttgatcagggtgctctggtcctcccagccgtcccgggtcagcggttcgcccttcacataatcccggatgttcaccttgcccacaccgttgatcttgatctcttcgccgtacttggcgtcggagcggtagcgggcatcggacaaacgcacggccacattgtcgtttttcagggacttgagcatctgggcgctccagacggtgggaataaaattgcggaaactcataagggttcattcctcctctcacatgttaccagcggcgctggcttttttcgatttttttcagattctgctccacctgttcgggggtcatgcggcgcacctcttccggggcgaaaaatccttcctccccttcgctctggccgtcggcggggcccatggtggggggcgtctccggccgcatggcctcttccgcctggcggatggccagaaaggcaatgaggggatcaatgcccatgctgcgcagcttgaggaaatcgtcccccagctgagggatgctctccggagccatatcgggaaaggccttgcgcagcttctccagatcctcccggaacacccagtcccgctccctctgacgcagggcctgaagctccgccagcagctggggaagatcctgttccattcccccggaagccggggccccctggggcttcctttcctccttctgaggcaggcttttggttttgtcctctttgttcacccttttttcctcctttcgtattggcggtcttgccgctaagggtatgatatcccgtccaatcggtctttttcgtcaaatcgcccgcacccggtcttgcttcttctcctccttgaagtggaaatcctcccggagagggcccgcttcctcgggcttggggggccggggccgtccggcggcaaaataccgcagggcatcgggggcatgggtcacttcatggggttcggtggcggcgtctcccccgccgtttgggtcaaaacggagggcctggagggagcggatcaggttgtggcagcagggaaacacccggagggccgggccgttttcccctgggcgcagccattctttcagatccatccagccgctttcccgggcgttttccgccctctggagccagatgcccttctgggcaaagatctcggccacgctgcggccggtatcctgccgccggttccacagatcgggcggggccaggaagcactccaccggctcgtggcaatccagaatccgctgggcggcctgggatacgatcagcccgctttcgtagatctcccggtagaccacggccttcccttcggggctgagggcgataaaatacccggccagcatatccaggccgtagtccatggcaaaataccgccgccaattttctggaatggaaaaaggctggcacacatgggtatcctcctggaactccgggaaaaactgcccggcgaactggtcccatttcccttccagccaggcttcccgcaatcctttgggcaggctttgaagcatcttcacataccccgggtcgcttttcatcagcactttgttgtcatagacccgggcggggatgaaggtgtagtcggcggggttttcggcgccccggtattccttgtccacgaacaggcgcttgacccagctatggcccacgccgccggggttgcaggtaaaatacatccgcttgggaaaggggttggcccctcgcaggcaggcggtgagggtggaaaactggtactcggtgaactgggtggcctcgtctaaaaagatcacatcgtattcctggccctggtactgaagggtatccccttcgctggcgcagtagccgaatttgagacggctgccgttatggaacaccagggttttttccagctccttgtagtcggccaccggctcggccatggtgcgcaggggcaggatgtggttttcccgcagttcgggatagctgcggcggagcagcagcagacggatgccgtcatagtggagggccatgagcagggctttctgccgcacggcccagcttttcccgccgccccgtgcgccgccataggcgacaaagcgggtatcggcccgcaaaaattccctctgcctgggggatggctgttttaaaatcaatttcatttctcactctccttgcagcgtgacgctgcacccatactgcgctgccgcgctgagcaataacactatggctggttgaatgctgagtggcaaagacggctcccttgtgcaaagggagctgtcggcgaacgccgactgagggattggcagcgtgacgctgcacccatactgcgctgccgcgctgagcaataacactatggc

SEQ ID NO: 1011 - DNA, 7990 bp, Unknown
  16S sequences of unknown bacteria
gtgatgccggccttctccttgcagtcgcggtacggatggtagacatcccacaacgccccgaggtaatcgctcgcatactcgtcgagcagcgcggtcaggcgcgccgtgtcggcgtagatgccgctcgtctcgacgagcaggatgatgcccttttccttggcgtgcggcagtgcggcggatatcgtcgcacgcacggcgtcctcgtcttcggtctgggccttcacgcagacgtaggggcaagagacggaggccgcgaggtcgatgagctcgcagacctggccggcgtgctcgcccgactcggagatgtcgagcgaggtgtcgatggcgggaatagaaagcttcttggcgtgcaggccgcggacggtagaacgcacgttgtaggtgtcgagcggcgcgcctttgccaaggagcgcgtcgtcagcgagcgggttgtacagctcgatgccctggaagtccatctcgacggcgaggtcgaccagctggtcccaagaatagtcggaccagcctcgcatggaaaacgacagtctcattagttctgctcctcatagacgatcttgttcagggcgttgacgtaggcgcggatgctcgagccgacgatatcggtggagatgccgcgaccggaatagaccttgccgtcgctcatgagcttgatgacggcctcgcccatggcctcctggccctcggtgacggactgcatctgccagtcgtctagctcgtaatgcttgccgacgatctgctcgacggcggcaaaggccgcatcgatggggccgtcgcccacgctcacggcctcgacgaggcccgactcggtcttcatgcgcacggtcgccgtcgccttgatgacgttgccgtggttgatgacgtagcggtcgagggtgtaggtcggcgggacctgcatggcggcggaagcgacgatggcgtcgagctcgcggctcgtgacgctctccttcttcgaggcgatgcgcatgaacgcctcgtacacggcgctcaggtcctcgtcggaaagctcgtagccgagcttggcgacgtactgggagacgacgtcgatgtcgtcatcggcggtgagcgcgatctccgcgtcgttggggcccgaggggctgctgaacagcgagctcgtcacctggccgcgctcgcagatgcgggcgatctgcgtggtgagacgcttgatgttggtcatgtgcacgccgcactgcaccttgatgtcgtccgccttgtcggcgaggatcttcgcgatgtgggccgtcgacgagatgccgagcggatacgacgtcgccttgacctcgcccgcgcccgccatgagcgcggcgatggcgcaggaatctgccatgaagagctcgtcgctgcacgagacgcccagcgtaacgtcgcgcaagccgggcacgtcgtcgatgagcccggcgacgaactggccgaactcctcggggatcatcgtgcccgcagcgtcgacgacggtgacggtggtggcgcccgcctcgatggtcttgccgatgacctcggcaaggaagtcgtggtcggcgcgggtcgcgtcgtcggcgacgagctcgacgtcatcggtcaggcgcttgcaggcggcaaccgcggaggtcagcgcctcgaccatcgcctcgcccttcttgtggtggatgtactccatctgcgcggggctcaccgccgcgtgcacctgcaggcgcgggcggcgtgcctcggcgagcgctgcccacacgagctcgatgttttcctcgtccatctcgacgggcacgcacaggacactgttcttgacgatggaggcaatcgacttgatgcgcaggctgtcgaccttctcctgcgtgatgccctcgatttcgatgaccgaagcacctaggcggtcgagcagctttgccgtttcgagcctctctttgaaggtgagggaaaggtccttggatttggcagctctgcgcagggtcacatcgctgatgcgcgcttcgttcatcggcactcctagttgcactcgagattttatagatacccgtgcattctatcgttgcctacagcccctccacctgccatatctctaataaatatgatatatgtgacatattttctcgcaggtgtcgaatctttgttgacgtgagcagctcgaagagacaggccggggtgtcccctcggaccaaactggcacgatacccacggtccctcgtgccactagctgtcttcgccgcgcgcagcggccgcctcgtgcaggaagcaggaaaggagcagcgcgagacgcagcgtcgggtcgttcgtgtcgatgccgtagcgctcctcgatgtggtcgatgcggtacttgacgttgttgcggtgcatgtgcatcctctcggcgacaagcgacggcctgcgctcgccgatcaggtactcgaacaggaacttgaagtcatcggtacccgtctcctcgtcgcgcttgaccatcgcctctatcacgcgccccgcaaacgtcgcccgcacgaggccatctccccctctgcactcctcgaccagatagtcgatggcgaacttgtcgaacgagacaacgcgctcccaatcgtgtatgagcggcgtcgtgacgttcttctcgtgcgcccgcttgccaaacgcgcacgccgccctcgcctgacggaaggccacctcggcatccgtgagctgggtgaacttcgaccctcgcccacagaacagcccgtagcgctccatgaggttctcgagcttccacgagatcgaggccttgcccatggggcaggtcccctccgagcagtgcagcgagcagcgcggggactcgcagttgaaacacaggatgacgattccgcttcgcacgatcgccgcgcgtgcgggcaccacggcagacgacacatcggccagcaggcgggcggcaggtgcagattcgggcggtgtctcaatgtagaacatgcagaagtacgcctcgaagggaatgtccacgtacttgcagcggttccgcacggcctcctcgctcatgatgtttccggagatgaggtcgtggatgaaggtgtcggtcgcgttgcccgagggtttgtcgtcggggtactcgcgccgcgcgatctcgccgatgcgcttgccaaacatcgcgaacgtgtcgagcaggtacggctcgggctcgcagatgttgcaggtcataaccaagatcagcgaaaagctgtgcgtggtcttgaacgagaacacgacgtttttgtacttgcagatctcgtcgttgatgatgaagccctcttgctttgcccagaccccgaagcgtttgtggagcttgaacttgcggatgtttttctccgtgtggtagccgtgcttgacgagctcgatgaacaccgggtcgtcgcacaggttgtcgcgcgtgtacgcgagcagcttgagcgcggggtcgacgaggatcacgttgttctcgagaaactccgcgctgatgtcgaacatctcctgcgaaggcgcctgcgtcacgacgaggtggtcgagctcacgctcccacgaggcaaaccggtagaaggagttgagcagcccatcgagaacgacgagcgggctctttccgcccgtgacagagatcaccgcatcttcgcagggctcgtcgtcgacggcgttgacgtacaggcacgagatgccctgtttggccaaagtagcggcgctctcacgccgcgacacgaggtacagcgagccttcgtgtactgcgacttcggatgagccgacgtagaacctgaggttcaaaaacgacgggttgtccgcgcagctccggtgcacatgcccatagggctgcagctcgtgctcgacaatattcagggtcaaactcatcgcgatctcacccgtacccttttcgcgtccccgtaacccccgggggctcctctccaagtcattctcctcagcatgaacgattctcctgtaccggaaagagaaatgcatcggaggcactgtgcgggtttgaatgcggaaactgtgcactttgcacgaacagatagggtttgagctggtaagaagcgcaaaatgcacaagagcgtgcttctttttttatcctgttgcatgtttttgcgaaggttcgacgccccacttcgagttcactcgaggcggacgcaacgctttgcagcatgcccgggcatccagccgcctgccgacgcccccgcaggtacgctgcagaaaaaaacggcccgaaaaagcaccggctacgtgcccgcagcgctttttcgggtcgatgtgtcatgccgtgcccctgtgcccgtgcctgctttccgcctcgaaaagcaggcacgtcgcccggagcatgcgaagggcgcctgatcccgcttacgcggcttccttcttcagctcggcagcgggagcagctgcatcttgcgccaccccgcggcgctcgtcgaggtgcgcgaagaatcccgcgagaatcgtgccggagatggaatgccacacgcacgacaccgcgcagatgaccgctgcctgcgggatcgccgcgaactgcgcggacgtggtgaccagattggtcgcgaggcccgcgttctgcatgccgacctcgagcgagatagtgcgcttcttggccgtgttgaagcggaagagcctgcctgcgccgtagccgagcaggtacccgacggcgttgtgcagcagcacggcgacgaacacgatgatgccggaggtgaaaaagacgctgccctgcgaggaggtcacgccgcccacgacggcggcaaggccgagcaccgcgacgccgggcatgcacgatgccacgctcttgaacgcctcagaatccccgaagcggatgttgaggacgcagcccagggcgaccggcaggatgacggtctcggtgatggagaggaacatcgggaacggcgcgatgtcgacgctcatgccagatgccatccacgtgaccagcagcggcgtcatgagcggcgcgaggatcgtggagaccgtggacatgcccaccgagtacgcgacgtcgccgtggcacaggtagctcatgatgttcgaggagacgccaccggggcagcagccgacgatgatgaggccgatgccgagcgcctggggcaggttaagcaggtggacgagcgcaagtgccgaaaacggcatgatcagatactgcgccgccgcgccgatgagcaggtcgaccgggcgcttggccaagatcttgaagtcgtctttggtgagcgtcaaacccatgcagaacatgatgaagccgatgatgagcgacgaccaggtgaagctgttgccgagcgggtcgacgaagagcttggtgttgacccacgccatgaaggcgggccagaccagcgtaatgaccgccgcggcgatgacgaacagagacgacttgctcgacaggacgctgcttgccttttgcagaactttcataatccgtttccttccctcgcacgcaaatgcaggcaataaaaaaatccctccgcagcccgacctaggctacgagggacgaatcatgaaatccgcggtaccacccttgttccggacgccaacgacgcccagctctcttacgcaccatcatgcgcttttcctgacggggaatcccggcgggacctactgttgttcggacccgcgtctcggagaggataatcgctcgaggcgttggctatcggctttcaccatacccgactcgctgtaaccggtttctcgaagatgttgttctcgtcaacgactttgacaccctattcggttgtggctcgcattgtaggacgttgaaaacaaattgcaacagctatttttgacacgaggggccgtgggtatcgtgccagtttggttcgaagggacaccccggcctgtcccttcgtgccgtgcctttgccagggcgcgtgaatcctggcgcgttgcgggcgggaaaactcgcgcataatggtcccgtgcagcattagcgcggaaatggagaaggcatgctcgagaagtcgatcgttgaccaggcaagctaccccgatgccgtcacgcgcggcttcaagatcgcgagcagcggcggtatccgggacatccagctcgattcccatatcggaaccgaggccatggtcagcgccgaggtgcgcgggtcgggcaacaacgtgtaccgcacccgcgtcaccatcgacaccgccacgcaggaggtcaccggctttggctgcacctgccccgcggcgcagtcgatgcccggcatgtgcaagcacgccatcgccctcgccttccgcgcctcgcccgcccttatagccgaggaacaggccgaggaaaaaccagaaggcagaccggaggaaaaagccaagccgaagaagacgcccgctgcccgcgcccgcaggcagcccaagccgcgccccgtgcagaaggcgcgcacgagcttccaggtcgagcacatgctcgacctctatgccgagcactcccgcgccaccgcctcgggcgcatcgcagctcgccgcatccgagtcaggcgcagacgagacgcccgccgacccgaccgccgtccttgcgcgcggcgtcaacgcacagtacagctcgagctgctacgactcagacggcatgtggcacatcgggctcagggtgagtcgcggcaagacgagctacctcgtcaagcacatcgacgagctcgtcgccgcctggcgcgacggcgccccctacacgtacggcaagaacctctcgtttatccacaccaagtccgccttcacgccacgcgccaaccagctcatcgaggcgctgcagaccatcgtcgacgcccagagctcggcgttcgagctctatgggcggcactcctacgtgtattccagcagcaagcccagcaccaagacgctccccctgcgctccgagcagctcgtgaagctgctctctatgctggtcggcacgagcgtcgtctacgagtacgaggacatcggcacgcccagcgggcgcagcaaggcgaccatccccgtcaccgacggcgaccccaccctcgacgtcgagatccgccatgacgacgcgcgcgaaggctacctgctctccctcgccccatccgaggcggtgttcgcccccggcgacggcgacacgggctttctcatcgccccggacggcgcctggcagctcagcgcggaattcgtccacgacctcgggctgttctgcaagagcgtcttgccgcaagagcaagagctcgtcatcgccgacgcggacatgccggcgttttgcgcgacgatccttgctcccctgcgcgagctcacgcgcctcgctgcacccgcagagctcgacgagctgctgccgcccgagccggagttcgagttccgcatcgggctggaagacggcgcgatcagctgccatgcgcaagtctcctacgacggccgcatcgtcgggctgttcgacgacgcgcgaaaagggcagcccgtgcgcgacgtcgagcaggagatgtccgcgcaggagatcgtgcgcacctacttcccgctcggcgacaacgacacgcccaactacctgacggctcgcttcaggtacggctccgtctacggcggggcttcggacaccgacccggtcgacccgtggatgcccgccaacgacgacgagtcgtactacctgctcttctcgaggggcctggccgagctcgagcaggtcggcgaggtgctgctcgacgagcgactcgcgcgcgtgcgggtgcgcacgtcgcccagcgtgcaggtggaggcatcggttgccgcgggcagcctgcgcctgggcgtcgactcgagcgagctttcgaacgaggagctgctcgcctaccttgccgcctaccagcgcaaacagcagtacgtgcgtctggacaacgacgacgtcatgcgcatcggcacctcgatcgcgcgtgtggcagagcttgccgatggcctcggcgtggacgctgccgcaaaccgcagcctgttcgtcgacgcgctgctcaagcgcgcagacggcgtgcgcttctcgcgtgacgagggcttccgccgcatcgtgcgcgaattcgagaccatcgcggattccgacatccccctgccagacggcctcgacgccacgctgcgcagctaccaagaagagggctaccgctggctgtgcctgctcggcaagctggggttcggcggaatcctcgctgacgacatgggcctcggaaagaccctgcagacgatcgc

SEQ ID NO: 1012 - DNA, 3504 bp, Unknown
  16S sequences of unknown bacteria
acgcgagaaccaaagcggatgtgagcgccctggaagagctggcagcttatgtaaacagccttgatctgagtggctatagtcagctcagcgttcagcgtctgcaagccgcattgtccgctgcgaacacgctgatggatgatgaggaggcaagtcaggaagccatcaatctggctgagtacacattgcagaaggcattggatgaattgacgcaggaggaagcagaagaaaacattgttccaaagcccgtgggaacacaatcaggatcagcggttcaatcgactgacgctgatgaacaagaaacgacagccgctgatgtgacgacatcggcttctgcatccacatcatcttatgcgttgatctttacgctgcttgctgcaggcggcatcctgctcatcacgcataaaaaacgacaaagataaatgttcgaggtcctgcccttctggcgcagggcctttttacacggtcatgtgtctgtaagctgtggtataataaatgcgatcatgaaagagggggagatcatcatgagcaaccatgaagcatacattatggaacagctgagtcatgccccggacgagatgagccgcgcttatgaactgacattgaccaggatgatgactgccagcgatacgccgctgaacattcaatcagtgctggatcttctgcaagatcagaataagccggaatcgctgcggtacgcatgctttgtgatggcaaccatctggtatcgtcatatgaaagacatgctgaatgtggaagatctgctgcaccgctatggcaagacatttcgcacgcatccttctttcctgcattaccggctgctttcctgtgtggattgcggctatcgcaaagactggcgcgagatcctcaaacaggccgaagaaaatgtgaagcagatgaaaaacagcggcgcgcggcatatgtttgcagagtttaccgctatgttctttgaaagcgatcagatggatgccgcggcttcagaacgagagatgtggctggagaaggccacggcccagatcaatattgctgtgcaggaaaacccagagtatgctaagttctatgcgaccaaaggcaggatatacgcattgcaggggctgtatgatgaagcaatcttgctggttaagcttgcaattgaaaaagaagattccagccggaaagattatgcgatccgcatcggcaattatcaggtcgtgcagatgaacatccagcagcgcagacatcttcagcagctgcgccaagagctggcagattatcgtgaaaatcagcaggcgatgtatgcgcagatcaatgacaaggccgatgagatcaacggctcattgatgagaaacctggagtacctgggcatttttgctgggatcatctcctttacgatcggttcactttctctcgctgatgacgcttcaaaatactcattgcctggcgccggcgcattgatcctcatcttgtttggcgcattggtaggcacttatggaatgtttgatcttatcatccacggctataagaagaatgataaaaagagatatatcattgttttcctcggtgcattgcttttcatcttaggagggtttgtcatatgctggaacatttgatccaatacacacattcggataaaagatataatgaagatgtcagcgcagtcggaaacgactacatgtttgtcattgacggtgcgaccggcctgggcgctaatgatgtgatgggctgcggagatgatgcccgatggtttgcgcaaacgatgaaagaacatattcagaagcatattcatgatgagcttccgcttacggagatcgtctgccaggcaatcagagacacccgctcacgataccggcaggatgtcgaaaagatgaaaaaaatcgacatgccaagcggctgcatcgccctgtttcggctcaaggacaaaaaactggagtttttcggtcttggcgatacgtgcggtgtcattgaactgcgtgatggccagatcctcatgatcgcggatgagcggcttgaggcattggatcaaagcgtgatccaggagatggtgcgcatcagcgcggaacgcggcatccccctttctgagacgaggccatttgtgaaagatcagctgatttataaccgcaacctgcgcaacactgagaaaggttattacgcgcttgatctgacagaagcagggccggcacacgcgtttgtgcggacctggccggtcgaaagcgtcagaaggatagcttgtatgagcgatggcttttcacagatcctggattatcccagtcatcatgaccttagcgctttgcttgatgcgatcgaggcagatcatgaacaggtcgcgcgtcagctttatgatctgcaggaagaggacagtgcctgccgcgtcgttccgcggctgaaaaaacgggatgatgccaccatgacctttgctaaaatttgttgatcatcaatcagatcatatgaggaggcaagcagatgttagaaaaagacacacatgatcatgtcgatgacacctcatcagagacggataatctgacgcgtctgaagcagctgctggacgaatggaagatgtactatctggagcgggatgaaaaagaaaacggacatgtattcgaactgccgctgcgcacggagaatgagcatcatttccggctgcggatcctgcttggcaaagaccagaatatctgccccatccgaatcttcttttctttttatgtccgcaaggaagaccgctatctcatggccagccggatggcccagatcaattctgatatccatgggacaccaatcctgcaagatcccggcttctttctctttgatccgggagacggagagctttcttttggcaacacctttttgatcggcagtccgatgaacgtttccgtattcacgaccatgttcgtctatctgatccagcgcgctgagaccgtgcatgatgtgctgctgactttatgtgaagacggtttttctcaggaagacatcgacgcgttcctggaagcggcgctgcactatgaaaatgaggaaaaaccagacgaaaggatgttttcctaatactgacacagctttacaatgtgaatgagacaggatgatagcctgtcttttcatttgcttttccccgaagcagcgggaggtgacagtatgggaaaaaagtatggatacgtgcgggtatccaccagggaacaaaatgaagaccgtcagttgtattccatgcaagagagcggcgtggagaagaaaaacatctttgtggacaagcagtctggctgcagctttgagcgccccggttatctgcggatgatgaagaagctgaagcaaggcgatgtcctctatctgcattccatcgaccgcctgggcaggaattacgaagagatcttgcagcaatggcagatcatcaccaaagaaaaaagagtagatgtcgtcgtgctggatatgccattgctcaacaccggcgctcgggaacaagatctgaccggcaccttcattgctgatctggtcttgcagatcctcagttatgttgcccagaccgaacgggacaacatccgtaag

SEQ ID NO: 1013 - DNA, 32759 bp, Unknown
  16S sequences of unknown bacteria
aattgagggtcggtgcgaaacgtaaaaatgcattcccgtcccggtcgctggccgtcggaggcccgaagggctgaagtggcgagcacacggagcgaagcgcagtgcgcagccacggaacgccgcgcaagcgttagcgcagggcggtgcgtagacaagcggccgggtaatcctcgttgacaaaccaaaggtttgtcaacgaccagaaaaatctcttatgaagaaatttttgcgtccccgtggtagggcgcgcgccgtgtggggcaattcaagcgcgtgcagagggcgcaattgctgtagtcttcttttgaggcaaacaaaatgccagaaccggatttgttgggcaacatcagcatggaaggtgtaagcgaaacgccgattgccccttccacatcgcccagcagcgcaaacagcggcttttggttctcgatcggccattctggcaaagaaccgggattcatggtataccgcgcggtggtatggtagagcgcgcgcatttcttcaaacacagggagcatcgcgcagcgcaacacgctctccgcaatgtattccaaccaatagcgcataatcggatcttctatccgctggcacaaatcgtatagttctctgccgcacgtaacgacatagggatacacttcctggcacgccgccagatttttggccagcaaagggctttcaaagcatgtattctccagccaaacgcgctcgtttccttccacgcgcacgcttacccggcaaaacgccgctttgggattggcgatgcgcatcgcctcttcaaaataagggcgcaaatcttcgccatcttcttcgtccaagtgcaattttctggcaatttcttcccatgccagcgcaaatggcaaatgcgatcgtatctccattttttcctcacaacgcaagagcgatgtcaatcaattttcgaatgtcgtcaatttcgtagcgtatgctcaaatccgcaggcttggctttatggcgcggattgtaccaacaggcgtccacgcccgcgcgattggctgcgagaatatcgctggtgaggctgtcgccgcacaaaagcgcatcctcgggcgcaatgccgcccagtgccttcagcgcggcaaagaccatttgcggctctggcttctgcgcgcccacttcctgcgaaatgatcactgcttgaaaatagccccaaagattgcctttttccagccgccggcgctgtacgcggccaatgccattggtgaccaacgcgatgggcattttcgtagaaaccgccttgagcacatccagcgctccatccaatagaatgcattgttccgccaaagcgtccgcatagcgctctgtaacctcttcaggcttcgcgtccacgccatataacgccagatattcacggaaacggcgcaccttcacttcttcttgcgtaatttggcccttctcataatcgagccagcactgcgcattgatggcagaataatgctcgcgcgcggaaggatcatcaatgcccaaaaaggcgttgacctgggcgattgcgttgccctctgcggcgtgaaaatccatcagcgtttcatcattgtcgatcaatagtgccttatagcgcataaatcctcctgccgtggcgaaacccgttgcaatatacgccgcgattgcgggccgcctttttgcttgctacaaatggcaaattcaggccgcagcacgaaactaccgcccaaacacatcagcccctggcaaatgcggcatctgccaggggctgaaactctcctcttaagcgccgcgctttttcgcaaagcactcgctgcagtaaatcggacggtccgtcttgggcacgaacggcacgcgcgtgggcgcgccgcactcggcgcaagtcgtttcatacatttcgcgttcgctgttccggctcgccttgcgggcatcgcggcagctcttgcagcggctgggctcgttcatgaaacccttttctgcgtagaattcctgttcgccggccgtgaaaacgaactcgttaccacactctttgcataccagggtcttgtcctcgaacattctgatgattcctcccgaattgtaatgcgccgctttgattggctgacctggtctttgcccccacaaccgccggctggagcgttcgctcatgagccatttgcttcccactactagccctctcagcattggctggccggacttacttctagatcgcaccatgatcaccgggctttgcccggcttacgtgggtcgttttgcctgcgactggcatcgacttacaaccacagacccaatcaaagccaacggtcacattataatccatttggcgcgaaaaggcaagcccttttttcgaattatttcacttttctgccacgtgccagacgcgattgttgctggcgcggtgtcgccctttctatgcttctccttgttgcttcgcgttttcccgcaacctgcgcccgagcgcgctataacgcatctgcatgcgcttattggacaccatctgccaaatcgccgcctctctgcccacgatgacgaccatgcgcctggcgcgcgttaccgcggtataaagcaaatttcgattcatcaacatgggcggccctgaaacgatgggcaataccacggcctcaaattcgcttccttggcttttgtgcacagaaatgcaataagcgtgctccaaagcatcccaatcgccttcgccatacacggcttcgcgtccatcgtcgaaagcgacggtgatacaacgaccggtgcggtcaatggcgcgaataaagcctatgtccccgttgaaaacgccttcgccttcctccccatctttttcccaggaaaggtcataattgttccgcgtttgcatcactttatcgcccacgcggaaaaccgcctctccgcggggcaattccgccaccccgggcctgcggggattgagcgcctcctggagcatgcggttcatttcgtatacgcctgtgattccccgtttcatcggcgccatcacctggatatcgcgcatgctatggaatcccgcaaagcccggcaagcgggttttcaccagcgcgattgtgctagaggccgcatcgttggcgttttccttgcgctcaaaaaagaaattggtgttcttggtgcgcagcaccggcatttctccccggttgatgcggtgcgcattcattacaatcatgctttcttgcgcctgacggtaaatggtggtgagcttggctaggggcaaaacgccgctttcgattatatcccccagcacattgcccgcgcccacggaaggaagctggtccgcatcgcccacaaaaatcagccgcgtgccgggtgcgatcgcgcgcagaaggctgcgcatcaaaaacagatcgaccatggaaacttcatccacaatcactgcttcacaggaaagcggcctgccttcgttgcgcaaaaatttcccttcttcgccgctgtattccagcgcgcggtggatcgtgcgcgcatcgcggcccgtggcttctgtaatccgcttagccgcgcgccccgtgggcgcgcaaagttctacttggcccttgaacatgcgcaaaatgcactgaatgcacgtggttttacccgtgccagggccgccggtgagaatcagcaccgtattgttcatgcacgcccgaacggcggccatctgttcctcgcccagttctacatccatgggcggcaaggtgggaattggctttgcgccatagcgcgccaattgcaacaggcgcgccgccacctccctttccgcctcataatattccggtagatacacatttcttttgccatcgaccatctctatgcaaaaccggtcgcacaatgccagacgctttaaaggctgttccagcatttcctgcgccacgcccaaaaggcgcgcggcggacgcgaacaagacttcttccggcaaaaaagtgtgtccttcgcttgccgcggcttctttcagcgcgtactgcatgccacattccagccggtgcggatcctccatgggaatgcccatggagcgcgcaatggaatcgaccgtgcggaagccaaccccttctatctcatcggccaggcgatagggatcggtttccaaaagcgcgcgcgtcttgtcgccaaagcgctttaaaatcttcagcgctaagcccatgggaatctcaaaggcctgcaaatacagaatttccgattgcatctgccggtgctcctggtacgattccaggatcatttccgcccgctgctgtttgatgccaggcacttcacagaggcgctcaggcgcgctatcgagcacttccagcgttttttcgccgaaatattccaccaacagcttcgccgtcttgggcccaactcctcggatcaggccagacgccagatagcgctctatcgccgtcttggttttgggacgcaagacctcataggactctaccttgatttgcgcgccataatcccggtgctcaacccactcgcccgaaagcgcgacatgctcccctgcggccaaaaatggcatcacacccaccgcggcaatccgctttttgccataccgcagcatagcaaccgtccatccgttctcctcattgcgaaagcggatttcctcaatgattccttcaaagcgcggcattcgcgttttacctcgttagagcgtttacatagtccaggcgttcccacgaaaggtcgagatcatcgcgtccgaaatggccatacgatgccacctgccggtaaatcggccgtcgcagatccaaccgctcgatgatcgccgtggggcgcatatcaaaggtgcgcgcgaccaaatccgcaattgccgcgtccggcatggcgcctgtgccaaacgtgtccaccgtgatcgaaaccggatgcgccacgccgatggcataggccgcgccaatttcgcagcgcttggccaacccggccgcaacgacattcttggccgcgtggcgaagagcatacgctgccgaacggtctaccttcgtcggatctttgccggaaaacgcgccgccgccgtgccgccccatgccgccataggtatctacgatgatcttgcggcccgtcaatccggaatcgccctgtggcccgcccacgacaaagcggcccgtaggattgatataatatttcgtgttttcatccagcatatgcgcggaaattgccggacggatcacgtgctcaatcatatcgcgctcaatctgttcgtgcgatacgccctcgctatgttgcgtggaaagcaccacggtatcgatgcggacgggttggttgttttcatcgtattccaccgtgacctgcgccttgccatctggccgcagatatggcagcgttcccgccttgcgaaccgctgccagccgccgcgtgagacggtgggcctcataaatgggcaggggcataaattccggcgtttcatcgcaggcataaccaaacatcatgccctgatctcccgcgccgatatcgaaccggccctgcgcgcgggtttccagcgcgtcgttcacccccatggcgatatcgggcgactgttcgtctaccgacaagagcaccgcgcaggaattgccatcgaagccgtattcgggcttatcatagccaatttcgatgatggtatcgcgcgcgatcttttcaatgggcacataacactgcgtgctgatctcgcccatcaccagcaccataccggtggtagcgatgctttcgcaagcaacgcgcgcttgtgggtctttggcgaggatcgcatcgagaaccgcgtcggaaatctggtcgcaaatcttgtccggatggccttctgtaacggattccgaggtaaagagctttttcattttgtcctccttctttctgcaagccgccacgaatctgctcaggtcagccgcacacgcaataaaaaagcaagccaacgcaggcttgccagatattacagccgcgtcttatctttcagctttcgctgggggaattggcaccatgccgaagccggttgccgtggtttcatcgagcccttctctccaccactctgcataagacagtccgtgtattcgtttgcctttttactataccgcactttcgcagatttgtcaacgtttttgtgttgcgaaatgtggcatttcatgctataatttgctagaagaatgtgtggcacgcttccacacagaaaggggtagaaagtatggtcaatcccgttgttcacgccattatggagcgccggagcatccgcagctatcaagaaaagcagatcgcgcccgagcagctgaaaaccctgatggaggttgccgtcgcctcgcccagcgcccgcaactcacagccctggcatttctcctttgtgcaaaacgcaaacttgctgcaggacatcagcctcgccgtggcgcaggcgctcgataggccgggctacgacgttttttaccacgcgcctaccgttgtgtttctttcccgctccaccacggaaaatcaggcctatggcgcgattgattgcggcattgccgccgaaaatctcgccattgccgcccagggcatgggccttggcagcgtaatcctcggcatgccgcgctcggcgttcacctcgccgcgcgccgatgaattccgcaaagcgttgcgctttcctgaaggatacgatttcgccatcgccgtcgccatcggctacgcggcggccagcaaggaagcgcatcccgtggacgatggaaaagttgacctgatatgctgaccatcggcatatgcggcgctagtggcagcggcaaatccacgctcgcgcgggaactggcccgctgcatcaatcagccatctgtgttgctccgccaggacacgtattatctcgaccatccggagctttccttcgaagaacgccgggctctcaatttcgatgagcccgcaagcttcgaccatgacgcgctgtatcaggatctccttgccttacaggcgggcgaacccatccgagaaaaagactacgattttgcgctgcaccgccggtgtgacgccaacgcctggttgcagccagcccaaatcaccatcgtagaaggcattcacgccttctatgacccgcgcgttcgcgccatgatggatttcaagctgtttgtgcaagtggatcccgacatctgcctgcttcgccgcatccggcgcgatattcgcgaccgtgggcgggatgtagacgatatttcacgccagtacctggacaccgtaaagcccatgtatgaacggcacatccgcaattatgtggactatgcggacgtcattgtggcgcacggcggcaaaaaccaaaaaatcgtggaaatcctcgggcactacatcaatacctgtctgcttccccattgagaaccgtggcaatgccttcggcaagatatggcatggaagcaagggcttcggcaagcgtgttttcgttgtggcccacttcaatcagcagcgcgggcgtgccgacgtgctggttatagcgattgccctttaccatcacatcgcggcacaagcccggatgccgcgcgtttagaacgtcggtcagcagggtggcaaagccgtaattcgcgtcaaaatccggcttgtccacaaaattgtcgccccggccgaggaggatcatcagttgggccacttcctggccgtttgcctgcaccgttcgctcttcgcccgccgcataggcgtcgcggtgcaaatcgatgtacatatcgaaaggttcgctataggcgagcacggtttccaaggaacgggtatacgccgtgttgaaatctggcatttcgttgtctgtggtatcgtgtgtgacttcaaagccatacatgcggagcagggacgccaattccgcacccacgcgcaccacggaatggtctgcatccgctgtgcgccaggcaccggtttccacatattcgttgccctcttcctgggcgtatgcttcgtgggtgtgcgtatggtagatgaggatgcgtttggatgcggcgggctggatggtgggcgtaggcgtaggcgttggcgttggcgtggccaaagcgctggcgctggcttccggcgcgttcaaagggagcggctcgtcctctttccaggaaaacgttccctctttttcttgcgcgttgtcaaagatgatcaccgggttcgatgccaacattgccaccggcgcgcttgcgccggaataagcaacgcgaaaacagcccagcgggctgttttcgctccattgcgctgccgtgttcgtggccaaagctacgtccgcattggcggcggaagcatcaaaaaacatcgttttgcaaatcaaagcgatcagcacaaccacggcgagcgccaccagcacacctagaaccaaatgcgaagccttcacaaccttgattcgaatcatctgcaccaccccgtccgctttactcactacaaagtattcgcggcgggattcttttatgctgtttccgcctccaaccgactgagcgcgcgttgcaattcttggatcacgccttccatctgcgcctcaggatccccgtcggcaaaaaacaccggctgtcctatggcgatccgttttcgcggtttcaccacaatgggcacaaacggaagatgcttccccgtctttgcgcaatacatgcgttccagcagcaaaaaccccttgtagagttcccccaccccgccgttttcgctggtgtaatccacatccggaaacaacaggatcgattccccggccagcaacgcttttatgctttcgcgcagcgtaagcatggacttcgcgccgttccgatatacggcaatggcgcgaagggagcgcaccatcttgggggcaaagaaagcgcttgcccgggcagctatccaggcaatgggcctgggcaacttgcagcgttccaaaaacgtgtagtgatacgtatgcgagaagcacgccttttcctcgcaaaacgccgaaaacacccatggacgaacgaagcctcccaaatacaaaaaggtgtacggcggacccgcattgttcccgtgacggcatagatataccgcgcccgtgggcagatgcgcgatatcgggcttttcgcgcaaagggaataccagtttgagaaacggcgcggcaattcgaaaaaatcttcctgttttttgcataatctactttagtttgtgtttttcaccatttgtacgcagtgttgcgggcacgcgctttcgcatgcgccgcaacccacgcaattccattcaatcacactgtggggttgtcccgctgttccggcaatcgcgccaaactgacacgcagcctcgcaagcgccgcagcctatgcactccccatagcggataacggcatgcctgcgcagcgcttcattggccttcaacgcaccagtgggacagttgtccgcgcaacacatacaacccacgcatttggacaaatcgatttccggcagcaaattcacgagtttcagcgcgccaaatttgcaactgcgctcacactttccgcagcccaggcagcctgcgctgcaattgtcccgcaccaccttgccgcgttccatcgcggaacacatgcggtgcacgggatgctccaccggcatcagggcgagcacgccgcgcggacatgcgctgacacatacgccgcacccgcgacacgcctcttcatccaccaccgccagccggttttcattcacatgaatggcgccgaatggacaggccttttcgcaatctccaccgcccaggcagctatagcggcaagccttgtccccatctcccgccaaaagcgcgctgcggcaatccgtcggtccatcgtaccgaaagcgaaggtggcacttttccacatcgccccggcacatcacgaccgcgactttgcgctccatgcgcgcggcgtccacacccatcacggccgctatgcgctttgccgcttccgcgccgcccacggggcactgcgaaacccccgctttgccttccgccacagcccgggcgtaggcatcgcaccccgaaaagccgcagccgccacaattggctccaggcagggcttcacgcactgcgtcgaacactgggtcggctggcacgctaaacactttgctgacgatggccaacacgccgccgaatacgagccccaggccacccaacaaaagggcggcgactacgattgtggaaacctccatccccgcacccccttttatccaatcagcccggcaaagccggaaaaggccacggccattaagcccgccgtaatcagcgcgcccgggaaaccattcatccacttgggcatatccgaaagcgccattcgctcgcggatccccgcgaacagcacaatcgccagcgtgaaacccagcgcgccacccacgccgttgaccacggattccagaagattgtatccttcatccacgttcaaaatcgtcacgcccaaaaccgcgcaattcgtggtgatcagcgggagatacacgcccaacgcctgatacagcgcgaaactgatcttgcgcagcaccagttccaccacctgcaccagcaccgcgatcaccagaataaacgcaatcgtttgcatgtattctatgccaaagtgcacgagcaacagccgcacaaaataggtgaccaacgaggcgacgcccattacaaacgtgaccgccatgcccatgccaaacgccgtttccacctttttggatacgcccaaaaagggacagatgcccatgaacttgttcatcacaaaattgttcacgaggatcgagcccacgagaatcaaaacgtaattcatcgggcagccccctttcgcgaacgattggtaagggccgttaccgccgcaagcaacaggcccagcaaaatgaagcctcccgccggttgcacggcgatggccatgggctggaaggtttccggcaacatggcgacgccaaaaatcgtacccgcgcccaacaattcgcgcacgcagctcaaaagcgtaatcgccagggtaaagccgagccccatgccaagcccatccagcatggaagccagcgggggatttttgaaagcaaaagattctgcgcgcgcaaagatgatgcaattcaccacgatcagcgatataaacacgcccagcgtatcatacaggtcggggaaaaacgcgtgcatcaccatttccacaactgtcacaaacgtagcgatcacgattacgaaagcgggaatgcgaatctgctctggaatcatgcgccgcaacagcgaaatcaccagattggaaaacacgagcacaaacgtcgtcgccaagcccatcgcaatgccgttggtggcctgataggttatcgccagcgtgggacacatgcccagcaccaggcgaaaggtcgggttttcgtgcagaatgccgttgagtaggatcttcttcgcattcatgctattctccccccttcaaatagcgctcgaagaattccccggcgcggcgcgcggcatccccctcgcctgatacaaccgttccatccgccgcaaggagcaccgtatcgccgccgtccatcgcgaaagcatagccatcttcatacgcgacaaccgccgcaatttcttcaaaacccaactgcgcgaatacgtccagttccgcgccgccatagcgctcgagcagcgcctctaggggcgcggcagcgccttctgcctgtggtgcgtccgcagatgcggccaggcgcaacacgtcctgacaatgcgaaagcgcgcaggatactgcagttttcacggcgtttgaggaaaccgttgcgccggtcatcgcgtccgcgccagccgccgtttctggcactgccgcggcgccagtaaactgtgccaaaaaaggcgcttcatcggcactgcccaggcccttggtttccgtatgcgcggtcacggcaatgccggtgatcctccccgccgtgctcacgcccagggaaaggagcacttccccggcatagcccgttgtggaaagctcgtatacatagccgacaaccgtttcgccatcgcaggcttcatatagcgcggcaatgttgggataggcttgcgcgtcaaactccattggcgcaaaatcgtattcgccaatcaccgccgcgcgcccggcattttgtttcctggccaagttttcggcaatgggtttttctgtgagcgcattcacgcctgcgagcaacacgcccgccgccagcgagaaaatcatcaaccgcagcgccaatttagcgatgttacgcacggtttttcacctccccaaacaccctgggttgtgtaaaccgctcaatgagaggcgtggccaaattcatgaacaatatcgcataggaacagccttcgggcagagaactgaaggtgcggatcacaaacaacaccaacgcgcaccccgcgcccatgatgagcttgcccaccggcgtcgtgggagaagaggagtagtccgtggccatgaaaaacgcgcccaggatcaagccgccagacagcacctgccgcagagcgctttccgcactgcccagggaaatccaaaatagcgcgaaactgacgagcagcatcgtgaccgggacgcgccaggaaatcacgcgacgcgcaagcaaatagagcccgcccgccagcagcgctggtttgcacacctcgccgatacagccgggaatgctaccccaaaagagcgcgtctagcgcatattccgcgccctgcgcaagcggcgtagcgctcgtcatggcatcggccatggaatatgccgttccagacatcaagcccacccaggaactcatcagaattgcgcgcgccgccagcgcgggattcataaaattctgtcccaagccgccaaagcactgttttaccagcacaatagcaatccccgtgcccacgatgggcagccagagcggcaccgttggcggcaaattgtatgccagcagcagccccgtgaccacggccgaaagatccctcacggtgtagggcttttttgccatccagcaccacaacgcttcccacgccacggcggaaagcacgctcacagcgatgatccacagcgcgtgtaggccaaaccacgccacaccaaacgcgcccgccggcaaaagcgccacgatcacgtccaacataatgccccgcgtcgtgcgcccagcgcgtatatgcggcgaagaagcaacgcgccaaagcttaccctgcatgccgcattcctccttcctcatcaacccttgcgccgcgcgagttcccgcttggcagcccggatggattgcgtgagcggaagatgcgcgggacatacataagcacagcagccgcattcgatgcaatccagcgcgtgcgccgctttggcttcttcaaacattcctttatcggaatatcgcgcgatccgcgtgggcatcaatcccatcggacaggcatccacgcagcgggcgcaacgaatgcagttgccgcgcgccgcctttttttccggcggcaggagcacgatcccgcccgtcgtcttcgccacaggcgtattgagatcaaatgcagccattcccatcatcggtccgcccaggatcagccggtctgccgtttctaacgcgccgccgcacgcttctaccagttcgcccaccggcgtgccgatacgcgcataaaggttggctggcgcagcgacttcacccgttacggtgaccacgcggcgcaacaccctttctcccttcacgacggcatcgcagatggccttcgcggtcgatacattgagcaccacgcaccccacgttcatcggcaaaccgccggacgggactctcctgcccgtcaaggcataaatcaattgtttttccccgccttgcggatagcgcgtgcgcagggggcaaacgtcaatccccgtaccctgcgcagccgcgcgcagagcggaaattccttgcggtttgttggcttcgacgccgatgtaaatcgccttcgcaccgagaatatgcgcggcaatttgcgcgcccatgcgaatgtcgtggggcgcttcgatcatcagatggtggtcgcccgaaagatagggctcgcactccgcgccgttgaggattagcacatccacctgcttctcccgcggcaccgtcaacttcacctgcgcgggaaagcccgcgccgcccatgccgacaatcccggcttcgcgaatgcgcgagagcagttcttccgccggcgcttcgagcggattgtcaaccggcgcgaggctttcgcacctttcatccagaccatcgttttctatcacaatggcctccgacgggcggcccgccgcattgggccgcgcttccattcctttcacccgtccggaaaccggcgaatgaatgggcgcgcccacgaagcccgcgggttcgccaattttttcccccagcaagacccgctgcccagtcttcacaagcggtttgcaaggcgcgcccacgccttgcgaaagaaaaattgccgccagcttgggtggcgcggcttcgcgcacgggcaacaagccatcctgccgttctttgccatgcgccgctggatggatcccaccgcgaaaagagtgtatcaccattcttttgccctccgcaaatggttatatctgcgaccattataccataaaatctcgcaaaagaaaaggatattccgccggaaaacgcaccatcgttcaaaaaataaagggcattttttcagccgttattgcgcatgcgcagaggccagcaggtgctgggcatgcttgatgctggtttcgccgctgccgccaatcaagcgcgcaatttcacccacacggccatcgtcatccaatctgcgcacataagaaccagtgcggccgtcttccacccgcttttccacgacaaaatgcgcatcgcccatcgccgcaatctgcggaagatgggttatgcacaaaacctgcctgtgcgcggcgatgcgatgcagtttttccgccaccgtttgcgccatgcgcccggaaacgcccgtatcgatttcatcgaataccatggaatccacgccgccgccctcagcggcgatggccttcatcgccagcatgatgcgcgaaagctcgccgccggacgccgtcatgcgaagcggcttgagcggttcgccgggattgggcgaaatcataaattccaccgcgtccagcccatgcgcggtgaaatccgcttctggcgcgatgcgcacctcaaactgcgtacccgccatgcccagctcggaaagctcctgcaccagcattttttccaacctgcgcgctatgattgtgcgcgattgcgtcaattcgccgcacagcgcgcgcagcgccttctcctgtgccgcaatttgtttgcgcagctcgctggcttgctcatcgtttttttccagcgattcgtattcccgcttggccgcgtccaaaaacgcgagcacatcttccacttgcgcgccgtatttgcgctccaatttgtgaatggcgtccaaacggtcgcctacgcgctccgccgctcgttcgtcataatccatgctttccagcatatcctggagctcatagccgatttcccgcgcgttaacggccatttcctcaattcggtcgcgcaattggccaaaccgctcgtcgatgcccgcaagttctcccagcgcagaggaggcgcgggaaagcaattcctgcgccgcgtgtgttttgccgccgcccagatatacaagcgcataggccgttttcacgccttcagcaattttttccgcgtgctgcatcaagcggtatttgcgcaacaaggcctcttcctcgcccggtttgggctttaccgcctcgatttccgcaatttgattggccaaggtatccagcctgcgagcgcgctcggaagcgtccaactccgtctgcgcgagcagcgcgcgcgcatcccgcagcgccgcatacgcctccgccacgcaccccatcagcgccgcgtgcgccgcatcgccaaattcatcgagaaattcccggtgccgctgcggattgagaagcgcctggtgctcgtgctggccatgcacgtccatgagcaacgcggtcagcctgcgcacttgcgaaagcggcagcatcatgcccgatatccggctgacgctcctgcccgagcgcgtcaattcgcgcgatacgccaatgagcccatcttccgcctccagccccaattctgccagcagagacagcgcggcagaatttcccgctacgtcaaacaacgcctgcacaacggctttgtctgtgcccgtgcgcacaatatcgcgctccgcgcgcccacccaacataaggtttacggaatctaccaggatggatttgcccgcgcctgtttcgcccgtgagcacattgaggcccggcgcaaattccacgcgcagttcgtcgatcaaagccacgtttttaattgacaattccagcagcattgcttttctccccagttttctcccgcgtgaattcaccttgccagccgccgaacgccatcgcgcctattttttggcggaaagcgagcgaaaccgtccaatgacggtatccacaatctcttcgctttgtagcaccaccaaaatggtgttatctcccgcgatacacccgatgatttccggccatttcaagctatcgatcgcctccgcggcggcattggccgaggcggacagcgttttgatcacaatcagatttttggccccggtgatggacaacaccgattccgaaaaaatgcggataaaccgctcgttcatgcccttttccgcccgttcagcggttgcgtatttatatcccccgttctccgccaacaccttgagcaggcgaagctccttaatatcccgcgataccgtggcttgcgtaacgttcacgccatggttcttcagttcttccgccagttcttcctgcgtttcgatgtcctttgattcgataatttccagaatcaaggcatgccgcatcgtcttcacatcgccgcccccctctataaaaactaccactccgagagcttttctctcaaaaggtgataaaaatttctctgattcaaccgaaggaattttgccgttttttccgcccgttctaccccgatttcgcgcacatggggccacattgcccgtccatcgcacaccgcctgcgcgctgccattttcgcccaccacccgtaggcaaatcctgtcttcttccgaaacgaccaccggcctggaagacatggtatgcgggcaaattggcgtgagcacaaaagccttcacgctgggcgcaatgatgggcccacccgccgaaagcgaatacgccgtggagcccgtaaccgtcgaggcgatgattccatcgcccgatacgcgcgccacaggatagccgttgacatccgcctcaatggtgagaatgcgcgcagatacaccggcgcgcacaatggcgatttcattgagcgcaaaggcggattcgccgctttctgcccgcgcgcgcatcaaagtacgctcttcaatctgccacttgcccgccatcaactgcgcaatgccatcctccatatgcgcgggttcaatttctgtcaaaaaccctacgcgccccaggttgattcccaagatcggctgctccgctggaagcgcaatatccagcgcggccaaaatggtgccatcgccgcccaaaacgcacaaaaaatcgcacgcagaaagcgccgcccgatcctccggtagcccgcgcacacagcgcacgccataggaaagaaaaatcccttccagcctgtccgccaccgcggcgcattccgccttcatgggattgatcagaattccaactgaatgccacatagcgcgcacccttcctaaaatagtatatcaaatcatagaatataaacaaggggcatttctgttatttaacgaatttgtcatgagctgcagaaatcacgttatatatttcttcttttgcaatctcacagtcatgatttcgacgcatttccaacaaaaactctatatttccttccgaccccgttatgggcgaataagagaatcctgtaacttgccattcgcaattgtggataaattccacaatatccatcacaaccgagcgatgaacgtcaatgtcccgcaccactcccttgggccctacgtcttcgcgtcgcgcctcaaactgcggcttgatcagcgccacgaaacgcgcctgggcctctagcaagggaaaacaggcaggcaaaatcttcttcagcgaaataaacgacacatctgtggcggcaaactccaatggccgctcaaacatatcgcgcgtcaaatagcgcgcgttctgccgctccataacgaccacgcgaggatccgaacgcaaacgataatccaactggttgtagcccacgtccaccgcgtacacgcatgccgcgcccgcgcgcagcatcacatccgtaaaaccgccggtcgacgcgcctacatccaggcaaactttatccttaagatcgatggaaaatacctccagcgcttttttcagtttttgggcgccgcggctaacatagggcgtgagctcgccgcgcacgcgaagcggcgcggcgggctttacgctttgcgagggcttttccacgcgctgctcccccgcaaacacgcgcccttccatcacgagcgcccgcgccagcgccagattttccgccagcccctcttccactaaccgttcatcgacgcgcattcttctttccacctcatataaatcgcgtgcgcaatggcccgcggcgtcaacccgagcatttccaactgctgcatcacgctggcctgcggaatgaacgcatccggcgcgcccagcgtcagcaccggcatttcccacttttccgcgcaaagcgcttccagcaccgctccgcccaagccgccagttgtggcgttatcttccaaagtgacgagcaagcgatgcgatgcggcaacctgcatgagcatctccctatccaagggcttgacaaaccgcgcgtctaccaccgtgcaagaaatccccctaccttccagcaaactggcggcttccagcgcgggttgcaccatccggcccattgccagaatcgccgcgtccgttccctgccggaggttctcccactcacccacttgcaaggcgggccggcccattccgcccgcaacgcattccttggagtagcgaatcgccatcggtccatccagcaccaatgaaaggtcgagcaggcggaaaagatcgcccgcgtcgcgcggggaagcgaccaccaactccggcatctggcgcaaatacgataggtcaaaaattccctggtgggtttctccatccgggccggtgagaccagcgcgatccaagagaaacacaactggcgcgcggttcaagcaggcgtccatcatgatttggtcgtatgcgcgctgcaaaaacgtggaatagatgcacacaaatggccgcatgcccgccagcgccatgcccgaagccatggtgaccgcgtgctcttcggcgatgcccacgtcaaaaaaccttttggggtatatcttggcaaaagcgctcatgcccgtgccatcgggcatggccgcggtgatcaccgcgatgcgcccatcggtttttgctctctcggccagatgttccgcggcaagcttgccgctcgacaccgttccgctggccggttccacataaaatggcgctacgccatgaaactgatccggccggtcttccgcgggaatatagccctttcccttttgcgtgacgacatggatgagtaccgggccttccgcctgcttggcgcgctcgaaggtttcgcgcatacgggcgatgtcgtgcccatcaatcggcccatagtactccagccccaacgcctcaaagaacttgccgttgatcagcgcggactttagcgcgtcgcgcagccattcgagcagccgcgccaaaggcgcgccaatcaggggaatgtgccgcaacgtatcccgcagcacgcgtttcatcgaacgatatacgccgctttgccgcaaatttgtgagatagccggatagagcgcccacattgggagaaatggacatcgtattgtcgttgagcaccacgatgagcggcacgcccgcgctgccagcgtcgttaagcgcttcgtagcacatgccgcccgtcaacgcgccatcgcccaccacggcgaccacgtgccgcttttcgccctgcatatggtaagcgcgcgccatacccagggcggcagaaatcgccgtagaggcgtgtcctgtgccaaaggcatcgtacttgctttcctgaatgcgcggaaagccgctgatgccatccttctggcgcaaagtggaaaactggcgataccgccctgtgagcaatttgtgcacataggcctggtggcccacgtcgaacaaaattttgtctttcggcgcttcaaaaacgcagtgcagcgcgatggtcaattccaccgcgcccaaattgctcgcaagatgcccgccctggctggaaaccacgcgaatcaatacttcgcggatttcatccgccagcgcggacaattcatcttccgtcagcgcccgcaaatccaggggcgaacgtaactcatccagcataccgctctcctcagtaaatcacgagaaacgccagcagaatgcccagtagcatccccataaacacttccaatggcgtatgccccagcaattccttcagcttttctcccgtgccggtaaaatcgccgctttcgatcaattcctccacaatgtggttgatctgcgtcgcctgtttgcccgccgcgcggcgcacgcctgccgcgtcggtcatcaccaccacggcgaccacaaaactgatggcgaattccgagctgttgaagccgttcaccagcccaatggacgcggatagcgcgctcacaatggcagaatgcgaactgggcatgccgcccaacgagaaaaacagttgataccgaaagcgcttttcccgtatcagggcgagcaacactttgatcgcctgcgccacaaaccaggcgagcacacccacccacataatccgattggcaaacagttcctcaaatacatacatagcgcgcctactttctgcgcacgagcatatccgccgccaactgaataaacggttccgccgcctcttgaaaatgcgcgatgtgcccaaccgcttcctcgcacagcgccttcatttgcgcgcgcgttccctccacgccaaagaggcgcaccgcagtaagcttgccttcatccgcgtccttgccgatgctcttgcccaattccgcaggggtggagaacacatccagcaaatcatcggcatactgaaacaacaggccaaaggcatgggcataacccgtcaaggcatccatagccgccgcgtccgcgccgcagaaccggcccgccccgcgcatcgcgcccaggaacatgccgcaagtcttgcccgtgtggatttgccgaagcgtttccgcttccacgttttcctggccttcgcaagccagatccagcgattgcccgcgcaccatgtattccacgcccgcgccccgcgcgatctcggccattgcggccacgcgccgctcaagcgagtgcggatgcgccagggcatccgccagcatgcgctcataggcgcaattcagcaagccatcgcccgcgagcacggcctgtccctcgccaaaaatcacgtggttggtcggcttgccacggcgcagcgtatcgttgtccatggcgggcaaatcgtcgtgaatcagcgaataggtatggatcatttccagtgcgcaggcgtattccaacgcgccgcgccagtcctcgcccatcatcgcgaccgccgcgagcagcatgcagggccgcagccgcttgccgcccgccagcaggctatagcgcatggccgcgctcagcggcggcatttcctcttccggcaaaatcgtgcgcaagcgcgcctcgaccgcctcccggtattgttccagcattggctttttcctcactgttccggccgcgcgatttcgctctcgccttccttggtgagcatggtgatgcgcgcttcgccctcatcgagcatggcctttaacttttggtacagttccgcgccgcgcttataggcttcaaaggaatcgttcagcgcaagctgaccgccttccaatgcccgtacggtcgcttccagctcagccattccctgttcaaacgtccactcttccataatacacactccatctatggggcgcaatccgcctgcgtttcttccggtttttcctccaccgcgtccacgtgcgcgcgcaagcggccatcgtgcaaaagaaccgcgatgccttcgccttcgcgcaggctttttgcctccgttaccaaggcgccatcctctttttccaccacggcaaatccgcgccgcagcacgctcatgggattgagcgcgtccagcgagcgcttggctagcgcaagtgtacgctgcgccgcgtttaagcgttgttgcatggctgcctgttcgcgctgccatagggtctccagctggtttttgcggccctcaaggatcagcttgcccggcatcgtgagcgcggcggacgcgcccagcgccaaaagccgcgcccgcgacagtgccaaccgcgcttttagcccgctggcgagccgctcgcccagcgcgtccaccgcgcgcaccagctcggcatacacgggaaccgccaattccgccgcattggacggcgtggccgcacgcgcatcggcggaaaaatccgcaatcgtaaaatcgatctcgtgccccacgcaggaaatcacgggaatggctgaagcgcgaatggcccgcgcgaccacttcttcgttgaaggcccacaaatcttctatcgagccgccgccgcgccccacgagcaacacgtccacgccgccgcgcgcgttgaggcgcgcgatggcgcgggcgatgtcctccgccgcgccatcgccctgcacggcgcagggcgaaagcacgatgccgacgtgcggattgcgcgcctggcacacgcgcacaatatcccagaatgccgcgccgcccggcgcagtcactacgccaatggcgcgaggaaatgcgggcaaaggacgcttaagcgccggatcaaataggccctcgtcggccaatttctttttcctgcgctcgaattcgcggtagagatctcccgcgcccgcttcccgcatggattccacataaagctgatatgcgccatcgcgcacgaagagcgaagcgctgcccgtggcaacgaccttcatcccctctttgggagaaaaatccaaggaaagcgcgttctggcgaaacatcacgcattgcacgcgggctttatcatctttcaaggtgaaatatttgtggccgctcacatggtgcttaaagccggaaatttccccttctacccgcacgctgcgcaacatgggatcgcccgccaattggcggcgcacgtattcattcagttggctaacagagagcgtccattcagccacgcttggccgcctccagcgtgtttttgagcagcatggcgatggtcatgggccccacgccgccgggcacgggcgtgatccaacccgccacctggctcgccgcctcgtaatccacatcgcccgtgatgctgccgtcttccaggcggttgatgcccacgtcgatcaccgccgcgccgggcttgatccaatcgcctttgataaagcgcggtttgccaatggccgccaccaggatatccgccgtgcggcaaatctccggcaaattcttcgtgcgggagtggcacaccgtcaccgtgcaattttcgcgcaagagcaacagcgccatgggcttgcccacgatgttcgagcgccccaccacaaccgcgtgcgcgccttccatgggcacgttcgaacgcttgagcaattccaggcacccttgcggcgtgcaggccacaggcgccttctgccccagcagcaatttgcccgcactcaccggcaaaaagccatccgcgtccttggccggatcgatggcggagaggatttcctgctcgtccaaatgcttgggcaaggggagttgcacgagaatgccgtggatttgcggatccgcgttctgttcgcgaatgcaagcgagcaattcctcccgcgccgtttcggcgggcaatttgatcgtgcgggaataaaaacccgcgtccttgcacgcgcgcgccttgttgcgcacataaatcgccgatgcgggatcgtcgcccaccaaaatcacgcacagtccgggcacaatgcccaggcgctgcgcctcttcccgcagttccgcgcggatctccttggccgtctgcttgccatcgatgaccatcgtcattgcacatcctcccttgtaagcctatcataccctatcaaagccacgcccacggcgttgtcgccggaatattccggcttgccccagcagagcgccactttcaaaccatttcgcttgaggcgcgcgggcaacagttcgcgcaaaagcgcgctggaagccacgccaccgcccaacaatacctgttttgctcccgtttcccgcacggcaatttctatgagtttcgccaccgcgcgagaaagataggaatacacttccgccgccacatccgccccaggaacgcccgcggcgatcatgcgcatcgcctgcgcttccgcgccggaaaggctcacctggttatcccggtgcgaaagcggcatcgcgccctttgcgctcccctgccgtgcaagcgcttccagcgccgggcccgcggggaacgacaggcccagagccacgcccacccggtcgaccaactggcccgcgtgcaaatccgcggacatggcgatcagccgcgttttaagcccttgccccacgaacacggcttccgtcgtgccgccggagaggtgcagcgccacaaattccgcttccccgcatccgctatccaccagggcggcgcgaatatgcccttgctggtggctggtttccaccagcggcacgccctgcgcggcggcgatggcgcgcgcagcgcattcgcctgccttaaaaacgggcatgtatgaaccctccgcgtcccgcggccgcgtgctcacgcaaacgccgtccacacatcccggagaatgcgcaaacagcgcctccagcaattccggcaggcgctccacatgctgaaacagggcgctggactggcgcagcccgcgttcgccctgggcgacgctgagcaggcggcgttcctgcgcgatgcgcccatcctccaccagcgccacggacgtcgtgtagcaactggtatcaatgcccaatacgcgcatacgctattgcctcgcgcggcggatgctgcccagcacgccgttgataaacgcgggggaacgctctgtggaatactgcttggatagctccaccgcctcgttcaccaccacgggctccggcacttgcccggccaggatctcaaacaccgccacccgcaaaatcgccagatccacgcggttcatgcgttccagcgaccagccatgggcaaattgggcaatccattcatcgatttcggcctggcgcgcctttacgccctccacaacctcatcgacataatcgatttccgcatcgtccttgggaatttccagcaaaccaaaaaccgtatcttcgccgccattgccccccatctcccattcgaaaacgagcttcatggcggcggcgcgcgccgctgttctgtccatcggacagcctccttatatccttcgtaattacgcggatttgccgcgccgggaaagcaatttgccaatggcgtgcagcaagagattgggaatgtagcaacctccgccaatccaccatcccagcgccgcgcaggccgcgatgagcgccgtgcgccaaaatccaatgaacaatatgagtacgcccgcacccgcgcccaacagcatgcccgctatacggcggatgcccagcgcgttcaggcgaacttcgcgctcattctcccgcgtttccatcgtcttttatccctttctgctcctgcgcgtccggggtttcctccgcttcctgcgcgccatccgcttccgtttcggcctcagcctcggcgacggcaaaatcttccatcacgcgctggaaaccatcgtcctcttccgcggcctgcaccgcttcacccgtatcctgcgcactgttggactcttcgcgcatggccggttccggcgcgtaataaatctcttcttccggctttgcgtcctgcacgggcacaggcgcggaaacgaacagatccggcgcggccacgatgtccgtcacgatcaccttcacatcccgcacggcaatgcccgaatgcgtctcgatatgggtgcggatggcacgctgcatttcggcggtggcgttgggaatgttccggtcgcccatgatggtcatcttgagcttgagggaaatggaatccgcatgctcgatcacgcgcacatccttgcaggttaccccgtccatattggccacggctttgctggccaggctgtgcagcgcggccaccgacacgagcacctcgccgctatcggaatgctgcacggaaacaaagcccgtgtgccgcgagcgctcccgcttcacatggataaataccacgtatagcgcccaaaccgcgcccacggcgtatataacgacgtgcagcagcagcgtccagtcgtaggcataatcaaacagcatcccgcgcaaaaacgcttccacgttttcgctccacacgctcaccagcatcagcgcaaaagcggcgaatgccaccagtgccaaaagcgccgtgagcaggcgctcataccaacgcggcctcatagcgcatccccctctttgggctccgcgccatcctcctccacttccacctcaatttcctcatcccccgccggttccggcgcatcggggaattcctcggcgatttccatttccgcctcttccgtttccggttccacttggctttccgcctgggcgcgcgcgtccgtttcttcggcgttgcgctgctcctccagcatgcgctgctggcgcgcttccagttccagcgcggccttgttctctttctcaaaactcacgcccagcacatgcacatccacgctttgcacatccaggccgctcatggtttcgatggcctttttcacattttcctgaattccctgcgccacatccggcacgggattgccatattccacaatgatggaaacgtccaccagcacgcggttgttctcaatggcgattttcacgcccttggtgaaattctgggtcctgcgggtaaaaatgtccgcgatcgtgctattgcccgtggtcatgctggcaacgccctcgacctcggtcgcggcaaggttggccattttggccacaacatccgtagcgaaagtgaccgtaccattgggattgtcgttccactgaacgctcgatggcgtattttcattcatgccatatgcacctccgtttcatctttctctattataccagaatttgcgccgcgaatcaaaccggctagggtgaatttaacggaatgattttaatgtttcctccgagcaggccagtttctcgcgtaaccaattccaaaatcgcgttggcgtcctcttgggaaagcgcgctggtctccacgagcacattggcggaatcctcatgcaccgtcgccaccgcctgcgcgaatccccgcgcgcgcaaaacgccctcaatggtggtttcctgctccatccaatccagcagttccagcatgcgccgctgcgcggaagcgcggacatcttcctgggtgcgttcgtcgtccacaatggcctggagctgctccatctgcgtttcccgcatcagcgcgcgttccacgaggaattcctccatgctcgcctgggccgatacgggcatggacgcttccgcctgtacctgcgcttgcgcctggctcggctccggcgcgagcgtttcccgagccatcaacatgcccgccgcgcccaacgcgagcaccgcaaatgccgcgcccagcggcgcatagcgccaaatctgccgggtgatattcgccattttcactcctccgcttccattttcagcacttccacattttgaagctccacctgcaaaatcgcatgtgccgcctgcgcgagttccagctgcacgcgtaaatcatccgcaccctgcgccacgatcaaaacgccccgtaccgtgccgctcgcgtcctcgtttaccagcacacgcacttctcccgcgccgctcacggcggaaagcgtgctctccagccgctcttccaacggcgtgagcaaagcgctctcttccgttccgccactgcgcaacagcagcaaaagcgccagcaccgcgcaaatggccagcagcatccattccagcccacgcgcgccgcgaaacagttccgatagcctcattttcccaaccaagcggccagcgcgtccaccattgcccctgccgccagcaggcccgctatcgcgcccaatcccttttccgcgcgcccgggccgcaaaaaatgttcgcaaacggatgctatcgccgcgatcaccaccaaccgcgcggcaaaggtctgcaacactgccatagccgttccccgcttccattcttcatcgcaccgcgccgccagaagccagcgtcgcgccaatgagcaccatagccatcacgcatgacgcaaccaccacgaccagcagcatggaaagcacatcgccaaaccggtcgatgagccgcgcaaccgggccgtcctccaccggttctatcatggcggccgccaggcggctggccaaaagcggcgccaaaatggctagcagcggccgcacgcacaccaggagcaaaaggcacaatcccgtcaccccagcggcgtttttcaccaactgcgcgctgccaatgagcgcgtccatggtatcggccacatcgccgcccaccacgggcattaggttgtccacggcatattgcgccgtgcgcaccgccgcggaatcatatcccgcgcccagcagcccctgtacgctcaccaccgccaaaaaggccgtcagccaagcgcccatcagccagttgcacagcgtgcgcaaaagcttgaagagctttgtgagccggatgcgctcgctcagttcccccgccgcagccacgcccgccgcgcacgcacacagggccagtccaccgctgccggccatcgtgccaatcgcgccgcctgccagcgccgccatgggcgaaagcagagccgccgtagcgccgccgcccgcggcgctcaagagcgcaatcagcaacggcgaaaccgcctgagcgcattgcgacagcaacgaaaccgcccgctccgcctgggaaaacgcgctggcaaacgccgccagcatcgcgcctgccgccgccagcacgctgatccattcgattacgccgccattttgcggggcgaattgcttcgccagcgcgcacaccagcgcaggcgcggcgaacaatatgatcagcgatgcactttcgcgcaattgcgcgcgcaacgcttcccccagcgccgccaaagcgccctgcacatcccagccatcctgcgcgctcacgagcgagagcaacgtttcccgcacgtcgatttccagcccggccgcatcggcgtaggcctgccattcgctcacgtccagtccgcccgcgatccgctccgcttcctcctccgccatgcccgtggggagccaaaggcacagcagcgccgcgcacaacaaaatcacacgcttcatagcaaagagagcacgcgctgcaccacatgcagcaacagcggggcggccatggccaccagcgccagccgcgcggccacctcaatgcgcacggcaagcgccacttccccggaatcccggcaaatcgccgccccaaattcggccagcagcgaaagccccgccgcgcgcaaaaggagcgatagcccttcgggcgcaaattccgcgcgggcagcaagatcgccaacgagcccggcagccgtgcgaatatcctccaaagatagcaatagcgccgccacgcccgccgctacggataccgccacggccatttccggccggtttgcgcgcagcgcgacacatacgaacgacaccgctaccagcagtaccacaatccgcaccgccgccatgtcaatacaactggaaaatcgccttcacatcctggaaaaatccggcgatcaggttcacaaccatgatgagcacaatcacaagtccagcgagcgaggtgagcgtggcgatgtcctcgcgccccgcgcgccccagcacctgcgcgagcacagaaaccagaatgccgatccccgcgattttgaaaatcaaatccacttccattggcttccgcccctttccgccgcattcaaaccgccagaatggccagcgccgcgcccagcaaagcgccaagcgaggtatataaccgggtgcgctcggcgcacgacttgtccgcctgcgcgcttagcgcgccgagttcttccgccgttcgcgcgaaaagcgcttcctgctcgcgcgcgccgctctcccccaattgcgcaaaaaacgcgcgcagcgcggcgcaatcctcccgcgcaaggctatccagcagaccgccccgcttcgtttgccggatgcgcaccgcatcccaggcttccagcgccgttttgccgggcatcgcctcgcccaccaggcgcagcagcgcgtcctcgctctcgcacagcgctgcttccagaggaagcctgcggtgcagcatgcggattttgagcggttccagcgcggccaacgcacttgaaagcacgcgctttctgcgcgcaagcgcggcggctgccgtcctgcccgccagcgcgcacagcgccgccaaaatccccgccaacacaatcctcacaggcatggcctcctcaaagcgccaggatttcccggatgtgacccgcacgaccgcccatcaccaccgcgtgggcaaacgcgccgccgcgcaacatgcgcgcgatggctggccgccgccgcgcgtctgccaaatcgcccgcatgcgcgctcgccaccagcttcacgccgcagcgcgccgcgtcgagcagtgcccgcgcatcttcctcactgcccacttcgtcggtcaccagggcttccggagccatggaacgcaagagccgcgcgatggcttccaccttatggcatccgtccatcacatccacccgctcgcccaggtcaaagcccggcacgccatggcggcaggcggcaatttcactgcgctcgtctgcgatggcgacgtttagccccgccgcgctcatccaccgcgctgcgtcgcgcaagagggtcgtcttccccaggcccggcggcgaaagcaccagcaccccacccgtctcgcgccccagtaacgcgcggatcggctccgcgcagccgcgaacctcgcgcgcaatccgcaggcacagggaaccaatgtatacaagagcttcgatttggccatcgcgcaccgcatatcgcccgcacacgcccacccggctgccatcttccagcgtgaaaaagccctcgcacagttcgctttcccaggcgtacagcgaatgctccagcagacggctcaccaaccgggccagctcgtcctgtgtgaacgtttcatccagcatttcctcccgatccagatagcgcaacgcaatgcgcttgcccgcgcgaatgcgcacttccagaagcgtttgcggggtttccacgcgcaccgggcgcggaagcaccgaaagaaagtcctcaagcacgcgcgccacctcccgctaccatcttgctcgcttctcattatatgagcgaaaaggacaaaatagggcgcgcggccggattttttcctccggcccgcgcgcctttccaggcagggcaaaaaagagccgcaaacgggctttaccagctcgttcgcggcttctgatcgttgacaaaccttcggtttgtcaacgaggattacccggccgcttgtctacgcaccgctctgcgctaacgcttgcgcggtgttccgtggctgcgcactgcgcttcgctccgtgtgctcgccacttcagcccttcgggcctccgacggccagcgaccgggacgggaatgcatttttaccgcaaacgcaagcgtttgctctgcaaaaaatgccagaaatgacgtacacgccgtcatttctgattaaaacctcgttctttcgatactttgtcaatgctctgagccgcgaacgggctttatcagcaccattcgcggctctggaggggtttattctgtgggtggattgcagcgcggacagggttcataatcgaaccgcagcgcccaatcgagcgtcacgcgctggctattgtccgagctcatgcccgcgtcggaacaactgctccggcggtggtaatagccgttgtgggcgatggtttccgtggcgatgtacacatacgtagtgccatcgccgccgctactgcccccgtttccatcatttccacccagttccgtgggcggattgcacaccgagcacggctcaaagcggtctatggcttcggaaagcgaccaacggcgcgtggacgaagccaccgctccgcaggaagaacgcgcgtgatacacgccctccatgtccagatacacgtattcatcgttctcccccgtggaaggcgcgggcgtaacggacggattgttggccgccaggatgcaatccgggcaaggctttttgccattggccagcgcgcggaagagggacacattgtagcaattgttggcgcgcgagcaattgcgatccgtgtggaagtatggctcgtcggaacgggcgtacacattgtccgtcgtcttcacgccaatgcacagcgggcagggcgactggtcgcgcgaattgatcacgctgggcgtcgccgcggaaaggttgcccgtggcattttggcaattctcatccacgtggaaataccggtcgctcttggaagaataccagcgcacgctttcgggcgaatacacatcctccacgttgggattgtaggtcgctccggccgaaggcgaaggaaccgtcgcgcccgaaatgcacatcgggcagggcgccatattctgctccaggcagaatttcgccgtgaccatcaccgagttcctgctgctcccaaattgcgggcaatccttgcgaatgtggtaatactgttctcccttcgtggccaacaccacgctgctattgtcgtgcagcaccgtgctggggttggtttccaccgtcacgttcgaaaaatcgatttccacgcagtacgggcatggatccctgttgtagagatagcgcgcttcttccgcagtgaacgatttggcgttcttcatgccctggcaattgctctgcgtgtggaaccattcgcccgtttccgtcatatacacccggtcggtcagcgaagtgatggtgctcttcacgacgccgcccgcgcatatcgggcaaagggtgtgggggttggtcttgttgagttccgtcgcctcggccctggtgtacagccgcgcgccagtcatgccgtcgcaattcgggttggtgtggaaatgttttccacccggcgtggcccacaggcccacgcaattggggcagggatccttgccggaggacatggtttccgtgtaggaatgcgcgggcgcttcgcttatgcggccatcgcaggtgctgttcagatgatagtattggccatcatcgtggtaatagtaaaccgtg

SEQ ID NO: 1014 - DNA, 23511 bp, Unknown
  16S sequences of unknown bacteria
ttcatatccaacctccttagtaatatatgttattaaaattgttccacagcaggaggaaaaatatacttttttctttttgaaacggcaatgcaaataaaaatacagagcgtgtattgagctctgtatttaacgctattttttattcttaacagctgccatagcagatgaatatgcaaactgaagattaaatcctcccgtatcgccgtcaatgtcaagcacctcaccgataaagaacagattgctgtgcttttttgattccatattccggagattaacctcatcaagagatacgccgcctgcggtaaccatagcttcactgaagcttcctgtgccgcttactgcatatctgtggcaggtgagagcctctgctatttttgttatctcatcgccctcagtgcaggaggttttcatatacgggcatatcccggcattttctatgagctttactgcaaatgcgtcagggattttgaatatgcgggatatatatgtatgaagctctctgctgttgccctgaaagtctgctttaatcatatccgctgccctctgaccggtaaccggatatatatagtttatttcaagcttgtgacccttgtccgcatatcgtgatatatcaagtatcgcaggacccgaaaaggctctgtgggtaagaagtatgtcgcctgtctgcgcggcgatttcacgattgttttcaagaagccttaccaaaacagccttgaacgaaatgcctgaaaggttcctgtagccgtagctgtgggtataaatcggaacgagagcaggtcttgcaggcatcatttgtattcccagtttctctatgagagggtacagggagccgtctgagcctgttttgggataggacatacctcctgcagctataaccagcttttttgtcttaaatgagctgttttcggttttaacgatatatgtaccgtcgctgtcgtcactgctgatatccgttatatgctcctttagaagcagtgggaagccgtttgcctcggatttttttatcagcatattgagaatttcagaagccttgaggctttcggggaatatcttgccgtcatctcttgtaacggtcttaataccgtttttattaagaaactctacaagggataggttgtttgcgccgtaaagcgcgcttctgatatatctgccgttttgaccgtatcttgttatgaagtccttgatagagccgtcgtgggtgatattacattgtccgctacctgaaatcagcagctttaatccgggtctttcactgtggtctataatcagggagtctgtgccgggttctgacagggcgccgtaaaaaagccccgctgcgcctgctccgattactatggtatcatacagcttcattttcaagctcctccagtacaggcagtatttcttcgagagggaaaccgataacgttgttaagtgagccttcatagcgttctacaaatctgccgaaatagccctgaattgcatatgcgccggccttgtcgtaaggctcatcggttttgagataatctgcaatatcatctgccgtatattccctgaaatatacttttgtgatgctgctgaatacggttcttgcagtagtgcctgcctttataacggcaacgcctgttacaacatagtgtgccttgcctgaaaggttcatcaggatttccagggcatctgctttgttttcgggcttgccgattattttatcgttatatacgatagtatctgccgccagtatgtatggatttttttctttgagctctgcgcttagattttcttctacgctcagagcttttttgagcgcgagaaacatgcaggtttctgttttgccgccgtataccggagcattttcttctatgtcggcaggaataacgatgggatttatgttattggctttcatcatttcaattcttctcggagatgatgacgcaagtattatattatctttgtacatttgatacctcgctttttcagtttcccttttagtatagcataatattgccgcaagctgtaaataatatgtgtaaatgaatgaggagattttgtatggaaaacaggaaaccggagaaaaaagatgtcgccaaggcgtatgaaaagtatgcgactaaatttacgccaaagcctaaatattttaccaactgcctcaaggcttttgtcgtgggaggccttatatgcgcagcagcggcgtttgtgcagaacaagataactgcggcaggtatgaacgaggaggatgccggaatttttgtaacgataattctgatatgccttgcccagcttttgacgggaataggggtgtttgataccataggcaagtttgcgggagcaggggttatagtgccgattacgggatttgccaattctatggtatctcctgcgcttgagtacaaaaaagagggtgttgtactgggcgtcggagcaaagctgttttctcttgcggggcctgtgctggtatgcggtatttccacagctacaataataggcatcatatactggctgattgaggtggttttatgaaaaacagaataggaagacagagcctgcttttccgaaacagacccgttatatcgggggcatattcgattgcaggtaaaaaagagggagaggggcctttgaataaggactttgactttatacttccaaaggacgattacggtgaaaaaacgtgggaaaaggcggagagcaaaatgctcaaaaaagccatagaggaggctatcgtcaaatccggtcacagaaaaaacgagatagatgccgtattaagcggcgacctgcttaatcagcttatgtcgtcatcgtttatggcaagggatctgcacataccgttcctggggctttacggagcctgctcgacaatggcggagtcgctgcttcttggcagcgtgctggtcgacggaggctatgcttcaaacgtgacggcaggagtatcaagtcactactgtacggcggaaagacagtttcgtatgcctcttgagcacggaaatcaaagaccgccgtctgcccagtggaccgcaacagcggcgggggctatggtggtttccgaaaaggacagccagcaggagcagtttattgatgaaagcggcagccttgtcaatatgaagaatatatgtatagaaagcggcactatcggcaaaatcatagatacgggcatcaaggactcaaatcagatgggagctgcaatggctcctgcggcagtggatacgatattgagtcatcttgaggatacgggcaggactcttgactattacgatctggtgcttacgggcgaccttgggtttatagggaaagatatagcaaaagacttgctctgtgatgcgggaatatcgataaatgagattgacaacagatataatgactgcggcgctatgatttttgaaaaggagcaggatgtgcatgcgggaggaagcggatgcggctgctcggcctgtgtctacgcggggtatgtgtataacaggctgaggcgaaacgaactcaaaagggccctgcttatatcaacaggcgctcttttatcaactataagtcccatgcagggagagtcaattcccggaattgctcactgcgtatctctggaggtggaataatgacatatttgtatgcgtttctggcaggagggggcatctgcgtcataggtcagcttctgcttgatatgacaaagcttacagcccctaaggtcctcgttatattcgtagttgcaggagctgtgcttcaggggcttaatctttatgagccttttgccgagcttgcaaaaaacggagcgacagtgccgcttccgggctttggatattctcttgcaaagggcgctatggagggcgctcagaggggatttttgggcgctctgacaggggctgtcgaaaacactgcggcaggaatagcaaccgccatagtgttcggatatatagtttcccttatttttaatcctaaatctatacgatagtgttggaattttgcacagttactggtacaatatctgtatcatagatatgagagacaatatgaagtgacctccagtttgtagcaacgtggatttacccatatactgaagttgctagaaacaactcagaagcggggattaccgcatacaaaaggaggccactatgaatactatagtttatgttgggatggatgtccacaaagaaagttatacgctgtgctgttatagctatgaccgggacaaggtggaattcaagcagacgattccatcagattacagattggttctaaagtatatggaacgagtacgtgagcaatatgaaggcgaggtaaaattcgtttgcggatatgaagctggttgtcttggatactcgctttaccatcagctcactgatcatgctgtagattgcaagatcctagcgccaacaacgatggcgattacaaacaccaatcgcgtcaagacggacagaagagatgcagggaacatagcaagatgccttgcattccatacttacagcgaggtatatgtacctgacgatgaagataatgccgttaaggaatatatccgcatgagggatgaccagaagttgatgctgaaaaagatcaagcaacagatattggcattcgtactcagaaaagggaagcgatttgaaggcggcaagacatattggacaatcacacaccttaaatggcttaaaaatcttgaactggaaggattggacaaagagacgctgtcagaatatatgatcacatatgaatatctgacggataagattcagagaatggatgaaaggatccagtcactggctgaaggcgagagatattgcgagcaagtacagaatatgagctgtctgctcgggataaaaacacatactgcgctttcattgcttgtcgagataggagactttgacagatttgagaaagcaagcagattttcggcattccttggacttgtccctggagaggacacaacatctgacaatgtaaagcgcttgaacataacgaaagccggtaacagccacttaaggcgattgctggtcgaggcagctcaaagctatacgagaggggctatcggacacaaatcgcaagacttaaaaaagcgacaaagtaaatgctcacctgaagtaatcgcatatgcagataaagcaaatgagcgcctcaggagaaagttctacagaatgacattacaaaagaacataaacagaaacgttgcagctacagcagttgcaagagaacttgcatgtttcatatgggggatgaacaccggaaacatagcataagaaaaagtttgggtacagaggcagagtcttggagcactctaaggtccgaattatttgcgattcacctctgttgacattatatgttttatattttgattcacgctaggagacggcaaaattcacggcggaccattgacctgttggtaaccaatccacgaataacagagtggccaaggccggggactgttagatctgaggctctgcctctgtacccagcgttaaaactgaagaaaggagaaggttgtggtgatctcataaaaactgcttgacaggaggtcacttcataacaggtgagtatatgtgcggatacagcatagatgatattatcgaaaaggaatatacgggagagctgccgttttcggctgtgtttttcagactgtatgacagaaaaatagcgtcgggagagattacattttcttctctcaaaatgagcaaggccgaatttacggcaatgtgtatgaacggcgaatatgtgccggagattgaaaatattctggagctttgcggcaggatgctgcttgaaaaagacgaagcggagcttttgctgaatgcggcaggttatgaattcagataagtaaaccccctcaaatcgagggggctttgtattactgtccagttggctgatcgggattttccggttcaatcggatcctcaggttcctctgccggttcatccggaacgtcaggttcctggttgtcataggaaggatcggttttgtatttattcgggttggaattatggagatggcagtaatacttaggaagcttgttttcaagagccttttcggcatctttagttcctgcgcttacactgaatttcttttcctttacatcagggcagtcaggtgtagcaagttctcctgtttctgcgcaaatctcaacgctttttgaaagactaggtattgaaatctttgactgtgtacccgaaatgaaatattcaccgttgtatctgattacatttgacggagcagatttaaagcttgccgcaggcagctttgcacaaatctgtttcattatctttgaccaaagtctcgcagatgccgtagatccctctgtaagctgtatgttcacgtcgttacctatccaaagcgatgctgagtactgaggtgtaaatccgcagaaccatgcgtcaactttgtcatctgtagtacctgttttaccggcaacaggctgaacgcctattgcggcagcattggcaataccgtttgtaactgtggttctaagtatatcgtccattatccacgcaacacccggatcaagcacttcgtgcgattcctgagtgctctttaagattacatctccgtttctgtcagtaacctttgtataagcaacgggctcggtgtaggttcccaggttggcaagcgctgtatatgctcctgccatttcgacaggggagataccttttgtcatacctccgagagccagtgccgcagcgttcatatcgtttacatcgcctgtttcaacaacagaggttataccgaatttcttaagctgctctgccgcatattcagggcctacttctacgaataccttgactgcgcatacgttgattgactgctgtacggcttctctcattgtaacaaagcccttgtaaccgctgtagaagttcttaggccatacctgaccgtttacagtcatttttgcatcgtttatgacgctggcagcagaccagtaggagccgtatgtgcctgatgcgttttcaccgtaattgtcatatgcatatgtgaagctctgcttcttgcctgacttggcagcttccataccctgctggagagctgaggagtaaactgccagaggtttgattgatgaacccggctgacgagtgcttatggctctgttgtagagcagccttccggaagcgcctctgccgcctatcatagctttaatctgagctgtttcattatctatgattaccatagcgctctgtggctggttaatcttctgtctaagtgtatagtttgaagattttataaccagatttgagcctgatttgatgaagaaatcagaagctttcttttgcttgaagaaatccgcacttataatcatattgccttttttgctaagtgatttgtacttggcatcaatggaaatcacgccgccctctattgaatagaagaagccgttttcccttgtgtacatattcttgaattcaatattgtagtctgtcttgccatcgacttccgtcttatagaatgcaagacgtttgtttttcttaatcagaagtgatccgtcttttctccatttgaattctgacggatagagggtgaaatcaccgtcgctgttaaaatagctgctgtagttgtaaagcagtattccgccgcctgtaccgagaatattgccgtttccgtcagttctgagatttgcggtgcccgggaagttgcttgtgtctgcgtattctttctctacaatttcctgtgcatctgaacttaaggttgtataaatctcaagtcctccgttgtagacataatctcttgcctgctgttcactcattccgttgttttcctgaagatctgccacgacctcatctataacgtagtctgtgaaatatgaggcgaatgaacttgatgaagaattgctcagcttcatatgttttttgagacttgcggaaagagctttatctttttcttctgatgtgatatatccctgctcgcacataaattcaaggactgtatctcttctttttttggaggccttgccgttgtagtagtaaatccagtcgttgtcctgctccaatatgttcttgtcatcggaatttacagaacccttttcaactctgagcaccagagcgttggtggtaggggactgcggcagtgctgcaagcgctgcacattcaagcaggtcgaggtcttcaacgtccttggagaaatatgcgttggccgcggactgtatgccgtatgtgccgtagccgagattgattgtattaagatacgcttcgataatctgctccttggagagcttgttttcaagacatatcgtatagtatgcctctttgatttttcgcgcgtaggttctttcgttgtcaaggtatatattccttgcaagctgctgagtaagcgtacttgtgccgcttatctgctcgctgctgaatatgctgtccttgatagcgccgagtattcttatgaagttaaagccgtgatgcttccagaaagtcttgtcctcaatggaaacaatggcatttatcatattttcaggaatctgggtatattcaacatttgttctgttgccgtcatctcccgaatatatgctgtatagctgatttccatcatcatcatacaggatagagctttcgtttaagaaagaatatatgttgtcgggatctatcttcggtgccttggctatgacaaccgcagcgtatacggctgcaaccagtactgccgcaaggattgcaagaagcagtattctgattatacgttttgcccgtgacggttttttgccggaggatttctttttacctcttctgccggcagttttactgtttgcggaagtttccgaagcagtatctttatcataaaaagcagcggttcttcccttgcttttttttcttgatttcttcacaggtctttgtggtatgtgttcgttgttgtagttatctgacaaaactccaccgcctttcaagttacaaaaatatagtatattttatcatatttaagggcagatttaaaggtttttcttgtaaactgcaaaaaaccactgacaaaacagcattgaaatgttaatgattttaccttgcaatattggtatatagggcaggtaaacagccggataaaggcaggtataagtttgcttgattaaagtacaaagaagctgttttaattccctgctcaggcgtatttctgccatctgatacaaaaaacgaccacttaaccgaaacagcttgaaacaaagttttccatatgctaatgtttaaaaaacagaactagttatataagggagaaattacagatgtttaagtatatgaaagatgaagaatgggatattctaattcctgttatattaatactgattatatgtgtatttgttcttaatcattatgcggaagaaaacgcggcagagaaaacatctccagatgtaggcgttatgctctctgacagagagtttggtatagctccgtatattatgggctgtgactggatagatgagaaagacggacatagagaaaaagtaccgtatgatgtaagcagtaaatatcttatggaagttgaaataggagaaatgcaaaggttgttaccgataatgaaccgtttacaagcatacggataaaagtttttcctgaagaataccgcaatgattattcaaaggggatattgatttcagagagcagggagtttatatgcagtcccggctgtacatatgcaatagaagtggaattcggaaaaaataaaagaatgtatgcttttaaatgtgtttaggatatacttgctgatagaaagaggtacttggaaatgaccggtaaacgagtattgggatttataataaccatatgttgtattatgacaatagtatcaatttttatttcaattaaatccttattattatcagtatcaataggcttattgctatttttgggatatgttgcgaaatttacaaagtttaaaggcaataatagcaaaacagtgagagtttgtttcgggattatgggaggtatactcgggattgtgataggaatgattgtaacatcattttattgaatatggattgctaaataaggtataaaataaatataacaggagtgcgcaatgaaaatagttatatgtgatgacagagaatttgaacttgagattttaaagaagctgtgtgaggaatacgcaagtgagaatcttcctcaagcagagatagtgtgtaccaccagtcccgcaaagatagaggcagagcagcctgacatactcatacttgatatagagatgccgcaaaaaagcggcatagagattaagaacgagcttacaaagggtgacaagccgctgattatctttgcaacggcatattttgagtttatgaaagaggcctttggcaaaaacgtcataggatatatgcaaaagcctgtaaggaaatatgaattttatgactatatggacgccgctttagatattctttcttttgaaacaatgatacatatagacagtgaaaccgaagtgaaaagcaatgacatacttatgataaacgccgataacagctatacggaaatcgaacttataaccggggataaaaagcgaaacataagaaaaagcctgaaagcgtgggaagaagaactcaggcagtatggatttatgaggataaatgacgcctgcattataaactgtaaatatgtgaaaggcattgagggtgataatgcggtgattaaggatatagatgtaaaggttagaataagcagaagaaaaaaggccgaatgtattaagtttttcagggcttatcgtgccaaatcttcaaaatatatttagagaggtgataaaatggctcaatacatattcggaataataattcttatactgcttttcagggaagtgctggggtacaaagaacttgaaaaaggaatatttgtagcaacaggcatagtgatagctgtagccgggggagctgtagaggcgtgttttaatttccttgacctgaatatatggctgcaaagatttttattgatattaccgtcaattataccacttttcatatttaaaggcagaaaaggcgttatatttggaataagtttctgcacaatatgtttgttaggagaaataacattaattgtttttggggcagaaatgcttataacagagggaaatttaacaaatatcaacagttacataattgcaggaattatatgtattgtcgggttgcttcttttaaggtgttatatcaggtcagaaaatataattctgtatgctaagttgaataatattaactgccttttgtttataccggtggtaattattatatatataacacggcagggagctatgtacgttggcagagtatctaatgaagaggctgctgtaattaatggtattaatatcacaaagggctctgttttaggcatgcttgcagttgcgctgtttatgatgctagttgtgcttgtttatcagaaaaaagaaatgaagcgtcttattgtgttaaaggataagtgcataggggaacagacagagcaatataaaacagctatgaacaaggaaaaagagcttcgcaggttcagacacgactataatgctcatatgacagctatttcaggtctgcttgcaaatgaagaatatgataagctgaaagaatacattaaaagtatgggatattttaaagagaaattcaatcttgtcaattcaggtaacataataactgatgcagtgtttaatcagtacaaggaactttgtgataaggacaatattgaatttgaaatctcaggcaaactgcctgaaaacttcggtatggcagaaacagatttatgtgtgctgttttcaaacctgatgtccaatgcctacgaagctgctgtacagtgtgataagaccagcagcataatcaggacacagatacgcaataatggtgatgatgtatttattaaaatgtcaaactcggttaatggagaggtagtatttaaaaacggcttgcctgtaacggataaacaggacaggaaaaatcacggtttcggtgttgagaatattcttgaggtagtagaaagaaacggagggtatgttgaatggaaacagcttgataaaggtaggtttacagcagagattatgctgaatgcataaggagagagtttatataaggagaatgatatgaaaagaagaactatgataatggcagctgttattatttcgatactgttgtgtgcaggctgctctgtaaatgaactggaatacgatgcgaaccttggctatgacctgaataaagcaaagagcgagaatattgtttttaatgtttatcactctgatactgaggatcattcgtgggagcttatagcaagatttccttgtcaggctgagccggggcactatagcgatataagccttaagaacaaaggagagaagataacagcagagctgacagataatatgtatacggcgtcagatgacggagcttctgccgtatatgaaggtacttccgttacggcatgtgattttaaggtgcaaggcttcaaaagctctttgatgggatacagtcagtatgcagttaagaacaaatcaggtgaacagcctgtgcggctataccctgtttccaacagtgacggcgtatatttatcaggggaggaagtaagtcttgataaaccttatgatacagagggagagaatttagacaacatccttataactatagagatgaagtaaaaccggttagctgataaaccaggatttatagagttgatttactattgttttaaatattaaaaaacgaggaggactgctatgaaaagcagctctaagattaactcggactttgaggtaaataacggcaaaacatattatattaaggcatataacgaaaaatgccgtgaatggcaatatgatgatttatatccaaggataatgaatgtgaaatcctgagctgtaatttctgcttttgaagaggcttgggagttgagcgaacaaaggagagttatatggatagtatggaatataattaaccgtaatcaatgtgattttcactgcagagtaccgcttataacaaaaaacgaccatataccacatatagcttgaaacagtctgaattatatgttaattttagagtaagcagttagtgcttttcaggggcagtaaaagggtggcttgttatgtcgaagttgaataataaaacagcatttatatttatgaccgcagccctgatagtgcttatcgttatcgggactgttttgtcaaggcctgattatactcctgcagagaagtatatgaaaaaatattttcctgatatgaagtatgaaactatggaccttattgactcatcggattataatgactaccggcttgagatatatggctttaacggtatgcagggtaatataatcggctttctgcttcagaaaaatgatgagggtgagtttgagataattgaggcatcaagccttataaatggttttgaaagccactatattttcaccaattacgatgatattgctaataggacaattgtatgcattattgcagatgaaagcgtaaacagggttgaaatatccgcatcaggcaaatcggatacatttgatttggataaaggcagacttggaggatatatttttgaggttcataactctgctatgtctttcaggttttatgatgaatagaaagcggcagacagcaatggagtaggttagaaaacttctgtatggagacggcaatgaagatagttatatgtgacgacagagaatttgaacttgaaatactgaggactatgtgcgaggaatatgcagccgaaaacagtcttgaggcggatatagtgtgtactgctgatgctgcatgcatagaggcggagcagcccgatatactcatacttgatatagagatgccgcaaaaaagcggcatagagattaaaaatgaacttgcaaaaggtgaccgcccgctgattatatttgcaacggcatactttgagtttatgaaagaggcctttggcaaaaacgtcataggatatatgcagaaacctgtcaaaaaatttgaatttgacaactatatgaaaaccgcaatagacattatatcccttgaaaccaccgtatatatcgacgatacggcggcggtaaaaagcagcaatatacttatgataaacgcagacaggggatatacggagattgaacttgcatcaggtcagaagaaaaccggcataagaaaaagcctcaaggcatgggaggaggaactggggcagtacggatttatgcgaataaacgacggctgcatcataaactgcagatatgtcagagaaatcgagggaggtactgctgtaatcagaaatacaggagcgaaactaaaggtgagcagaagaagaaaaaccgaatgcgccgcatttttcagagattacagcgttaaatcctcaagatacatttagagaggtattatatggctcaatacacgtttggaatactgatactgctgctgtttttcaggggagtgcttggatatagagagcttgaaaaaggaatatttattgcagcaggcatagccattgccgcagcgggagagattatagagctgtgctttgatgcttatgaaacgaatatatggatgcagaggcttctgcttgtgatgctctcaacaatacccatgttcatattcaaaggccgcaaaatcatcatattcggtaccggcttttgcgtcatatgccttgtttccgagataacctcggttatctacggactgcagcttatagccatgggccttgaacttattgaaatcgggccgtattttgcaggcatagacaactaccttatttcaggaattgtctgcatagccgccctgatgattttaatgcgctacgtcagagtgaggaatatacagctttattcaaaaataaatgaaatgaacggacttctgtttattcccgccgtcaccataatgtacataacaaaaatcggcggcatgtacggcatcaggatattcagcagagaaacagctctgattatgggtatagatacaaccaaaaattcggttctgggcatgctggcctttgcgctgttctttcttctggtggtgctggcatatcagaaaaaaacaatgaagcgtctgcttctgctaagtgaaaaatgccttgaggaccagactgcgcagtacaagcttactatgaacaaggacagagagcttcgcaaattcagacatgactacaatgctcatatgacggcaattgcaggcctgcttgcaaagggggaatacacaaagcttcaggaatatatcagaagcatgggagagttcagagataaattcaaccttgtaagctccgggaatatagtttccgatgcaatactcaaccagtacaaggagctttgcaacagagaggatatcacctttgaaattgcaggcaaattcccggagagatttaatatggcggaaacagatctgtgcatgatgttctcaaaccttatgtccaatgcctatgaggcggcgctgcagtgtgaagcaggcagccgcagcataaggactgaaataaggaacaatgaggaaaatgtgtttttaaagatagtaaactctgtaaagggtgaggttgtttttaaaaacggcataccggtgacagacaaaaatgacagggacaatcacggcttcggaactgagagcatacttgatgtgattaaaagaaatgatgggtatatagaatggaaacagcctgataaaggtacatttgttacagatatcataattggtgtgaaatgaggaggagtattatgaaaaaaacagcggtattcttagcagtactgattatcggaacagcaattcttacaggctgtgcaggcacttcaaaggaagcagacagtcagaccctgagggtttattccgtctgcggagaaaacaatgagcttttggtttcaaacggagtaatagtcgtgaataaagatgaggaaacctttgacggcggtcaggtggaagtgaagctggatacagataatatcaacggatactctatgagattctatattctgagtcccgatggagaaaaagagcctgtacttgttaaaagtgtttctgacggtatgggtcaggacgattacagcgatatggggcagataaggggtgatggcgccatacccggagatattcaggatgcagtcgatgatttttattttgaactgaaagcagaggatatggacggcaaccggcatgagtatgatttaaagcttgaggtaaagcgaattatataggaaacgaggagcgattattatgaacatttgttgagcgtttgggaataatcgcagtgcagattgcagttttgtacttcatagttaagcttgctgttaaaaaagcgcttaaagaatatgatgaggacaggaataaagaacctggcagagattagcttgtacagaggtataggttaattctgaggtgggatttgaaattacgggattaaggagctttgaatgaaaagaatatgtatattattactggcagctttagctctgcttatgactgcctgcggaaatacaggtgatgctgaaattatttacggagattctgatatctattcacagtcggatatggactcagccataaggctgattaaaagagagttttcgggctggagcggctgcgagctgcacaagattgaatacgcaggtgatgaatgtaattcggaagagaatatcaaatggcttaatgagcttgcagaggcaaacggcataaaggcggagctgacacagtgtattcagtttgtaagtgaatttcattctccgaaaaacggcggaggtgcctggaatccggatgaggagtacacaggctggcagtggaatcttgcaagggcggaaggcggcaaatggtacctgctggcgtggggatattagcgcagcagtgtgaaaggacgagactatggtaaacaggaatatgagaataggagtaatagtaccggttgctgtagggattgctcttattgctgtgatattctatgcagtaaaaacaaccatatcggagccttactattcaaaggactgtgacttgcttacacctgaatacgctgctcaggcctcagattatatagagtctgaaaaaaccattgactttgcagacagcaaaagggtgagtcccagaggctacggctttaagaaaaaagtaacctttacggaggatacagcatttcatatggagcttgtagagtctatgagtatgtacaaaaaaggttttgtgtacggaatatacaaggacagcctgcttgaagaaccggtaagcgaaaaccggcttgatacgttatttgaggcggcagaggaagaagaaaaaggcataattattccgtatgaatacggagttgatgctgttttagatccgggtacatattacataggaatgtttgcaaaacatgtggaccgcacaggaatggaggagtcttttacagtgaattattcatatattaaacaggaatagttctgacggttacaaatgaatgatacggttaagcgcaaagacatagattgggtatccaaactttttggtggaatctccaaacttgttagtgggctggtttggtgggaacatctgaactatccaaactttttggtggagcggtttggtggagcctgcagttaaaaaaagagacgagggtgcggcgaaatggaagctttattggattttcttgcttcagcgattggaacattaactaatcctaataagctgcaaaaaacatttaaaagtgtaaaccattctaaaatcacagcaactacaataacaaagtatattgactatctggaagatgcttttctggttgaagaagcatccagatacgatataaaagggaaatcgtatataggtacaccgcagaagtattatttcatggatatggggcttagaaacgcaagaatcaacttcagacagcaggaagtaacccattctatggaaaatgttatctacaacgagctgaggatgcgaggttttggggttgatgtcggcaatttacaggttcttgaaaaagggaaaaacggcaagcagatgcgtaaacagctggaagtagattttatttgcaggaagggttcaaaacgttattatattcaatcagcctatatgctgccgacagaggaaaaaatgatacaggaaatcagaccattcttaaaaataaatgattccttcaaaaaaattgttatcacatcaaatacacctaagccgttttatgatgaaaatggaattttaatgatgagcgttttcgatttcttattaaatccggagtcactggaattctagaaggaatttatgcagtaatatgcaaaaatttcttctacgcctccgcttacattattatacaacctgttccgggcaggcattatttcgaagaggagtactatttcaaacattgcatcagacaatagaattacttttacagtattgccggcaaatattgatgaaaaagctgctaagcactattcttaaaaaatttgattacactttcagatgacgcagcttaaacctcctttttacgcgggttttcaggctataccaataaatcaaattctgtgtcccccgccaaaatccatcccatataaaatatcaggagtatgatcttctgtgcgtacagaaatgtaatgaatccggtatagaagaaaaatttacaaaacaagcaataaagattataatggaactacaaattgatatctgacaggataaggaggtgaatctaaaatgaaacaatcatttatgtcacttatgtttttgataattattctggctgcatttggatattttatctcaaaggcaatgaagtacaaaacagaaagagaaaaaaacgcaattaaaaaaggctttattgcatatcttttgacagacagtctgttgataagctggttagtatataagaaaaataatcccggtgatcatttataaggatgcaacagctctgaatttggtgaacggattttctttgttattatcagcccggagggacttctatgaaaaggataaacacaatctctatattattggcagctgcgatttatgtttttttgataattgaatggttaaaaccggtcagctcacaaacaatggtattaggagcagtagcgctttcggtaacagaattgatatgtgtttcatatgctgttaaaaactatcgcaatataataagctatattacttgtatttttggagttatacccagtgtaataatgctttgtgtgttctttatttggatgataatgggactgggcgcataacattaagttctttttaccccgatgccattgcttcagtccgcagaatctcaagattacaaatacaaaatattatcggttcacgcaattgtatctgatgctgttgccgacagccgtatcataacagccatccgttactcctggctttttaacactctgctgatatataagggttttattttcatcacaaagctgaatactgtcatatttcgttccttcctttgaagcggttattttaaagtttatatcacctttctcataattattatagtatttacattccctgtcctctataagttcacactcaccatatatccgttataattccggttgattttaattatccataatgctattattaaataccggagtaagaaaatcataaaagcatttgcttacaacacagcatgtgcaaaaaggaacagtcagatcaaatgaaactaataataatatttatcacatatctcttaggaggagtagtcgatgcggtatgcggcggcggtggtttaataacacttccggtgctttttgcaataggagttcctgctcatattgccgtaggtacaaatcagacctcaatacttcccggagtaattacatcagttgtaaaattccacaaaagcggcaaaatagatataaaaaatgccatatatgcagtacctttcggtcttattgggggttttgcaggagcaaggctcaatctgctggtttcagaatggtatctgcaggttattcttctgatactgatccctgtgcttgctgttttctcagtcctcaaacctaatgtcggcacagaagacagatcaaaagaaaacacacgccgcaggacaataatactgtcagcagtaataggtttcagtgtaggcgcctaccacgcattttacggccctgccagcggcactttctatatgctggcttttgcagcgttcctgaaatacgatcttgttactgccaacggcaattcacgttttatcactatgtttgtcagcatcatttccagccttacatatgctttgtccggctgtgttcaatggctctatgtactgcttgcagttccgggatatgctcttggcaactatataggtgcctctcttgcaatttcaaaaggcgcccgttttgtccgcccgatgtatttctggatactggcgctactgtttataaagctggtaaaagatttggttttctagatacaaattccttaatcaaggtacttatggtataatgcatttcacagcgaagaagccctagccctgttttcatagaaaacagtagcaggtcttttgtcaggattacccgaagcaaagcaaggctgtaatctacggcatggtcgtaagaacagagctgatgaaatacacatacccctaaagctatcagtatggtataatacttataggtcttatccggccgggctatacacgagcataaacgtgcaaggatatttgcggtaaatccgcaatatacttgtgcgtttttttattgtcttaaatgcacaggtatctcaaaaaatcatacaagaggaggtacactatgaagaagaatgaaatcgtactatttaacacagaagacaatgaagtaaaacttgaggttcctgtaaacggggaaactgtatggctaagccgtcagcagatggcagagctttttggcagagatgtcaaaacaataggcaagcatatcaataatgcactgcatgaagaattggacaattcaactgtcgcaaattttgcgacagttcaaatggaaggatatagagaagttgtccgagacattcaatattacaaccttgatgtcattatctcagtcggttatcgtgtcaagtcaaagcgcggtgttgaattccggaaatgggcaaattccgtactcaaacaatacatattgcagggctatgcagtaaacagcagccgtattgctcagcttggagaagtcataagggttatgaaacgaaccgaaaacacacttgacagcagacaggttctgtccataatcgaaaaatacagcaaggctcttaatatgctggattcatatgaccaccagaacatgaaccgtccgaaaggaagcaatgatacctacagactgacatacgaagaatgtatcaatgtgatttctcatatgcgctttggtgacgaatcagccttgttcggcagggagaaagacgattccttcaaaggcagtatcggtaatatctatcagtcttttggcggacaggagctatatccaagccttgaagaaaaggctgtacatcttttgtactttattaccaaaaatcacagttttcttgacggcaataaacgaattgcagctaccatgtttctgtattttctcgacaaaaacggcgtactgtttgcagacggcggtaaacttattgacgaccacacactggttgctcttaccattatgattgccgagtcaaagccggaggaaaaagaaatgatgattacagtagttatgaattgtctggcataattcatcccaaaggacaagcatctcgcaccttgcagacctgcctccggttttttgcatatgcaccggacaactgcctctgcaatttcaaaagacgcccgttttgtctgtccgatgtattttagaatgccggcgctgctgtctataaagccggcaaaagatttgaacctgcatactaaaaccggtcacagagggtgcaaaaatttgagacggtgatataatctatattataaatataaagtgtaagattcaaacccaaacgttgtctatatagttgaagagaggtggttttgatatggctatggaagataaagatattattcagctgttctttgacagaaatgaacaggcaatagaagaaacctccatgaaatatgggaattattgcaattcaatagcgatgaatatattaaagaaccgggccgatgcagaagaatgtgtagctgacacatatcaaaaatgctggaattcgattccgcctaatagaccatctgttttaaggatatttcttggtaagattacacgaaatctatccttcaacatgtataagagaatgaatgcagataagcgtggaagcgggcagcttgcgcttattctggatgaattggcagaagtcatttccgatgagaatagtgtagagaacaatatcgaaaacaaggaacttctaaaagaaatcaacatatttctaaatggtctgtctcggcaaaaacgaattatgttcgtccgcagatactggtattctgacagtgtgacggatattgccagaagattaggtataagtgaaaacaatgtgtcagtaaatctgaaccgcattagaaagagattacgtcgttatctttatgaaagagggtttgaagtttgaaaaaagaagaattatacgaaaccttaggaaatatagatgaaaaattcataaatgaggctgaaaccattcacatgcagaaaagaaaacacgtatggatgaaactggctgctgctgcagcctgcctgtgcattgcagttatatcttgcataggtgtaagcaatctgtacaagagcgaaaatcaggcagatgcaggaatcagtattccggctgttgaaattccgggtactgcaggcagcgctgagaccgatatgatagggcttgttgtatacaacggaaatgtttatactcagtccgaaagttattacggatcagacgctctggcaacagatcatttgaccggaaagtatctgggatatgcaacaggttcaattgatgagttttcaactgatgaaaattatgaagaagaatttgcatctacaatcgaaggaaaagtttttgaagtgaagggctatgatgcggatttcaggatttgcatcagaaacgagatcgaagacgagaatggaaaaaaacaattgagcatcgactatctggaacatttaaacgggattaaaataaaaaacggttcagagctgtttgagcaaagactgcacctcagcaaccgggcagatgcagtcaaatggcaaaatcatgaggactgggataatgcagtgggaaatctgcataatgcacagatcgacaataaactgtggacagaatttatcaatcagataaacaaaggggagtttgtggatacccggaactccgaaaacgacaaatcaatatatgatacccaaaagcagtcacaccttgttctgacaatggatgatggaactgttataaggcttcgactccttgagggcggatatgtcggctatgagccgttaggccggtatgtcgtcaagatccccggagatgtttttaacaaagtgtttaatctgtgcggaggaaacaaatagtggccggagtatcagaaatcgtatagaaataaagtataagcagtgccagagacggtactgctttaatgatgaagggtttcgtcaaagcagagaaaccgcacacagcagcctctctgagtctcatcatctctgctatagtcaatattatgcatatcaagaatagactcaagatagcatattctctctgacatacgatcgcagtcgttccatagcaggcctatctgctttcttgcagttcttaatgcagtaatatgattttccatttcttcttctatgctgataagca

SEQ ID NO: 1015 - DNA, 9169 bp, Unknown
  16S sequences of unknown bacteria
gcagagggtcacaggttcgagccctgtaggccccattttttatgtctatattactttctttcacaggccattggcctgtttttttgtttatttgacaaaaatgaaatcttctgttagaatctttgtaataattgtaatatttctgtaacatttagaataacataatagcaacagcacagatacaggaggatatgttatgtgtaaaaaggggttgtccgtgcttgtcttattatctttgtggatgtgtctcacaggatttgcaagtctgggagaggaaggcaaggatacatggaattccatgatggaacagttatcagcagaggaaatagatcagctgctggcagaggagaacgagtggtacggcaaagtaatggcgaacgtagaagattctgttactatccgtgcggaagcaagtactgaatctgcggcagttggtaagatgtttaaaggcgatgccggagagatcctggagcagcaggaaggatggacaagaatccagtccggagatgtggacggatgggtcagcgatgaatatctggcatttggaaaagacgcggaagagcgtgcagaagaagatgtaaagaagattgccactgtgacagcggacggcctgaaggtgagagatgaggcaaatactgattcaccggtgatcgatctgatcggacatggggagcagatcgaggttggcgaggaagaagatggatggctgcagatcatctattcggatggagagatcgattatgtatctgcagattatgtggaagtaagctacaattacggcgaagctaagaccatggagcagatcgaggccgaagaggcggcgcgccgtgcagaggaagaaaaggcaaagcgaaccaaaaatctgggcgctattgcagcaagcactgacgaagtaactcttctggcagcactgatccagtccgagagtggcaatcagccatacgaaggacagctaggtgttggcgcagtggtcatgaaccgggtacggagcggatcttatccgaatacgatccagggagtgatctcggcaccgggacagtttggaccggcagctaccggaaaagtgtcagcgattctggccagtggtccgaaggcaagctgtatgcaggcagcacaggcggctatcaatggtgagaccaccgttggaacggcaactcatttcagaagtgtgtcttccggtatgcagggaatcgcaatcggaaatcatgtattctggtaaaaggatatacagaggcagaggatggaactgaccattttctgcttctttttgttttggttgtcaattatcagggaatattgtataatgagtgcaagcgagtcaacgtgcttgtgcgattgacgagcgacgaaattatcgaatgagccgggctcatgagataatggtaacaatcataggaatggagggcggtactatgctgaacatgaatccggctattggatggctggtattgatcattatacttcttgtgattgaaatcgcgacactgggactgacaaccatatggtttgcgggcggagccacagcggcttttctgtccacattcttcggagcgggtcctgtgattcagtggatgctttttcttgttctgtctttggcatttctgttactgaccagacccatggcagtgcgttacatgaagaacaatcaggtaagcaccaatgcagacagtctggtaggaaagacggtagtggtaagtgagaagatcgacaatctggcacagtccggcaaggtgaacattgcagacatcgagtggatggccagaagcacagatgacctgaagatcattccggcaggcagaaaagtgaagatctgctcaatcgaaggcgtgaaactgatcgtggaagagataaaggaggaaaattaaatgctcatcgtactggctattttgatacttattattctgatgatccttgcatcctgtgtgaagatcgtaccgcagactacggcgctggtcatcgagcggcttggtgcttacaatggcacctggaaagtgggaatccactttaaagtgccgatcattgaccgtgtggcaagaaaagtgaccttaaaagagcaggttgtggactttgcaccacagccggtgatcacaaaagataatgtaaccatgagaatcgacactgttgtattcttcgagatcacggatccgaagctctatgcatacggtgttgagaatccgatcatggcaatcgagaatctgacagcaacgacccttagaaatattatcggtgatctggaacttgaccagactcttacttcccgcgagactatcaataccaagatgcgcgcatctctggatgtggcaactgacccgtggggaatcaaagtaaaacgtgtggagcttaagaacatcattccaccggctgctatccaggatgctatggagaagcagatgaaggcagagcgtgaacgtcgtgaagccatccttcgtgcagaaggagagaagaagtccaccattcttgtggcagaaggtaagaaagaatctgcaattctggatgcagaagctgagaaacaggcagctatccttcgtgcagaggcacagaaggagaagatgatccgcgaggcagaaggtcaggcagaggctattctgaaagtgcagcaggcaaatgcagatggtcttcgtttcctcaaagaggttggagtggatgaatccgtacttcgcctgaaaggaatggaagcatttgcaaaggcagctgacggtcaggcaaccaagatcattattccgtctgatattcagaagatggcaggtgtggtaacatctgtggcagagatcgcaaaagaggcataacagccgcagaatacggaacgtatatcattcgggctgacgctagatgcgccagcccgtttgctgataaaatggcaggagggcaaacacatggacttaaaaggaagaaattttctgaaattactggattatacaccggaggagatggagtatctgctggacctggcagcagagctgaaagagaagaagaaaaatggtattctggtagatacattgagaggtaaaaatgtagcgttgatctttgagaagaccagtacccgtactcgttgctcttttgaggtggctgcccatgatctgggaatgggaactacgtatcttgacccaagcggatcccagatcgggaaaaaagagagtatagcagatacggcccgcgttctgggaagaatgtatgagggaattgaatatcgtggatatggacaggatattgtggaagaacttgcaaaatatgccggagttccggtatggaatggtttgacaaatgagtttcatccaacacagatcctggcagatatgctgaccatccgtgagcattttggaacattgaaggtaaaagtagtatacatgggtgatgcccgttataatatgggaaattcctggatggtaggctgcgcgaagatgggtatggactttaccgcatgtgcgccgaagaaatactggccgtcagaagagctggtagcacagtgccaggagatcgcaaaagagaccggagccaagatcactctggaagaaaatgtagagaaggcagtcaaaggtgcagatgtgatctacaccgatgtatgggtatccatgggagagccggatgaagtatgggcagagcggatcaaagatctgtatccgtatcaggtaaaccgtgaggtgatggaatgtgcaggagagcaggctgtatttatgcattgtctgccggcgttccatgatctgggaaccaagatcggaaaagagatcagcaagaaatttggcattgatgccatggaagttacggatgaagtatttgaatccagtcagtctgttgtgtttgatgaagcagagaatcgtatgcataccattaaggctgtcatggcagctactctgggagcataaggagatttgggagtaacggaacgatgaagtctcttctgaaacattatcggttatgtaatatatggatttgcctgttcattgtggccatggcatttacggcggcatcggacagacaatatcattctttgtgtgtgacactggcattcggtgccggaggactgatgtattccctgggtgttgtcaaagagtggacatcggggaatcggatcgcaggtgcagtggaactgatcctggcatcttgtatgtggacagccacgatctgctcgatcttgctggcaggaggaatcttatgaaaacagaattattgaaaatattgagagaatccgatggatatgtatccggacagcagttgtgcgagcggtttcatgtgtcacggacagcagtctggaaagtgatccagcagttaaaagaagaaggctatgaagtagaagcagtgaaaaacagaggataccggatcatgaccacaccagacgtgatcaccgcagaagagatcagcagtcgtctgcatacgaactggatggctgagaattgcatttatctggaaagtgttgattccactaataactatgcaaaacggatcgcagaagacggaacaccttcaggaacattggtggtagcggatgagcagaccggaggaaaaggccgtcggggaagaagctggtctacccctaagggcagtaatattgccatgacgttgcttctgcgtccgagattccgaccggaacatgcatcccgcatgacacttctggctgccatggcagttacctgcggaattcgccgggtgacaggacttgatgcaggaatcaagtggcccaatgatgtagtcgtcaacggacataaggtgtgtggaattctcacagaaatgaatacagaagtggattacatcaattatgtagtcataggaatcggtatcaatgtaaatcagaaggaattcccggaggagatccgtgagatcgcagggtctctgtgtctggaggcaggaaaacagatcggccgtgcggcactgattgcggcaattatggaagaacttgagcgcatctatgagatcttccagaagacagaagatctgtcagaactttatgaggaatataatcagatctgtgtcaactgtggacggaagattcgcgtgctggagccgggacatgagtacactggcgtagcggaaggcattaatcaggatggcgagcttatggtagtcagagacgataccggagagaaagtcagtgtctatgcgggcgaagtatctgtccggggattttatggatatgtatgatgaacagaggtgaatgaatgtatcaggatcaggttgtgctgtgcggagccagtgcatatgaacagaaatattatttaaatgaagattttaagagtctgccgtcacaggtccaggatgaactgaagatcatgtgcgtgctgtttacggaggatgtgggaggtattctgacgctggtgttcgatgaggatggcaagcttttgctggagacgtcggcggatgaaggagacctgctctatgacgagatcggaagcgagctgaagatccgtcagatccggaaagaaaaagcagagtttctgcagtcactggagttattttacaaggtatttttcctgggagaagatgtagaatgattcggaaactgcagattggagatgtacaactggaaaataatctgattcttgcacctatggcaggcgttaccgacctgccatttcgtctgttgtgcaaggagcagggagcaggacttctgtgtatggagatggtcagtgccaaggcgatcctctataacaataagaacacggaagcactgatggcaattgatgacagagagcctccggtatcgctgcagctcttcgggtcagatcccgatgtgatcagtgagatggcaaagcggatcgaggagcgtccattttccattctggatattaacatgggctgccctgtgccgaaagtaactggaaacggtgaaggttctgcacttatgaagaatccaaagctggtggaggagatcatcaccaagactgcccgtgccatcagaaagccggtgaccgtcaagatccgaaagggatttgacgagagccatgtaaatgcagtagagattgcgaaaatcgcggaagccagcggtgcggctgctgtggcagtccacggacggacccgggaacagtattacagtggcaaagcggactgggatattatccgtcaggtgaaagaagcggtgaagattcctgtgatcgggaacggtgacgtgacttcagcagagagcgcagatgcaatcatgcgagagactggctgtgacggtgtgatgatcggcagaggtgcccagggaaatccatggatcttccatcagatcctgcactggatggagacgggaaaacatgaggcgaagccgaccctggaagaagtaaagcagatgatcttaaagcatgcagcgctgctggtgcaggaaaaaggtgtctacacgggcatgcgggaaatgcgcaagcacgtagcatggtatactacgggctatcctcattccgcaaaattgcgggcaagagtcaatgagatcacaagtcttgaagaattaacaggattgctggaacagttgtagcatatagtagcatcagaggtgatgctgcgatgttggattttataaaaaattttatatcaaaactgctgaatggtaccagtgatgagcaatcagataaaacgcaggagtcggaatcgttggtcagacagtggcagtttgctgactatgtgccgcggatccctgagatcatactttatataagacgtcagcgtgagattccaagacgacagctggaactgacgttgatcgataaagaggatgaacctgcatggagggtcgaaggaatcataagaagccttatgaaggatccgcaggtgatgtatctggttacagaccgggcggaggcatttgctgagatggaagaagaagccatggagatgtatggacttccatttgttgtgcttgacaaaacagaacttgaaaaaatgcctggaaatctggttttagacctgaatctatgggaaaaccagcttgacagattcagcaaaatatgggtataatacgttgtttcaatgagataatagaggcagtgtctgccgcagtatgattggaaggtgtagagcatggctgagaagaaaaatattcttacctatgaaggattaaaaaaactggaggacgaattacaggatctgaaagtaaatcagagacgtgagatcgctcagaagattaaagaagcaagagagcagggagatctgtcagagaacgctgagtatgatgcagcaaaagacgagcagcgtgatattgaggctcgtattgagcagatcgagaagatcctcaagaatgcagaggttgttctggatgaggagatcgatcttgacaagatcagtattggctgtctggtacgtgtactggacgtagagtatgacgaagaggaagagtataaactggttggttcttccgaggcaagcagccttcagaataagatttccaacgagtctccgttcggacaggcactgattggtgcaaaagtcggagatatcgtagaagtagaggcaccggcaggcgtgatcaagtacaaagtactgagtattcacagagcaaactaagagggagtataagaatggcaggacaaaagggacaggagcaggatctgaatcagcttctgaaagtacgccgcgaaaagctggcagatcttcaggcagcaggaaaagatccgttccagatcacaaaatataaccagacccatcattccgctgaagttaaggaattatataatgctcacgaggcaaagatccttgcaggaagagctcctctgaacacagaggggatgggtgaggcacaggcaaaagaagcactgaatgcagattataatgagagaagagcgattatggatgctcagccgatccatgtatctatcgctggacgtatgatgttcaagcgcgttatgggaaaggcttctttctgcaatatccgtgatctgcagggaaccattcaggtatatgtggcaagagatgccattggagaagagtcctatgcagattttaagaaatctgatatcggtgatatttatggcgtggaaggatatgcattccgtaccaagaccggtgaggtctctgttcatgcagagaagatgactctgttaagcaagagtttacagatcctcccggagaaatatcacggaattacggatacagatatgcgttatcgtcagagatatgtggatctgatcatgaacgaagatgtaaagaacacctttatcaaacgttctcagatcatcaaagagatccgtactttcctggcaggcagagatttcatggaagtagagactccgaccctggtatctaatgcaggcggagcagcagctcgcccgtttgagacccattacaatgcattgaatgaggatgtaaagcttcgtatttctctggagctgtacctgaagagactgatcgtcggcggacttgagagagtcttcgaaatcggtcgtgtatatcgtaacgaaggtgtagatacccgtcacaatccggagttcactctgatggagctgtatcaggcatacacggactacgaaggcatgatggagctgaccgagagcatgttccgttatctggcagagaaagtatgcggaagcaccaaatttacttataatggaattgagatcgattttggaaagccattcgagcgtctgactatgaatgatgcgatcaagaaatatgcaggcatcgactttgatgctgtcgagacagatgaggaagccaagaaactggcagatgagcgccatatcgaatatgaagagcgtcataccaaaggtgacatcatcaatctgttctttgaggaatactgtgagaaagagctgatccagccgacctttatcatggatcatccgctgtccatctctccgctgaccaagaaaaaaccgtccgatccgaacaaggtagagcgtttcgagctgtttatcaacacctgggagatgtgtaacgcatattccgagctgaatgacccgatcgatcagagagagcgttttgcacagcaggatgccaatgcagaagctggagatgatgaggctcagcatacagatgaagatttcctgaatgcactggagatcggtatgccgccgacaggtggtatcggatacggtattgaccgtctggtaatgctgctgactgacagtccggcgattagagacgttcttctgttcccgacaatgaagaccctgaatgatgtaaataagaaaaatgatgtaaaatctaaggctactgaagaagtgaaagcagagcctgaaaagattgatttttctaaggtaaagattga

SEQ ID NO: 1016 - DNA, 18041 bp, Unknown
  16S sequences of unknown bacteria
ctcctttgtgcttctattatatatgtaaggaaacagtgccgcaaatgtgcgatttgaggatattcgagagccgcctgctgtggggcagacggcttcgcgttttcaccgtaactttgcatttcccggcttttcttcgtatcaaagctcatccctgggtagtaaaatcgtagtaattggggtcttttttctgagggaaatgcgggcttttgcgctgtttcacagggttatttcacttttgctttgatatttataataaactctttcccgtatgcacaggagggaattatgaacagtacatttgaaattattttcggtctgctgggcggtctggcgctcttccttttcgggatgaatatgatgagcgattgtcttcagaaagccgccggcgacaaaatgagaaagattcttgcactattgaccaaaaatcctgttctcggagtccttgccggggctttgacgaccgccgttctgcagagcagcagcgcgactacggtaatggcgatcgggtttgtaagcgcggggctgatgaagttgccccagggcatttccattattttgggagccaatatcggtaccacgatgacggctcagctgctggcatttaagatcagcgactatattttcgtaattattttcatcggatttatcatttcttttattaccaaatcggaaaaagtaaaagcggtaggcgagacgatcttcgctttcggactgttgtttctcggaatcgagacgatgggtgatgtgatggagcctctggcttccagccctgtcttcacagatatgatctcccgtgtggctgatgtaccggtgctcggtgcggcggtaggcacgctgatgactctggtggtgcagagcagcagcgcgacgatcgcggtgcttcagaacttcgcttctcaggcgggtccggacggagttaccagcattatcggcctttccggagcgattccgatccttttgggggacaatatcggaacgacgattactgcggttctcgccagtattactcagtcgagagatgcgaagcgcacagcgctgtctcactgtattttcaatatttcaggtttctgcattttcatatggttcatcgaaccgttcgctaaatttattcagtggatttcgccgaaaggtccggaagtcgaagtgatttccagacagatcgccaacgcgcataccgcgtttaactgtatcatgactctcatctggctgccgatgatctggcttctggtgaaaatcgtagttaagatcattcccgatggcaagaagggaatgcagctcgacccttacggagtgaaatatctcgacaatcgtctcatcagccagcccgcggccgctttagagctggtggccaaggaagtgcttcactgcggacatatcgtacaggagatgctgggagatctgtccaaagccgtatcttccgacgaccgcaaacgtctggatgaggtcagaaaaaaatcagcggcggcttccgacgtcaatcagaaaattcaggactatctggcagatctgttttccggtggtgttctcacagaggagcaggccgcgcagacggccggtatcatgtatgtgctgggagatatcgaccggatcgggttcctcacaaagagtgtggcggattctatgggagattcttcggtgagaaaattcaattattccggggaggcgatgaaggatctcaaaaagagcctcgagagcatcgaagatatctactctgacacgctgaaaatcatggtgtccagaagcaaatccgaggcggacagcatccgccgccgcaaagaggaagtcctggatctggatctggatatgcgcaaggcacatctggagcgggtaagcaggggcaactgtgacgcttctctgacggccccgttcaacagtattcttcataacatcgaccgtatgagcaacagctgtgtcaatatcgcggaagcggctctgggtcaggtggatttcaattactttatcaacatcaaagtgttccgcgaagaaattaaagaaaaaatgcagcagttggtatagagctaaccgcgcggatacggagcgaacgataaaaaagagagttctttgcgaaagcgcgggaactctcttttttacggtttatgaaacgatctgaataaatcggatctgagagtagaacgatcggactttcggactgctgccggaatttttcatctctctattctccctctctcagtcggtcgacgatgctctgctttttgacggactgcagcacgatgaccggaatcagagcgccgatgagcaggagaagcggaatcaccagcagcagcggaagcagcgtgaaggtgtaggtgaagaaccacaggttcgacaaaaggccatcggcgatgaccagactgagaatgctgcccagcgccagagaaagaaaccccgcggccgcggtatagtacagaccttctgtcatcagcatgcggcgcagctgttttgtagtcatgccgatcgactggagcatggcgaactcccggcggcgggtgagaatactggtcagcatggaattgatgaagttgaggatgccgatgagaccgataatcagactgagggcccctcctacgatgagaaccatatttctcataccttcgaactctctgaccctggtggatttggaactgtaattcatcacgggttccgtattttccgtatagttcttcagaaattcttccatcgaagcttcttcatcgtcggctacattgtaagaatagctcatgacgccgggatgatccgtcatctgaagataggattccgccggaagatagaaagagtaatcataccccacgccgaaagaattagtataatgaccgatagccactttggccatcacttcgtattcataagtgtgatattctccttcggcggcggtgtctccgcctctgcggttgtgcagaatcaccctgtctccgatttcataatgggaggagatatcatagcgggggctgccgttatcgtccagctggattccctccaggatatatttccctgtcttgagcttctccatatcgatctctccctccagaactttcaggcgattcagagggagttcctcgcagccgtagacggcgcagacggtatttcccatggcgtccagatcgctttccggacctgtaaaatccgggtcttccacggtgaagtattccgtatcccggttcgcgtaaattcttccgccctcttcgaagccgggctgctgcgatacggcctgtatcatcgtctcggacactgagttttcctctccggaaaactgataattaaagtaatcggagtgagcgatcaggtaatcggtatcgacgaatttggagagatatttgtccatgtcgaatccgatgctgaacgtataaaccgtattgaacagaatcagactcagcgacatggagagcagaacgagaaaggttctctttttgtttcggcccagatttgccgcggccatgccggatatttttatgccgagacctctgcggctgcggccggagatctgcgcttccgtatagcggacggcttctacaggcgatactttggcggcgattctgccgggtttggaagtgctgatgagaacggtgatcagcgcgaagagtgtactgccgatgaaaatcagaggattttcagaagtttcgtagctgctgccggcgtaaaaactctgatccatgattatcggaacgattttgcagccgatgaggtatccgagaatcagtccgataggaattccgatgcaggaaagaatcagcgcctgccgccggatcagctttcgtatctgttttcccgtggttccgatggttttcagcagaccgtaaaaacggatatctttgatcaccgagatctgaaagatattgtagatgatcagataaccggtgaagatgatgagcagcagagccgcgatcacgccgatgaccgtaggcgcgtccggctgaaagctggcggaaagataagaccagtttacgttgttggcgatgtaattcgggtctccttcttctgtggaatagccgctttccgtgatgacgcgctccattttctcttccaggttccaggaatttcggaacatcaggtaagaattgatgacgccggtcatatccgaatcttcgtcgatactgctgtagagctcttcgatatgttcttccatataggcccgggatacgaccatgatagatacgttgaagacgggatcggcttcccaccagccggacagaataaaatcccggctgacctgctgtccgtgtaccgtcatctggatcgtaacaggagctccgattttctgttccgcacccagaagttttatcgtctttgtatccattatgatttcgtcggcggcctgaggtttgtgaccttcggtgggctcgcagaatcccagtttcatcgcggtatcgtccatataatagagctctccgtggcgtttgatcagttccggattgtccacgctgctgctcatcagacgattataggagatatcttcgatcagttcgtgatctttgattttgctgtattcttcatctgtgatatatttcagcactcccataccgtctccgccggcctgacgcatcgtctgcctctgaaaattttcgatgatgccgctgcccacggtaaagagtgcggtaaacagcagcgcggtcagcgcgaaggcgatgacggcgatgatatttcggggcatgtttcctttcaggcttttgtccgacagattccgcactgcttttttgttgttgactttaagcattgtgatcacctgcgattctgccgtcttcgatgcggatgatccggtccgccatctgggcgatttcttcattgtgagtgatcatgacgatcgtctgtttaaatttgtcgctggtgattttcagaagtcccagtacatcgagactcgttttgctgtccaggtttcccgtgggctcatccgcgaggatgatagccggttttgtcgccagcgcgcgggcgatggcgacccgctgctgctgaccgccggagagctggcccggaagactgttgatcttctgcgaaagccccagcgtctcaataatactgtcgatatgagctttatccgcttttccgccgtccagctcgatgggaaggacgatgttagcgtagacattcagaacgggcaccagattgtagctctgaaagataaaaccgatttttcggcgtcggaaaatggtgagttcgtcatctttcagagaaaaaatctcttttccggagaccgtaacggttccggaggtggggcggtccaggccgccgatcatatgaagaagcgtggatttgccgctgcccgaagtgccgacgatggccacgaattcaccgtcctccacggagagattgacgccatccagcgcctttactccagtgtcgccgctgccgtaatattttttcaggtcctttgtctctaaaattcccatgtaaaatcctcctgtcgcaataaaaatagtgtgtgcggtttcccttgcacacactattgtaatagctgattctttctgaaatctgtcggaaatcttacagttttgacagatttgctgtctgcttgggcaggaaaacggaaaagacggagcctttttccggttccgaactgacttttatatatccgccctccatagagatgatttctctgcagagatagagtccgattccgactccaggctcttccgcagtccggggggagcggtaaaagcgcgtgaagatcttcgcagtctcttcttcagtcatgccgatgccggtatcggcgatatccacgcgtacaaacaattcgtattcacggacggaaattcggatatttccgccgttgggcgtatatttgatagcgttgtccacgaggttggaaatcgcttccagtgtccatttgaagtcaaaaaacgcacagatttccttctgtggatttctctcccgggggttttcctgttccccggggatttctccgtctgccgtatcttctgcggctttcggatttcttggactttctgggtttttcggatttggcgcatattcccggttctgcctgaccggttcatgatcctcggctccgccgggcatactatggatggaaagacatatatttttccgtctcgcggcggctgaaaaatccagcgccttcagcagttcggaaatgctgttttccttcgggacaattttgataataccgttttccaggcgggaggtcttgatgagagcggcgatgagaaaatggagtttttcggtctggtcttcgatctgcgtcaccagatttttcatgtccccgttcatttccggcgtctccgccaaaagctgagtatagagcagaatattcgcgataggagtcttcgtctggtgggagatatcgctgaccagtgtcttcacggtgtttttttcttcggtgacacgtttttgcgcgatttcgcccgccgccaggtaacggtacattttggactccagctgagagagtttttcttcggaaaaacggctttcggaaaaagtgccgtcgatcgctgattcgatcatagcgtcgagatgttccatgagactgcgcgttttccggcgcagaagaacggcggcgatcagagaaaacagcgccgcagcggcaaagaaagcggtaaaaaagtagatcatcgtcatttctcccatgtatagccgacgccgtagattgtctttaccggaagtcccggcagttttttacggagccggttgaccgtcacggacagagcgttttcttccacgaattccgggccgtcggaccagatccgattcagaagtgtttcgcgggataggatgacaccgcggttcgaaacgagcgttttcagcagtttttgttctgttttgctgagttccgccggctcgtcgcccgaacggaagatcatattttcgaaatcgaagaaaaactctccctgtgagaagacggaaccgtccgtctgttttctgcggagcaccgcattgacccgcgcccggagaacagccagggagaagggcttcgtgatataatcgtcggcaccgctttcgaggccggctacgatatcgatctccatatcgtttgccgtcagaaagatgacgggcgtctgacagaacccgcgaatctcccggcagaagtccagtccgctgccgtcgggcagattgatgtcgagaatcgccagatccggtttgaggtctatgaaccggcgggcttcttcgagagaataagcctgcaggacttcgcttccggaaaaagacagggcgatgccgtcgttcaaagctttgtcatcttcgataatcaataatttcatggtattttcctctcaggaatgcactccggtgaagccgcataaaacagcggaaaaagaaaatcagcagactctgcgggagagtctgctgcgatgttttttaacgcgaagctacagtgtcagagaaggtgcggtatagactctcgcgccaagctctgcatccagcgcatagagtcctttcgggtcggagccgaataactggaacttcttgagatttgtctccgcggtatcttcttcttctccctgttcttttacgaaccagtcgaggaactgcatcgtgcggaaatcgttttctttcacgcattccgcgtagatgttgtgaatcagagaagtgacgtagatctcgtgttcgagaccgaatttcagcggatcctcgaaggatttgatctctttgtccggtttgtcgatggctttgagagtgaccggcataccgttgtttctcagatactccagcatgagcatcgcatgatctctctcttcctgtgcctggatgaagtaccagttgccgtagccgctgagaccctcatcgtagtagtaatttgaaaaatcaagatagagataagcagaatataactctttgtttatctggtcattgattaaatctgcaactttctggtttaacattttaatcgtacctccttaaaatttagattatcctttgtaagctacaggatactgatcctgtcagaatagtataacacacagagacggagttgaaagaaaaaaatccacgaaatttcacggttttacgggaagtattttttgtgtttccccctgtcaaaagtttacttcgccgaccgtgtaggttacaatagaaaaaaagaacggcgccctgcaggatgcggtcgggaggcgcttagagaggatagaaatgattacaggaaaacagagaagctatttaaaaaaaatggtccatgcgctggagccgaccgtctacatgggaaaagccggactgacggaaaatgtactgcaggaaatggacgattatctgagggctcacgagctgctgaaagtgaaattgcaggacggatgtgttctggactccaaagaggcggcaaacgcggcggcagaggaattgggagccgagtttgtccaggccatcggaaagaaattttctctctaccggagatcggataaaaatctgattgaacttccgaagaaatagaaaaaacgcactgctgcagtccggttggagaattatgctgcagcggggcgaatcgtggaggagagccgcaggagcgttaccgtttcgggggaaagcggcgcgacagcaggaaacgaggtgtacgtgatgaaaaaggtactgttgaaattgtcggcattcatactcaccgtcgcccttacagggacaccggttctggcggcgagtctcagcgatttctccgacgccggttctcactgggcgtcggaggcgctgggcagagccgtcagcgacggagttttaaacggcagcggaggcaaactgaatccggatggaactctgaccggtgcggaaatggccgccattctggtgcggcgaaccgatgcgcagcggtggagcagagcttatccgggcacatcttctgccgactggtattatatggcgtgcgccgcagcgatggaaaacggaattctgccgcaggacggaagtattgctccgggttctccggtgacgagagctgaggttttccgctcttttgcgggggcctatgatttcgatatggagacgtcggatctttctgtgctggaacgctataccgacgcacagctgctgtccggcggggacgcttccgcggctgccgctctgacgcaggcaggcatcctgacgggaaatgacagaggagaactggggcctgagaagcggattacccgtgcggaattcgtgacgatgctttaccgtgcggatccgatgtatgacagcagtatgaagattgttctgaaagcggatcatgtcgttccgggcggcgatatcagggcctccgcggcatttgcaggcgtgtcggagccggtggtgtgtgaaatgcagtggtatctggacggaaagccagtagctgaatatcacgcttcagagaagaccgtcgcggcagacaccacgtcggctttcacgcagaagctggacttttcacgatacatggcgctgtctcaccgcgtcggcctcggtctggattacatcgacgatcagagcggagagaccgtgcgtctgtatacggaaaagacgataaaagtgaccaactacagtgcgtcttattataatcagctggaaaatcaggagctctacaatcaggcgctcaatacagtcagcacaaaatatacaggaaattatacttcttcctataacatagactattctgcggcgataaagcaggctttcgtcaacgccaaagggtattccagtaagacggggtatctggtctggaccaatctggcgacgcagaaggtgaatatctttaccggttcaaaaggagactggaagcttctgaagacgtttcgctgcgccaccggcgccagagctacgccgacgccggtaggggtgactcatgtcacatacaaacaggcaggttggtatacggacagttatatctgcaaaccggtggtgcggttttatccgggaaccggctacgcgtttcattcgagattatattatcctgacggttccggaagattgaaggacggcgctatggggtatccggtatctcacggatgtgtgcggatggaagatatcggaataaaatggatatataacaatgttccagtcaatacgacagtagttatctattagcggcaggctgatgaaacgaacgggatgaccggagataaaatgctcgtatcggagggcacggcggcatttctgcgggcagattggatctgcgggttctgtgcttcggccgcccgtccgggtctgagggtccggacgggcggccgaagctgcaatcatctcaagaggagaaaagatgaaatcggaaagtctgatggggtatctgggagattatctgcgctggagaggagacctgacttttgaccaggctcctttttgtgatgcggacagtctggcgctgacgatgctgtcttatctgaatcctgaggaagtgacggcgccggagcagaagattgcgggagtccggctcagtgagctggcacagcgttatgcccgtttttacacaccggcaaaaaagccgggaaaattgtcgatgacggccagagctccggaacttttgaagctgatggcggcgtcgaagcgattcgcacgcgtcatactggaggattataacagttatgtggacaccgagctggaggggcagtttgccgctatgaccttttcctccggacgctgcagcatctatatcacctatcgcggcacggacaatcatgtgatcggctggaaagaggatttcaatatgtcttatctcgagagtatcccggcgcaggacagcgcagtccgctatctggaagaacagattgcgaaggagcggcatgtgtcctgccaggggagacgcgttattctcgggggtcattcaaaaggcggaaatctcgcggtttatgctgcggtctgcgcggatccggagacggcggaacgtattttagaagtgcacaattttgacggaccggggttttcagaggaattttttgagaatgagggttatccggttttaaaagaacgaatcgtcaattttatgccccagggctccatcgtgggaaaactcttcgagcatcgctcgcccgtaaggatcgtccgaagcgatgctcgcggcgtgctgcagcatgtgcctttcagctggcagattcagggcggcgattttcttctcgaggaggatttcaataaatcgagccgcatctttgaaagcgctgtggcctcctggctctccggaaaggatgacgaagagaaaaaagcctttatcgacgcgcttttcgacatgctggaggaatccgggatcgaaaagaccgaggatctgtggagtgacaagatgaggctgaagccggttttccgcattctgcggtcgatgaccagggaggagcgggacagttttttcagttttttcaccgcgctgctcagggagacggggattgcgattcagaagaatctctttgcggatgaggaaatgtccgaggaacggtaaaaaggatattttgcagccgccggatctttgagagactccggagaacggggcattggaaagcaggatagttatggatttaatgtacagaaacgcatcccggctggatgcgagagattatgccagcggatatctgtatctggcactcaatatcggggaacagatgctgatgtgcggcgctgaagtacatcgcgtggaagactgtattcgcagaatctgcacggcttacggggctgtgcgcgtggacgtgttttcgattacttccagtatcgtggtgacaatgtacgggccggatttcggttctctgacgcagacccgaagaatctcgaggcaaaatacggatatgtatcgtctggatcgtctgaatcagctttcccgtgatatctgcagcgcggtaccgcctctctccgaggcggcggacgagttgaagtcgattaagaactctccccgctattccgcaggtgtgcggctgattctctacgccgtggtgtcggcgtcttttacggtgtttttcggcggcaattggcaggatgctgtggtatcgggaattctgggaatgattttgatgtttctggaacgtctgctggagagctatgatgtcaatccgtttctctccgcttttctgttttctctgctgggagggttcggagcgattttcgcggtggagcacggtcttgcggattccatggataagatcagtatcggaaatatcatgctgcggattccgggaatcatgctgacgaattccatacgcgattttttcaacggcgacacgatgacggggattctccggtttctcgaagctgcatttttatctatgacgatcgctttcgggtttgtcgtagctgcagcgatctggcagtaggaggtggaagtatgacaccgtattttattcagctgtcagccgcatttatcggttctctgtcttttgcgatgttttttaatgtccggtggggcaaacttctgtcctgtgctttcggaggctgcgcttcctgggggctgtatcttctgttgggcgccgtcctatccaacgatgtcacccggtattttatcgtctctatggcgctgactttctatgcggagatcatggcccgagtgaaaaaaacgccggatacagtctatattatctgtgcggcaatccctctgattccggggggatctctttacaatacgatgcattgtgcggcggaaggcaaatgggcggagttctcagagaccggaatacatacgctgcttctggcggcggcgatcgcggtagggattctctgtatgatgacgattcttcatatctatgccgtcgccgttcagaatctgaagaggatcggaaatgcgtgcatggaaagaggagcgcggccgcaggggaaatgcgcggcacagggtgagaaaagcaaagggaggaaaaatctttgggattttattccgaagacagaaagagaaaagactgagcgttcggacggcgccggggaaccggcggaagaagaggtgcaggaacagagttcggacggttttcccgccggcggaagaagcaggagaaggtagaaaaaatgaatgcaggagactatatcagggaacgtgtgctgctgtttgacggcagcatggggacttatttcgcggaaaaataccgggactatgccggagcctgcgagacggcaaatcttcgggatccggagaaggtgaaggcgatccacagagaatatatcgaggcgggatgccgggcgttgaagacgaataccttcgcggcgaatattttcagctgtgggggagaggagaagctgctgtcggatacgatagcgtcgggagttcgtctggcctgtgaagcggcggcggagaaggaacatctgcggacagccgggcaagatgcggccgcgcgtgacccggttttcgtctttgccgatatcggaccgatcaccggccgggaagacgaggaaatcgagcgggcgtatctgcagttagcggatctctttttggaatacggcatcggaaactttcttttcgagacgaatgccgcggcggatcatctgatccgcacagcagaatatatcaaagagaaacgtccggattcgtttatcatcgtctctttcgccgttcagccggacggctacacccgggaaggcagttacatcggggatctcttccgtatcgtgaaagacagtgagtccgtggacgcctttggcctcaactgtgtgtccagcgctcttcatatgaaggaactgatgcagcggattgatttctcaggaaagacgctctgtgtgatgccgaacgccggctatccgcgaatcgtggggaaccggatgttttatgacagcgatcccggttactttgcgcaggtgctgaaggagatcgctgatgcaggcgccgggatcgtcggcgcctgctgcggaacgaatccgcagtttatcgctgcggcggcttcagagttaaacgtaggcgccgcggcgcatccgaggatttcctgccgttcttcaggacaaaacaccggttttgcccgaagctccggcagatcgccggagagtgcgggactcggcgaagatgcgggcgcgtctttgccgaaaacggcggatgatctgaaggaggctgagacggctgatgcccgaagagccgaggcggagcgcactcaggcagccggggacaatcggctgtggagtaaattggcggcgggagaaaaaattatcgccgtagaattggatccgcccagagacgatgacggagcgaaatttatgcagggcgcatggcagctcaagtcggcgggagccgacgccattaccatcgcggattgtcctacggccagagcgcggatggacagcagtctgatggcatgcaaaatacgcagagaagtggggatcgatgcgattcctcatatgacctgccgcgatcggaatctgaatgcgaccaaggctcttttgctggggctttccatggaaggcattcggaatattctggcggtgacaggggatcccgtgccgacagcagagcgggatgaggtgaagatcgtttatcagtttaattccaggagactggcgcggtatatatcttctctcaacgaaaatgaattcagcagaccgtttcagatattcggcgctttgaatctcaatgtccggcgttttgacgttcagttaagtatcgcgaaaaagaaaatagaaaacggggtttgcggctttctgacgcagcctgttctgacggaggctgctttcaacaacctgaagcgggcccgcgaagagttggatgcgaaaattctgggagggattattcctgtggtgagcagcagaaacgcccggtttatgaacagcgaaatcagcggtattaccgtagatgataaaatcatccggctttacgaggggcggagccggcaggagtgcaccgacctggcggtaaagatttcctcggaaatcgcggggcagatccggccttacgtcgacgggtattatctgatgacgccgttttaccgcacggatatcatcgtggagctgatccgccggctgaaggagctggaatgagcttttaagcggggaatgggtgtaacggcgcgtatgcgttattgtcagagaaaagtaattgagcgtcagctgattgcggatccgccggcggacccgcttgaagccctgaaccgggtttgctcacaaattcgcttctgcgtattttacgcggttttagctgcattgtaaaatacgacagtgaagctcgcggagtgagcggagaatgtatcattggtattcatcatctgcaaagctcatgcgttcttgaaaaaagtgattttcaggggaggagtttccgtatgccggagacttctcctttttgtgcgatcgtttgatcagtggagtgttttttctcggaggtacaaatttgtatctgtattttgccggaaaataaaacgatgtgcctgaattcttcagacacatcgtacagcgctccggctctgaaagacggcagtaaatttcttttgccgaaaattgcgatttgcagtttaaagttttttgtttatgacgatctctctgccttcttttcgccactgtctgaattccgccgctgctgtgaaaagcgcgtcggtagaggaattgagcgctgtctccatggaatcctggatgactccgatgatgaagccgacgccgacgacctgcatggccacatcgttggagatgctgaacaaactgcaggcgagaggaatcaagagcagagaacctccggcaacgccggaagcgccgcatgcggagatcgctgcgataatgctcagcacgatagcggtagggaagtccacatcgattcccagagtgtttgctgccgccagcgtcatgatattgatcgtgatcgccgcgccttccatattgatagtcgcgcccagagggatagagacggagtaattatcttcgtccagatcgagggatttgcacagctgcatatttaccggaatatttgcggcggaacttctcgtaaagaaagcggtaatgccgctttctttgatgcatttgaacaccagaggatatggatttttgcggatgcagaaaaatacgatcagaggattgaggatcagggccacggcgagcatggaacctaccagaagcacgatgagttttccgtattccgtaaagatcgctatgccgctgctggtgaccgcagtatagacgagaccgaggattccgaacggcgccaggctgataatgccccgtactactttcgtgagcgcatcagaaatatcgacgatagtgatcttggtggattccgcagccattctcagagcgataccgatgatgatcgcccaggccaggatgccgatgtagttggcgttcatcagggcggctaccggattgtctacgattttcatgatgagatcctgaagtacctggaggatcccttccgggggagcattatctgtgactgcgtccgtcagagtaatcgagaggggaaaaataaagctgacgattaccgagacgacggaggccaggaaggttccgagcagatagagcaggatgacgattttcatgctgccttttcccgtcttcgccctgcacagcgaaccgatgaccagaaagaaaatgaggacaggcgcaatcgccttcagagcccctacgaacagatcgcccagaatgctgatcgcctgagctttgggaactgcgacagcgaggattacaccgaggataagtccggcgatgatccgtttaatcagactgatgctgttccactttgagaataatgttttcattttgtctctcctgtgaaaaatgatgctgcgtatgtgttgtagaatgatggaatagttgtttttatgaaaacaatgtccaaaaattacaagtaaaagtttatcagaaagacgtctgttctgcaattattgtattatttttttgaagaatatattaaattcgtataaagatgtacctgcgcatggtatctgccgcgatcggataatcctgccgtctttcagggcgccgtccgattagaacgtgggtacggtgcaggatatcattgcggagtatgaaaaagacggctctcttcgggagccgtctttttctgtttttgtcctattttatcttttttctttcactatttcgttctgtttgcccaaatcacagagatattttttctctattcctgcgtttctgacggcaggtaaaatagttcttcatgacgtccgatgctgtcgaagagattgttatactgtactttctcatagttgtccagaagttcgtcgtattccgatttctggtcgtaagtgtagtactcgccgtccgccgtgatgtagccggtggtgtcgatgaccggcagataacggtagagcgcagacaggtactcgttgtacttcggcattttgagatctgccgtctgcaggagcaaagtggacagataattggcgctcatcttgtccacataactctcttcgatgttgtaattggcccagatgacaaacggcgtggcaaagcgcttctgccgctgctccaggctgagatcgctgatttcttcgcccaaaaggctttccacaaacttcgtctctacattcggctgatgatctccgaacatgcagatgatcgtcggttcttttactttgctgaaatattccaccagatgtttaaatgcctgatcggattcgtacatcagcgataaatagcggttggccgcaggatagtactcgtccatggaggtgaggcgaatctgctggttgaagttggtgtagccgctgttgtaacttccgtgattctgcatcgtcacgttgaaaatatggaatggcttcgacgtatcgcgctcttcgtacatctgttccagtagtttgtaatcgaactcgtcgctgacgaagcttctcagcaatacgttgtcattcggatactgcgctttgaccgcggcctgaaaatcgaggaaacttttgttgccgttgcggtattcgtcgatggcgtcgttatcgataaaagattcgatgctgtcgaatctctcgtatcccagcagcggataattcacatctctctgccagctggtgcggtaatagacgtgaagcgccgaacgggagtaattctgagccgccagagtctgagcaagggaaggaagtttgctctttatatacagctcataggcgttgctgcccgcggtcaggaatgccatcgtgttgcctgtgaggaattcgaattccgagttgctggtaccggctccgttgaccggcatgtacagattccccttgatcgtatttctggtaagactgcgggtgaacggcatgtagtctttgtttgtggcgaattcgccgagaacccgaagatcagagaacgtctcgttc

SEQ ID NO: 1017 - DNA, 19933 bp, Unknown
  16S sequences of unknown bacteria
cagcttaaacggcgaggaatatctttatttaatgcctgctgaacaattcaaaagtgccttaacccagcatgttggtgtaaacttttgaattgttcaggtgcaaggtttttgcgcaattttgcgaaaaaaccttgcactttaaaaagaatcacattttgattctttttaaaatcaggcgacaatcaatggatactgacggtcaaaacaaaggttttgacccataaaatcgagattttaactcgattttatataattgcatttgctaatgcaattattcagtagacattatttaaaaaatattcagggcgatgttgaagaaatagttgacaaaaacggtaattctgtggtaaaatatgcctataatgagtggggaaagctgctttccgtaaccggctctatggcagctgccgtgggtcggataaacccgataagataccgtgggtattattacgacggcgaaaccggatattactatcttcagagccgctactataaccccgatatttgcaggtttattaatgcggatgaaccgagtttgattactctcggcttttgtagtgttaacaacataaatctattttcatattgtaacaatgagccagttaataatattgacccgaatggacattgggtggcaagagctgttatttccggtataagcggtgctgtatttggtggaatagcttatttaattggtcgagcttttagaatcagcggttggaagttggcggcatttactacggtatttgttgcggcaggcataacaataggagctatatggggcccaaatatattatatagaatcaattctttaataaagcctgtgctatactttttttcaaacccgggaaaagtttattttggggtaaaatttttatccgttattcaatttgaactacataacccacatcatgggaaatcaattcattttgtgattcgaattttgaaaaacggtagatggaatcaaatattggaatgggttttgaagaaatgaaaattttatatgatattgagccattaaatatgacaaatgattgcaaagagtcgattagtgataatggatgggtgacctttgccatctgctcacatgaaagtattattctttccggaattcgtgaatatttacaaaaccaattacaaaaaagacaactgttggtttggtcaagagcagatgaaattgtattaaaaaatttaaaggaaagatatacagtcacctcttgcacagaaagtcagccacatggttttttgcgttattcaatgccggagattctttttgttctaaatgaatatgatgacatagaatttttgatttctaattttaatcaactatcttctcttgaaatttatgtattaaagaacagttgtattgaaaattttctttctgtagttatgcaacaccgtaaaaagtataatagagcagatgttgatttttttttgaataattcatatgctattataaacaaaagcggagatgcagatgaaatagaaatgattgttccgaaaaaggattttctgacgagtttggagttttatttatgaaattccatagttatatgttttaaataattaatcaaagctattggtttatattgatgaaaagttcagtaagcatgacgaacaggcagattaatttcggctaaacaaatgtaccgcaatgcggctgcggtacatttgcctataggctttaaggggatgttgaaaatgaaaaaggcaatatctttattaatgctgtgcgcggttttggtatgttgctgcggctgtaattggaatcctttcgttaagcaaccatttctttatgacaatagtgtttggaaatgtaaagaacctgaaatatcatattttgttaaaacaagatatgacgaagagcaaaaaacagatatttccgatgattatgcggcaacttttatagacggaaaaaagtggtaatggatttcggatttttatataacactataaaagtatatgagctttcagacgaagattcaaaggaatttacaggtaatacactcttcaccggcacatgcaaatattcaaaaaccaaattcacaataaagattgataccgaaacggataaccttttcgacggtcaatatgacgaactggtattcgttcgtcaggaagacgaacaggcggattgatttcagctaaacaaatgtaccgcaatgcagctgcggtacagttgcctatcgtacttttgggggatgccgaaggtgaagcgcaagtacatattgtttatatccgctgcggtcttggcggctgcagccgcacttgtatttacatattggtttttgaccttgaatcgaagcttttccttgccgcgggcttttcccgagccaaatgcggaatggctctcggcgaaaccgaatataaaggtcttttcggatgaggaaggcaatttgtccggtgaattttatattgatgatgccgtcttgaatttgagattttacttaagagacgattccgtatcggtttatcttcccgaatatgaagattacctattgttcggcaattactcaattaagaaaaacggagatataattattaaggatatttcctccgacagtgaattttgggattccgatattgcggaaatagcattgaaaacgctcaaaaagtgattttttaatatcacagaggtgctgaaaatgaaaacaaaaaagaaaattttgctttcggcggtgccgataattgcggtcgcggcagtgcttttatcgctaatgcttcttcgcggcggcaggctggcagtcgactccgaagagcctgcggaagtccgctttgccgattcggtatataccttaagctccgatgatacggaagaattaagggacatttttgccggcaaaaggctgtatcgcgataatccgtcatgcggctttgatgaaaacgcatcggttaaattcggcgactcgcaaaccttttgcattgcgaaggatacctgcccgatagtatattggaaggaaaaggacgaatatataaagctcggcgaagacgaaaaaacgcaattatacgatttgttgaagcctttcggctttttgttcccgtgtgtttagtgtgagttgaaagagcggtgattgctttgcgttttgagtgaatgttgaaaatgaaaaaagcagattgccgccgttcgggggcaatccgcttcgcaggcgatattaaaccgcctttaattattaataataggttcgcattcggagccggaatctatttctttctctttgaattctgatatttctcgttgataaagctgcgtatctcttcgacatcggctttcggaagattgcgaagaacggtcagcagattttcttcgttcttggtagtcacaaatgcaggacgcgctgtgggtatataaacaggctcgtgcattgcggtcggcgctttgtacgcggcttccgccgattcggtctcggcttgcagatccatcggatcgcggagcaaaaccgcagggttaacgccgaatacctcggcaatcgccataagcttatctacactgatattgcccttgcgctccatctgcgaataggtgctgcatttcattccgagacgctcagccgcttcggtctgtgtgagattagccatttttctgtatatcgctacgcgttgattgattgtgtaagccattttttcatttcctttcattttatacttgacttagccaagattaattggtataatcaattggtatgaggcacgctgaagtggctcagttggcagagcagctgattcgtaatcagcagatcgtgggttcgagtcccatcttcagctccattttcgcagcaatattattgctgcgatttttttgtgtgatttatgctattattatatatttgctgtcgaataatgtcaagctatattttgtgaacaatctgtgtatattttgatttttttatgttccgggcggcaaaaatagcgttttgattaccgattttctgtttttagcgcctgtttctcaaaaaaaagttaccggcagggcgggcggacggcataaaaaagccatgctattgcatatgctcccgcattttaacaaagaatcataatacgaacataagagacgggaagcggaggtgaaaccgtagaaagaggaatgcttgcagactgaacaatttaacagtatccgaaatatttaaattgtaaatgtgaacaaagttttaaaaaaattgcgttttttgttgactttgggcgtatcgtgtgttacgattacagtaatgaaaagcttaacaaaagaatattgatatttgccaatataggtttggattaatggcccaaatgtttctaccgcacgccttgtaagttgcgactattggtaaggtcggctttagctttaatgccgtccttaaaaccgttttgtatgttttattggcaagcagactttaataggtctgttttttattttttatataaggagctcgcccgatgaaagctttagaagaaaaaattctaaaagagggaaaggtacttcccggcaatattttgaaggtgggttcttttttaaatcatcagatagatgttgattttataatggagatggggcgcgaggccgcgcggctgtttgaggatgagggaataacgaaaattctcaccatagaaacctccggaatagccattgcggtaggcgcgggcgctgcgatgcatgtgccggtcgtatttgcaaagaagcataaatcaagcaatgtttcgggtgaagttttaagcacggtggttcattcctatacacacggaacggattacaccgtggttgttgaaaaggattacataaagccggacgataaaatattattggtagacgatttccttgcgaacggcaaggcgcttttgggacttattgatatagccgagcaggcgggtgccgaggttgtgggcgcttgctgcgccattgaaaagggctttcaaaagggcggagattcgctccgtgcggacggaataagggtcgaatctctcgcaattatagacagcatgagcgacgattcagtcacattccgcaaataaaatacggataatcgcggtttaccgctttatcaaaataaataatttttcggaggaagaaaattatgaagaaaattacggcaatgcttctctgcctcgcaatgctttttgcttttgcaggctgcggcagcaaggacacaggctcaggttcaacaggcaacaacgcaaaaaagggtgtcagcgaggatattcttccgcgtcttgacattaaatcagaggttaccgtacctgacgatttcaaaatcggtatgatttgcctgcacgacgaaaactccacctatgataacaacttcatccaggctttaaagtctgttcagaagggtatgggtcttaaggacgaccaggtagttatagttaccggcatcggcgaagacagcaagtgctacgataccgctgttgaccttgccaagaacaagggctgcaaggttatattcgcagattccttcggtcatgagtcctttatgaagcaggcggctcaggagttcccgaacgttcagttctgccacgctaccggtacttcgggcaagagagccggaattgccaatttccacaatgctttcgcctctatttatgagggcagataccttgcaggtatagctgccggtatgaagctcaacgaaatgattaaagccggcaagataaaggctgaagaggctgttatcggctatgtaggtgcttatacctatgctgaggttatctcgggtatgacttctttcttcctcggcgcacgctcagtttgcgaatcggctacaatgaaggttcgctacaccggctcctggtacgatcagggtaaggagcaggaggctgctaccgctcttattgaaaaggacaagtgcgttcttataagtcagcacgctgactccctcggcgctcccaccgcttgcgagcttgcaggcgttccgaatgtttcctacaacggcagcacctattcagcaggtaagaatactttcatagtttcttccgctatcaactgggctccttacttccagtacatcattgagtgcgttgttaagggacaggctatcgatgctgactggtgcggcgatatagctacaaactccgttgttcttacaggcattaacgagggcgttgcagccgaaggcacagaggctaagattaaagaggctatcgacgctttcaaggcaggcacactcaaggtatttgctaccgataagtttactgttgacggcaaaaagcttgaccagtatttagctgatgttgacggcgacttcaagggcgagaccaatgtaattcatgacggctacttcgatgagtccaacgcaaagagcttccgctccgctccttattttgatattattatcgacggagttacaaaccttaataaagaggtttaatcggcgttttagacctgactatcccacacaaggggaatattttccccttgtgtattttgatttttaaagcatacagggaggatacttgtgaacgcgcttgaaataagaaatgtaacgaaacacttcggtaaggtagtcgctaacaaggacattaatcttacggtggaaaagggcgaaattcttgccgtgctcggtgaaaacggatcgggcaagacgacgctcatgaatatgattgcaggtatctaccacccggatgagggcgagattcttgtgaacggcgaacgcgttgtaataaactcgccgaaggacgcctttgaccttaagataggtatgatccaccagcattttaagcttgtggatgtatttgacgctaccgaaaatatagttttggggatcgaccgcgataaacgcttcaatcttaaggaagccgcaaagcgcgtcgccgatatttccgagaaatacgggtttgatgttgacccgaagaagaaaatttatcagatgtcggtttcggaaaagcagaccgttgaaataatcaaggtgctttaccgcggagcggatatactgatacttgacgagccgactgcggtgcttaccccgcaggagaccgaaaagctctttgcggtgctgaaaagaatgcgcagcgacggcaagtccattataataatcacgcacaaaatgcacgaggtgctctccgtttccgaccgcgtggcgattctccgccgcggcgaatacatagatacggttataacgaaggaaacgaacgaagccgagcttaccgaaatgatggtgggcaaaaaggtttctcttaacattgacagaacagagccggaaaataccgcggacaggcttatgataaagggacttgacctttacagcgaggacggtattaaggtccttgacgatatatccttcactgcaaaaagcggtgaaatactcggaattgcgggcatagccggaagcggacagcgcgagcttttggaggcaatagccggtctgcagagggttcacagcggtgaaataatttacaataatccgaagaccggagcggatgaaaacctgcgggacaaaacacccatgcagattcgtgagctgggagtccgcctttcgttcgtccctgaggacaggctcggaatgggcttggtaggcaatatggacattgtggataatatgatgctgcgcagctatcgacgcgggcgctcgcttttccttaaccgccagtcgccgaaaaagcttgctgaggatattataaacgatttggagattgccacacccggcgctaacacccctgttcgcaggctttcgggcggcaatgttcaaaaggtgcttgtagggcgtgagattgcgtcatctcctaccgtgcttatggcagcgtaccccgtaagagggcttgatataaactcctcttatatgatatacaatcttctcaatcaacagaagaaaaacggcgttgcggtcatattcgtcggcgaggatctggatgttttaattgagctttgcgaccgcattatagtagtaaattcgggccgagttaccggcattgtggacgcaagagagaccacaaaggaagagctcggacttttaatgacaaaatcgggaggtgcggaagatggcaggtgaaaagaagcttaagcgcgagccgtttgcttatatttccaaaagagacggcgtttcccttacctatcgaataacagtaagagccgcagcaatcgttttggctcttgtggtttgcggcattgttacaaaggtgcttacaggagacaacccgatctcaatttatcagacaattgttcacggtgcggtcggcaagggcagactgctcgttacaattcacgatattgcaatacttctctgcatatcccttgcggtaacgcccgcgttccgtatgcgcttttggaacaccggcgcggagggtcaggtgcttataggctgtcttgccaccgccgcatgtatgttttggctcggcggcaaggtgccgaacggcgtgctgattcttattatgacggtcgccgcaatagtttcgggcatgatttggggcgttatcccggcgatattcaaggcacagtggaaaaccaacgaaacgcttttcacactcatgatgaactatgttgcgattcagcttgtagaatactttcttaaaatcgcagataaaagcggttcgaatgttgtgggtcccgaccttttatctcacggctggctgcccgatatttttggggtcaaatacctgcttaacatcataattgtggcggttatcaccgttttaatgcagatatatcttaaatacagcaagcacggctatgaaatttcggttgtgggcgagagtgaaaacaccgcccgctatatcggaataaatgtcaagaaggtaattatccgcacaatgcttgtgtcgggcgccatatgcggtcttgcgggtctcctgcttgtgggcggctcttcacactctatcgattcaaatttggtgggcggcagaggcttcaccgccataatggtttcatggctcggcaaattcaatccgatcacaatgattttaaccacgctgctgctcgtcttcttggggcgcggcgcggatgaggttacctctaaattcggtttgaacggcgatttctccgatattttaaccggaataatcctgttcttcataataggctgcgaattcttcatcaattacaaaatcaacttcagccgccgtaaaaaggaggagaaataatgttaactgtcattaactttatccagcgtgctgttttgcagggcacacctttgctttacggggctaccggcgaaatcctgacagagaaatccggcaaccttaacctcggtatacccggcattatgtatatcggcgcaatatcgggcgttgtcggcggctttatgtaccaaacctcaaccgatgaggtagtgcctataatagcggttttaattccgtttttgtgctgccttttgggctcgctgctcgtgtcgctcctttattgcttcctgaccgtaacactcagagcaaatcaaaatgttacgggtcttgcaattaccaccttcggcgtgggctgcggtaacttcttcggcggctcgcttattaagatcgttaaaagcgatgttccgtatcttgctttggtcgatatcgcgcgagcatttaaaaccaccctgccgtttgcggaaagcatgggggatataggcaagatcttcttctcctacggctttatggtgtaccttgcaattatcattgcgattatttccgcggtattccttaaaagaacaaaacacgggcttaaccttcgcgcggtgggtgaaaatcccgccacagcggatgccgcaggcattaatgttacgcgatataagtatttcgccacctgcataggcggcatgatagcggggctcggcggtcttttctatgtaatggattactgcaacggcatttggtcgaacaacggcttcggcgaccgcggctggcttgccatagcaatagttatctttgctacctggaagccctcgcttgccatactcggctcttatctgttcggtgcgctttatattctattcaactatataaatgtgcccatgcagatgattccgctgattcagatgcttccttatgtggttaccataatcgtacttatagtggtgagtatccgcaagcgccgcgaaaatcagccacccgcgcatttgggactttcatatttccgtgaggagagataggcttttcggcaaaaaaatgcataaaaatttaaaacttcaaaaaaactgttgcattttccgattttatgtggtattataatttgtactgtgagtaatgtgttaggaggtgtcacgatgccgaatattaaatctgcgaaaaagcgcgtgctcgtaagtcgggctaattatgagcgcaataaagcttaccgttccgctttaagaactgctgttaagaaagcggacgccgctatagacgccggctctgccgatatggcggaggttgtaactgcagctgttaagaagattgatcaggctgcggttaagggtatcattcacaagaacaacgcagcaagaaagaaatctgctttggttacccgctataataaaataaaggcgtaatctgacacctttcggctttaccgaaggctcaatcaccccgaaggctaattccttcggggtgattttagcatggcgataaattcaaaaaaattttgcggcggtaacgccgcatttattgttttgcaaaggataattccacattccgaatttcagcaccggttgccaacccttcgctgaatgccgtagcgctgcccacagccgtacctaagcgcaaagcatagccggaatccttggttttttcatatcccgcaagaaagcctgcgagcattgaatcgccggcgcccacggtgttgacggctgtgcccgatacagcaggcatataaagccctttgccgtccgagcaggaaagataagcgccgtcccctcccatggagatgagtgcatgctgcgcgccgagcgaaatcagcttttcggcgtagatatttacattttgttttgttatctctgtattgaaaatgccgctcaattcttcaatattgggttttattaaaacggtgaatatttaagggaattcataagagcctctcctgccgcatcaaccgcgaattttatgcggctgggagagagctttctcgttatttccccgtaaatgtctgcgggaacgcttttgggaatgctgcccgataatacaaccgtattcccagcctgtgctttttcgagcttttcaaaaaggcgttctgtatccgtatccgatatctcgggtcctgcggcattgatatcggtctcattttcggcacggagctttacatttattcgggtaatacccttttcaagtcttacaaaatcggtgattgaaaaggcggaagctgcgctttcaagcgcgctgcccgtaaatcccgcgataaaacccgtcgcgaccgatggaattcccagctcgtttaaaatgaacgagatatttatgcccttgccgccgaaaaaaggccttcgcgtgaagagcgattaatttcgcccgcagctaaattttccgggtacatattataatcaagcgcggggtttagggttactgtataaatcataaattctccttataaaaaatcctccctctggagagggaggttatgctaaagcttttatacaatattaatccgcaaagccggattcgaccaaagccacaagaccgtcaagtgcttccttttcgtccgaaccgtcaacaataattttaatggtagtgccgcctacaatgccaagcgacagaacgcccaaaaggctctttgcgtttacctttctttcatccttctcaacccaaattgaggacttatactcatttgccttctgaataaaaaaggttgcggggcgggcatgaagaccaacctgattctgaataactacatctttaacacacattgtaaaatctccttcgggattaacattttattaactgcctcgttacatccttgtaacatctgatattatcattataccacatttaatgaaatcgtcaattatttgtgaataagttctaatatttatccaatgatttcggaattcgcgaccttgtatttgtgtagaattaatataatttttcgtcaaatttcgcggttttgacccctgcacggctattttaatgcctgctgaacaattcaaaagtaccttaacccgagcatgtcggtgtaaacttttgaattgttcaggtgcaaggtttttgcgcaattttgcgaaaaaaccttgcactttaaaaagaatcacattttgattctttttaaaatcaggcgacaatcaatggatactgacggtcaaaacaaaggttttgacccataaaatcgagattttaactcgattttatataattgcatttgctaatgcaattattcagtagacattattttatgctcttaatatcatacggtgtggtctggtaaacgaagtagttaagccagtttgagtaaagcagattcgcatgcgcgcgccacgaaacgaggggctgattttcggggttgtcacccctaaaataatttttcggtatttctattttttcgcccgcctttaaatcgcggaaatactcatctgccagtgtgttcgagtcatattcggaatgacctgttataaatatctgcttccctttttcagatgatacggcgtacactcccgtttccttggaggaggctaaaattttaagctgcggcactgcccttatgtcctctgttttaaaggttgtgtagcgcgactggggcaccataaaggtatcgtcaaacccgcggaatagaattgaatttttataatccacggtatgcggaaaaacgccgaacagctttttttcaagcatatatttttttatgccgtaatggtagtaaagccccgcctgcgcaccccagcaaatatgaaaggtgctgtgtacatgggtcttgctccattccataatttcgcaaagctccgcccaatactcaacctcctcaaacggcagcctttcaaccggcgcgccggttattatcataccgtcaaatgtgcggtcgcgaacatcctcaaaggttttgtaaaatgtaaaaaggtgctctgccgaggtattttttgaaacatggctttttgtatgcagaaactcaagatcgacctgcagcggggagtttccgagcagacgggaaatctgtgtttcggtttcaatctttttcggcatcaggtttaaaagcagtattttaagcgggcggatatcctgcgttatagctcttgtttcggtcataacgaagatgttctcattattcagcgttttaaccgccggcagatcgtttggaattttaatcggcattttttacctgctttcggcactgtcgagcgcctgcttaatatcgtttataagatcctccgagctttcaagcccgcaggacatacggataaggtctgcgggtacgcccgcggcggcaagctcttcatcagtcatttggcgatgtgtgctgcttgcggggtgcaggcagcaggtgcgtgcgtcggcgacgtgggtctcgatcgcggctatcttaagccccttcataaagccctccgcagcggctcttccgcccttcaagccgaagctaacaacgccggtagtgccgttcggcatatatttttttgcaaggtcatggtatttatcgccttcaagtcccgggtaaattacataagccacgcggtcatcgtttttaagcgcacgcgccacagcaagggcgttttcgcagtgccgcgccattctgacgtgtaagctttcaagccccaaatttaaaataaacgcgctttgcggcgactgaaccgagccgaaatcgcgcatcagctgcgcggtagcctttgtgatatatgcgccgcctatgccgaagcgttctgtataggttatgccgtggtagctgtcatccggggtgcaaagcccgggaaatttgtcggggtaacgcgtccaatcaaatttgcccgaatccacaatacagccgcctaccgccgcgccgtgaccgtccatatattttgtggtggaatgggtcacaatatccgctccccactcaaaggggcggcagttgacgggcgttgcaaaggtgttgtctactataagcggaacgccgtggctgtgcgcagcgttggcaaacttttcaaaatcaagcaccgtaagcgccgggtttgcaacagtctcgccgaagactgccttcgtgttcgggcggaaagccgcgtcaagctcctcccttgtacagtcgggtgatacaaaggtaaagtcaattcccattcttttcattgtaacggcgaaaagattgtatgtcccgccgtaaatagaggatgaggaaacaatatggtcgccgcaggatgctatgttgaatacggcgtaaaacgaagccgcctgaccggatgatgtaagcatagcggcagagccgccctcaagctcgcaaattttggcggctacggtatcgcaggtggggttttgcaggcgcgaatagaaatatccgcttgcttccaaatcgaaaagcctgcccatatcctcacttgtgctgtatttaaaggtcgtgctttgaattataggtatctgccgcggctcgccgttaccgggtctgtagccgccctgcacgcaaacggtatctctgttcaaggaaatcactccaaattaaaaattttacaggtatttatattaagtatactctttatttcgttttcgtcaaggtttagcgataaaaagtattcaagttccttttcgggcgaccacatcgggtagtcgctgccgaagagcaccctatccgctccgtagcggcggattatctcctttgcggtctcctttttaaggtaaggaaaagcagaggaacagtcaacatacaaattgggtgtgccgcagagctttttgcttgcctcctcccaaatagaccagccgccgaaatgcgcgcctataacggtaagctcggtataaattttaagaacgggcaaaaggcggttggggtttgaataatcgtagcggctgtctcccgtgtgcataagtatgggcaggcgattttcttcgcacagctcataaattttaaggcagcggtaatcgtctattttaaacgcctgaatgtcgggatgcagcttaactccgcgaagtcccagggacattaaatgcttaatatcacccttaatatcctcgctgtcggggtgcagagtgccaagccccacaagcttatgcgggtgctttttaacctcgcctgcaataaattcgttaatgcttttaacctggtgcggcgttgtggctaccgactggacgatatatcggtctattcccgccttatcgcccatcgcaataagatcctcaacggtgcctgagcctaccgaatgctcatgataaaaattatcggttcccgcaaccgcgcgcgaggctattttttcggggtagatgtggcagtgcgcgtcggttacaaagtatttattttccaccattatgccgttaccaccttatccgccttttgcagacctaattttttaaccgcatcctcgcgcattttgtattttaatattttgcccgcgacattcatcgggaagctatccacaaaatcaatgtacttaggcaccttatgccgcgccatatgggagtttataaactccttcatttcagcctcggtcatagtttcgccctcttttaaaataacgcaagccattatttcctcgccgtactgctcgtccggtacacctattacctgaacatccttaaccttcgggtgggtgtaaataaattcctcaatttctttcgggtaaatattttcgccgccccttattatcatatccttaagtctgcccgtaattctgaaataaccgtcgggcgtgcggcaggcaaggtcgcccgtgtgcagccagccgtccttatcaatggcgtttgcggtggctttaggcattttgtagtagcctttcattatattgtagccgcgcgccacaaactcgccgttttcgccgtccttacattcctctcccgtttcgggatttataattttgcactcgatttcgggcagagccttacccacagtgcccacgcgctgctcgatagtatcgtaaatagagctcattgtgcagccgggggacgcctctgtctgaccgtaggttataacaatctccttcatattcattttatccacaacatcctgcattaccgaaatggggcaggggctgcctgccataatgccggtgcgcatatatgaaaaatcggtctttgcaaaatcggggttctcaagcattgcaataaacattgtgggaacgccgtgaaatgcggttatatgctcggaatttatgcaggcaagcgcgggcttgggtgagaaataggggagaggataaatggttgtgccgtgggtcatgcttgcggtcatggcaagcaccattccgaagcagtggaacataggcacctgaatcataagcctgtcggcggtggataattccatacagtcgcctatgcatttgccgttgtttacaacattatagtgcgtgagcataacgcctttcgggaaaccggttgtacccgatgtatactgcatattgcaaacgtcgtccttatcgactgctgccgccatacggtaaacctcgtttacgggtacggtctttccgcgttcaatagcgtcctcccaggtaaggcagcccttttgcttaaagcctacggttataatattgcgcaaaaacggcaggcgctttgcgtgcagcggctcgcccgattttttgctttcaagctcggggcacagctctgtcatggtctctgaataatttgaatcgcggtaaccgtctatcataataagggtgtgggtatcggattgctttaaaagatactccgcctcgtgaattttataagctgtgttcattgaaaccagcaccgcgcctatttttgtgaccgcccagaaagcgatataccactgcggaatattggtagcccaaaccgccacatgagagcccgcctttacacccaaggctatgagcgagcggcagaattcgtccacatcatcgcggaactcgctgtaggttcttgtgtaatcaagcgtggtgtatttaaaggcgtattggtcgggaaattcctcaaccattctgtcaagcacctgcgaaaaggtttcgtctataagcaagtttttcttccagacatattttccggtgtgggtgcggttgtagtaaagggctgattccgcctttgaggtgtccccgaattgacttataaagtttacaaagtgggagaatattatctcgctgtcgtcaagcccctcgcaccacgcggggtcccattcaagcgaaataaagccgtcgtaattaacagaacgcagggcagacatcatgtcccccacgggcagctttccctcacctataaggcaaaagccctcgccgtcaaagtcctttatatgaacgtgctttacatacgcgcccaaatttttaatggtttcttcgggctgctcgcccgccttgaagaaggttgaatacatatcccaaagagcggctaaattatcgcttgcaaagctgtcgagaagctcgcggagtacggcggtattgctgaacgcacccgaggtctcgataaccagcgtaacgcccgctttttccgccttcggcaaaaccgcggttataaatttatttgctgtgtcactgtcgcactcggcggattttatgcggatattcggtgcgtgcagatcctccgcaattttaatgcagctttcggtttccgcaattgcgccttcctcgcatatatcggaaatcacatctatgcacggcagttccagcttcatttcataaagccgcctgacggtcgccgcagcggcatagccgtggaatgcgccgtccttatttttaaataattctccgtttatattgtgcagctctatgccgccgaatttcagttctcttgcaatattgcaaaattcatcaaagcttttattgtgccagcctttggtcgaaaatgataacttcatattatttaagcctcctcgtaagctatcttattaacggcgtttatgtacgcccttatgctcgcgcctataatatcggtcgaaataccgttgcccgaataaagcttacccgaaaagcgcagcttaacaagcgcgctgcctatcgactctttaccctcggttacggtctcaattttaaaatcctcaagctcatagcggctgcctataatctgctcaagtgccaaaaatgccgcatcaataggcccgtcaccgatgctgatgccggtggtcttttcaccgtcgcgctcaagcgttacctgcgccgaggcggaaattatattaccgttgtttataacataattcacaagcgtgtatgtgggcggcacctgcatggcggagcttgtgataattacctcaagctcttttgcgccgacccgctttttggcggcaacccggcggaattcggcgtaaaccttttcggcgtcctcgtccgataaatcgtatccaagagatgccgcagcagaaacaaccgcatcctttccgtcgccgctgtcaagagtgattccgctctgctctgccgctgtgggggctgcggtgtcggttttaccgccggtaattcttacgatctgctttacaatcctgttaagctcggtatttttaatgctcgaagaaaagccgcaggtatcgccgcagttctttatcattgcagcaaagccctcaagcgaggtaatatcgcccgaaacggcggatttaacactgcctgcgccctgctttaccgccataaccgacgcggcggaagccagcccgtttttatcgctgcacataaccgaaatttcagctttgccgcctgtatgcgcggcaatttccgaaataaatgcggcgaattcatcgggcattttttctgccgcatcatcgcttattgtgataatgcctgcgcccgccgcaattgcggtatcgatcatttcataaagaaaagccctgtccgcacgggtcgcgtccatagcgcaaaattcggtatcgccgcacttttcctttgcgtagcctacaagctcggttataaattcgcccattttaggcgcttttttatggcagatatattccattcccacggtagaaagcggcagctcgatgcgaatacgcggctttgcggcggtgcgcagcgcgtcggcggccaaatcaatgctctcgcgcgttttaccgccgcaaaccgataacacgctatttttaacaaacgacgccaccgtgcgcacaagcagggtgtcggtcttggcgttttcaatttcgggcagctctaccgcattaacgctgagcctttcaagctggcgcgcgatttcgattttttccttgaaactgaaatgcgcccctgccgtgcagagcgttctgtcacagattttaatgtttttcataacctatcactctttcttgctttttgtgttggaaattagggtataaaaaagccccgagattgctttgccgcaatctcagggacgaaatatcattcgcggtaccaccctgattaccgtttttacaaaacggtcactccgtaaggctccaacaagccttctgccctgataacggtgcacttccgtagcggcatactaaaggttccgccgctctgctcgggaacgagacttttttaccctgccgtatcggcttacaccaaccgccgactctcttaaaaccacctaaagtaaaaaataattccttcgtagcatttattgtatatcggtattttaacactgttttctcaatttgtcaagagcgggaaatgaaaatttcggctttataattttcccgtttttaattgaaaagcaatcggaatttgtataaaataaagatggtgagcaatcacccttaaaggcaacctacaacggtaggcggttagccctcttctattcagagggcacttttcgtcctctttgaaagggggcgttgccaatggggtacataacaataaacgatttgttttcgttcgggattttgattgtttcaatcattactcttgttattaccataatgcgcaaaaagaaataaccgcccaagcgaccaaactttagcggttattctttaacactaatttttgaaggctaaccgtctatcggttgcctttctgcttttattatagcataatttttcggtttgtcaagtgctctcgataaaccgccgaataagcgtttgtacagtcgtcaatgataggttacacttttctcaaaaaaaatgatgaaaactacattg

SEQ ID NO: 1018 - DNA, 1743 bp, Unknown
  16S sequences of unknown bacteria
gtggtggaagggcaaaatggacggagaagtcaaggttggtggcgtgggagacgaaaaggcctttgccgccgccaaaaaacagggagcggccaaattcttcttcatttcaaagatgaattccgacaaggcaaatttcgacgccgctcttcagtcgctcatcgaccgtttcggcaacaccgtctgccccataatcgtcccgcttgtggaaaatcacaaggttattgcctatgtcaatcttttgaccggaaacagagttacatacgaaaacggcaagccggtcaaggttccgggtgatcttgcaccctttgaaaagtatatagaacagataaacgaagccgttgccgccaccgacgacgagcttatggaaaaatatttcaacggcgaaaaattcacccaagaggagcttttaaagggcgtccccgccgccataaaagcgggcgagcttgcgccggtatactgcggtgcgggtctgaccctcgagggtgtggatctgctgcttgacgggcttgtgaattatgccccgtcggctcttgaaaagagcaacgagcccggcaaaaagggcgaggaaacagtgcagctcacccccgacgaaaacgcccccgccgttgcggttgtctttaaaaccgtcgccgacccgcaggttggaaagcgctcctatttcaaggtcatttcgggcaaaatcacccccgacagccagcttgtcaacgcccgcaccggcgaaaccgagagaataggcaagctctttttcgtgaagggcgcaaaggccgaggaggctccctttgtccccgcgggagacatcggttcggtttccaagctttcgggcgttaaaaccggcgatacactctgcgcccccggcaacatcatcaccgcacggggagtggatttccccgctccctccctttccatgtgcataaagcccaaaaagaggggcgacgaggagaaaatcgtttcgggtctcaaccgcattatggaggaggacccgacggtcgctcaatatacaaaccacgaaacccacgaacaaatcgtttcgggtctcggcgagcagcatctggacgtggtctgctcgaagcttaaaaacaaattcggcgtcgacgtggagctgtcggttccgagggtcgcctaccgcgaaaccattcgcaaaaaggtcgaggttcagggccgtcacaaaaaacagtcgggcggccacggccaattcggcgacgtttggattcgctttgagccctgcgactccgacgagcttatttttgccgaggaggttttcggcggctcggttcccaaaaacttcttccccgccgttgaaaaaggacttcgtgacagcatgaaaaagggtcccctcgcaggctatcccgttgtgggtataaaggccacgctttacgacggctcatatcatcccgtagattcgtcggaaatggcctttaagacggctgcgtccatcgcctttaaaaacgcctttgagtctgccaaccccaccctgcttgagcccatcggtatgcttaaggtgaccgttccggccgaaagcatgggcgacgtaaacggcgacataacaaaacgccgcggccgcccggtgggtatggatcaggacgacgacggtatgcacatcatcgaggccgaggttcccatggctgaaatgggcagcttttctaccgtgctgcgttcggcaacccagggacgcggttctttcaccctcgactttttgcggtatgaccccgctccccccgccgtggtggaaaaggtcattgccga

SEQ ID NO: 1019 - DNA, 4409 bp, Unknown
  16S sequences of unknown bacteria
attcagggaccccacggattctggaaattggaggattaaatagatgttggacagagcgtacggcgctctcgtgggcggcgcgatcggcgatgctatgggcatgcccgcgtcgtttctcaccagagcgcagatcgaaaaaagttacggctatattcacgattttctcgagccggagaaagacgtgcagagttatcacggcaatcttcaggcggcggaaattactgacgatacgatggaaagcgtgattatcagcgatattctcatcgctgacggcgagttcacagagatggcgttcaatcgcgccatgaaaaaatgggcggtagagcagaaaatgctggagagcacagtgatcggaccttccacccggagatatctgacggctctcatcgaaggcagagaccccaaagaaacttccggacagggaaataccaacggaagcgctatgcgggcggcgccgatcggcgtgaaatatcactatgatctgggcaaatgcatggaagcggctctcgcctcgtctcttccgagtcacggcagcaaaccggctgcggctgcggcttgtgcggtagctgcggcggtggcggcaggagtggccggaggatattctccgacagaggtgctcggtgcagcgtacgatgcggcggtgttcggagagaagcacggagcggaaattaccgctccttccgtctcaaagcgaatccgtatggccgaatatatcgtcgatgccgcaggagagaccgacatccgaaatatcatcgacgagctggttggaattttcggagcgagtatgttcgcttacgaatcggtgcctttaacgttgggaattttttatgcggtggacggcaatgcgaaagatggtatcctggccgctgtcaatgcgggagacgatgcggacaccaacggcgctatctgcggaaatatctgcggcgcttattccggggcgaaagctcttccggaggaatggtgcgtccgggtccagaaaacgagctgcctcgatcttcgcggtacggcggcgaaactgatcgaaagataactttcgggagagcgaagagaaggtgcaccgcggtttttgcggaaaagtgcatggaaaaagacagacctgaaaagaggagctgaaaaccgttctgtgttttcagctctttatttttttatacggatggagcgtgttttgcggtatgctcattttgaagagggatgattatgttaaatggaaaaaatataaaatattacaaaaaataaaaattggacgattcgtgtgatagaggtaactttcgttgggctgggaattgaagcatgtctcggtgtccaagcattttataatgattggtttatttaaaaagaaaaattttatagggaaaacgcggggcggaaatatgtaaatcaaattgcatctgcatttcatactgttgtatctaaaattcaatgaacgataaaattatgaaaatcttcaggaattcatcagcaaaaaacaaatttttccttcatatcttctgataagataacgttatacaagtaatcggtcagagcagtaaaatgcagtaagatgcacgacaggaaccggaaggccaccgacggaatgcgcggtttctgtgaccggtcggtgcagaacgcggattcgaggttcgggaaggcgtacgtaaggctgcttttaagagggggattcgaatcgcggacgacagaaagggatttgagatgcagaaaaaaaatatcggggtaattttcgggggctgttccccagaatacggagtatcactggaatcggcacatgcggtagtcagccacatggacaagacgaaatatcagccggtgatgatcgggatttctcaggcgggcgactggttttactataccggtccgacagaaaaaatagaagaagatacttggctgaacggccgggactgtatcccggcggcgatttctccaaatcggagcgattccggtctttttatttttcaaggtgatggagtgcgcaagatcaggctggatgcggtttttcctgttcttcacggcaaaaacggagaggacggaaccgtccagggcgcagcggaactggcgggaattcctctggtgggatgcggcgtgctgtcttcggctctctgtatggacaaggaccgggcgcacaggctggttcaggcggcgggcgtcgatgtggcagccgcggtggtgatcgacggcgcggcggaagagacggaactgaagagaatgacggacaagctgcgttatcctttgttcgtgaagccggtgaaggcgggttcctcttatggaatcacaaaggtttcggcgccggaagatctttttgacgctgtcgttctcgcgttagaatacgacgatcaggtgattatcgaagaaaatatctgcggatttgaagtgggctgcgccgtactgggcaatcggttcctgaaagtcggtgaagtggacgaaattgaactttccgacggatttttcgattttacggagaagtacacgctgaaaacatcggcgatccatgttcctgcgcgaatctcccgggcgaaggcggaagaagtgaaagagacggcgcaggtgatttaccggacgctgggctgccggggatttgcccgggtggacatgtttcttgcggaagacggccggatcgtgtttaacgaagtgaatacgattcccggatttaccgcacacagccgctatccaaatatgatgaaagcctgcggcatgtcctttgaggaaattatctcttcggtcatcgaactggcggtgtcggaatgagagggcggctgatcgattattcaaagggagacgatctgcaccgttactggaaattgtttcggcggcgggagagaacagaaaataaggggatgcgggattttctgaccttttgtctcaaccgcatggcccatcgtcacggcgggtatatcggaaacggagcgcagatccgcggaattccgtctctgcctcacggtcttcacggtgtctatatttcccgttacgccagtatcggcgagggctgcagaatttatcagaatgttaccatcggcgaggtggagcacgtggcgccgagcatcggagacgattgcctgatcggggcaggagccgtgatcatcggaggcgttaccgtagggaatcgcgtaaagattggagcgggggccgtggtttcttttgatgtgccggatgatgccactgtagtggcgcagccgcccctgatataccgaaaggaggcgacgccggatgatgatgtgtcataacgccgcggattttccgcaggggagggcgtggatcgagctggaccggtcggccctgcttcacaatgtcagagtgcttcgcgcgctgcttccgaaaggatgtgaactcatgcccgcggtaaaggccaatgcctacggtcacggagcggcgctggtcgccggcgagcttcagagagcaggtatcggatctttctgcgtggcatccgccgcagaggcggtagaacttcggaaagccggcattacgggagagattctgattctgggctatacgcatccgcgccagttttctctgctgcgtcactttcatctgacgcagacggttttagatcatgattatgcagagctgctcaatcgttccggcagaaaaatcgatgttcatataaaaatcgacaccgggatgcaccgtctgggggaacgatgcgagcatatcgatcatctgaaaaaaattttctcctgtgagaacctcagaattaccggagcttatacgcacctgtgcaccagcgataaaagttcgcccagagaggaggctttcgtatcagttcagacgcaggctttctatgaggcgatcgcaaagctgagagaacagggctgtgtctgtccgaaagttcacgtgctggccagttatggacttgtaaactatccggaaatcggcggagattatgccagaatcggaattgctctgtacggtatgctcagcacgagagaagacaccgaagagtgcgcccggaaaaccggccttaggcctgtattgtctctgaaggcaaggattatttctgtgaaggacgtctttgcggaggaatccgccggctatggtcttcagtttaccgcgcagcgcgatggaaagatcgcagtggcggctgtcggttatgcggacggtctgccgcgcagcctttcctgcggcgcaggcgaagttctgatccggggaaagagagcgcctgtggtgggccgggtctgtatggatcagacgctcatcgacgtgacggaaattcctgacgctgaggccggcgatatcgcggtatttatcggaaaatccggggaagaagagattacagcctgtgatcttgcagaagaggcggatacgatttccaacgaaatattgagcaggctgggcgcacggctgaagcggattatgatatagaaaagagaagcggaaaacggctgaaaagataaaaaatagagaggagagcggacgcatta

SEQ ID NO: 1020 - DNA, 3030 bp, Unknown
  16S sequences of unknown bacteria
gcgcgccgcgccgggttccttcccaaaccgcgccccttgcggcccgccgccccaccctcgatcaggaaacgctgctcatcctggtggtgctggcctttttattgcgctgccgcgccgaccgtgagctgatttgggcgctgctttatattctgcttttttagcttctttgctaaaaaacgagacccccgattcgctcggaaatgatactcgcatcgccccccaaaatccccccaaagaacaccgcgacccccgtgcagttctctccgcccgagggtctctttttattgcttcattttccgcagccgtcccgtttccatatagaccagcatgccatttctcgtataatacaaatcattatatacaatccgtataatcacagttctttccggaaggtcagcccatcgtattgctgcccccgcactgtgcgcagcttcggcttgcggcagcactcggtaaagcccagcttttccgccaatccgatcatccgctcgttgccgctccaggtctgggtatacagctcggtaaatcccaacgagcgcaggtatgccataaacagccgcagcgcgtgggtcgccaggcccttgccgcgggcgttctcctccggcaggtcaatgccaatggccagccggtcgccgttttcgtctgtgcagcagtcctcattgataaaataactgccgcaccagcccacatattccccctccggcgtgcagatctggaaggacttgcgcggcatctcgtcggacagcgactcacatatcgccgcccattcctccaacgcttttatgtacttttgcagattctcttttttctgctcctcggtcagcccctcgtattcccacgggccgtcccacagctgccactcggtctgttcggtctcccattctatccgcttcgctatgtcctcccgcttaaaatcccgcagcagcacggtatcgtccttcagtatcatttttattctcctttcagcagtcgctcctgctcctcccggcccagcgccatcagcagcgccaccagccgctgcccggctgctccgccccgctccatcgcttcgtgcagcttttcagtttcccgtgccgcatcccgcaccggcaggccgttctcccgcttgcattctgctatgccgcggcacactgccagccgccgctccagcagggccagcatctcgccatctatcgcgttgatctcatttctcagttcctgcagttccatcttctctcctcgctttctgcatgctccgggcatacggcccgcagggccggcgcggcttcgccgcgccgtaggggcggcctttggccgcccccaaaaacgcccttccgggcggtttgccctgcgggccgcccagcaccctttcgggcctattgccgccagccgggcgtcaaattctttggcgccgctcatttttacacccattcgtcgccttcgtctgcctccagcagcagatccagcagcaccagcgccgtcaccgcctcggccaccggcaccgcccgcaccgcgatgcaggggtcgtgccgcccgccgatgcaaagggaaaccggccgcatggtttgcaggtctacgctcctttgctcccgcgcgatgctcggggtcggcttcatggccaggcgcagcaccagcggcatccccgtggtgatgctccccagcagcccgccggcgtggttggtctcggtttgtatcgtcccatccgagagaataaacgggtcattctgctcgctgccacgctgcgccgccccggcaaagccatcgccgaattccaccccttttacgccggggatggcaaaaagcgccgccgccagccggttggtcaccccatcaaaccggggattccccaacccgccgggcagccccagagccacacattctatcaccccgcccagggaatcccccgccgccttggccgccaggatctcctcctccatccgggggatgagttcctcgctccataccggcagttttttttcggccagagccttcagcagctctttggggggccacaccggcagcgggatatcccgtaccccgcccaccgaaagcagccgccccgccacagtaatatttttcttcttcagcaggcccagcgccagaccgcccgccgcgcacagcagcagggtcatccggccgcccagcgcgccgcccccgctggggatggctccgccctgtaaatactggggataatcggcatggcccggccgggggatcgtccttatggccgcataatcctccggccgccggtcctcgttggcaaagcggatgaccaccggctccccggtcagcatgccatcctgcgccccgcttaggaattccggttcatccttttcgtttcgccccgtcgtcaaggggctttgtcccggccgacgccgggccagcagccccagcagggtttccttatccacgggctctcccaccggcagcccccagatcgtcacccgcatttccgggctgtggctttcgccctccagctgcagccgcagccgcctgccgtggtattccatcatccgccggtcacactcccttcttttcactcatattatgacggtttgtcatagcatctttgcattgtttccgcctgccggcggagtgctcctgggccaatcgtagtcccgcacccgcgcaccgcgatcccctcgcataccaaatttcttctcgcctgtcggcgtcacatcaccctaaaggctcccctgtgtaagggaagctggcacggcgcagccgtgactgaggggttgacggcaataattatgataaagtttcatctcgccttcggcggggcagggccttttacaaggcttaattagcaccgctcgccgcgggggccttccttttgctcctgcaaaaggaagcaaaacagggcaaaggggaaccaagctttcccctttgcaaacctctttgacgcttagctgtgctggctacggatttagatttttctggggcgaaaaatccaaatccgtactgcgcacagatgcgctccaaaggtagccgcgggcgcatctgcccccaccgccttgcggtgcccgaaaaaatcttcgcgctgctcgc

SEQ ID NO: 1021 - DNA, 31793 bp, Unknown
  16S sequences of unknown bacteria
tctgatactcccctataaaaatggctatttatcaactgtttgttgtgacatagccttttctttttctttattatggaggggcaaagcggggaaagcaagttttctttcttcctttttgtgaatacaatatggtatactatatacagagcgaattttcatccaaacccgaaaaggagaactgcctatgaccaccggttatctccgtgaaaaagacgacatcaaatattttatcctctttgccatgagccagctgcccttccctgtgagcgagccagacttgctggacatctgtctcatcgacgacgccttcggctatttcgagttttccgaagcctttgccgagctgcagagtaccggccatgtgcgccgcctggaggatgaagagggcaaggccgtctataccatcactcccctgggccgggaggccgcccagatcttccaggaggatctccccatcagcgtgcgggacaaagcccagacagccgccgcccgggtggtgcgcaagatccgccgggattcctctatcaccgccttccacacccctggggaaaacggcaccttccaggtgcatctggccatcagcgatccccaggaaacggtgctctccatggatgtgctggtgatgaacagccgccagtgcgccttggtggaggaaaatttccgccagaatgccgaatcggtgtacagcgatattctgaagatcctactggctgaaaaatcctctgaggaataaacaagaacacaagggaggtcttttgatgcgttcccgatttgtgtccctttgtcttctctttgccctgctgctttccggctgcacccttttgcaaaaaagcgattccccgccggaaaagacccaggaggaaaccgctccggcccccacagaagagcccgaagagccggagccggaagttccccaggggcccgtcaatcccctcaccgggctggaaaccggcatgacggaaaacagcgtttcccaaaagccggtgggcgtgatgatcagcaacagttccaacagtctgcctcagtggggcatctcccaggccgatgtgatctttgaaatgatcgccgaagggcggatcacccggtttctggctctgttccaggacccttcctctgtggaggccctgggctcggtgcgctcggcccggccctattttatcgatatggcccggggctttgacgccctgtacctccatttcggcggcagcgtgcccgcctatgaaaagatcgcccgggagcgaaaagagggccttatcgccatggacggcatccgggacggctgggaaggcagcctgttcgtccgggaccccagccgccggaaagaactagggctggagcacagcgtcatcaccagcggtgagcggatcgatcaggctctgagcactctggatcaggatctgtcccgcggcaccgacgcccctttcttctccttttcccaggaacacagcgccaaaaatggggccagcgcccagcgggtgcaggtgaccttctccaaaaaccacaagccctattttgaatacgatcctgagaggggcgtctatctgcggtatcaatacggaaagccccagatggacgcctggtacgatacccagctggcttttgaaaatgtgttcgttttgcggatgcctctcaccgatgtgccggggagcgaactgcacctggtggaagtggacaccaccggcgagggccagggcttttattgcagcgagggccggtttgtacccatcacctggaaaaaggccggaagcgcctctcccctggaactattcgatgaaaggggaaatcccctgcaagtgcgcccggggcgctccttcttctcggtggtcaccgagaccgacgacattatcattgaataaaagcaaacaccgctcccacagcaggggaacggcgtttgtttttgtatatgttgttatgtttcctcccgggaaggctggggctctgctttttcccggctttcttccgtttctgctttttccagctcctccggcgccaaaggctcttccattccctccggaacggcgggcgccttccgccggggccacagcatgggagccagacccagaagcagcaccatggccatgaggaagatgtagacttcgcccacccacaccccatggggctggagtatggcggtgccgaacacggtgaggaagtgcgccagcgcagccagcagcaccggctttatgctgcggcggcggaggccatggaacacaaggccggtgaggacgatctggatgatggtatagaaaatccgctccacgcctccggcggcaaattccagggccggggtgccggtgagcacctgatagacctgtaccgccgcttcctggccgaatacttcgctataattggacaggccattctgattgatggcaaaagccagcatcagattgccgaaatagctgaggcccatgaggaaaaaggtttcagcaatgctgtggcccaggccatagccgatgctgtccccgggggtgatgctccgccctttccgccccagcaccagccgtccccccagaaaccgggcggccgtttcaaaaaaggcggtggtgatggccataagcagtgcattgcccaccagactataggcaaaagactgtaccgccgggatcttataaagcagccacagcaccggcagacggaacagcgcctggagcaccgcatagaagaaaaagccggtgatcagactgcgccaggagagcctcccggcggcacacagaaccaccgctccgatgatgggcagaaaaaaggctgccgtcaaggtgaagatcatcgccaggatggagcctacgcttaccatttgttccattcctccttctgcggccaggccgccgtccgtgatatacgcatggtttttagtgtagcgccccgggtggcccctgtcaacggccacgcaccattcttcacaacttgttttcacctcctgccccatttcgtcaaaaaagtccccctttctgcccgcttcccactcctcccatcctggaactggaaaattttcttgtagagcttcgttccatatgctatactttgtctggaaattttattgcgcaggacgcgaaaaacagaaaggatgagcaagatgaagaaaagttggatcgccctattgctgacggcgctgactacggcttccctggctttgccggcgtcggcctcctcgcttccccagccccaggccgcagcggagacccgggctcaggtggaggaatacggctcccgtcccttccgggaagggctgaagccggtgctggtggacagtgtgtggatgtatatggaccagcagtccaatattgtggatctgaaccggggccgcttctcctatgtatacgacttttttgatgggctggccgctgtcatcgacaagaacaccggcaaggtgggctacatcgataaaaccggcgccctccgcatcccctgtcagttcggctaccacgatctgatgggcacggtgtatgtgggctatttcaagaacggaaaggccactgtgctgaaagaatactatccggccaaagaggatctttccggctctttccccacctattcctcgggcacctggcaggtggcccacattgacaaaaccggcgccctcaccgacagctggaagagcatggaaggcatgagccaggggctgtatctcatcggcgacaacggctatatgcccgatgaaccctatgaggaagatgtggagccgctggtcttttctgtcaccggctatgcaggagaagatgccatgtaccccggcatcggggatgaaaatgtgttctacaacggcgctgcctaccaggtgaatgtgacaaacaacaccgaaaaccccattcagggccgttacgcgctgatctcctgcatccccaatgaccagggagaggccaccgctgcccagatccactattttgacatcgatctggccccctgggagaccaaggaatacccctttgcctcctacttctccgccctggccagcggcggcttccagtttgtgtggattgcggtggaagataaggacagctttgagcaaagcgtgccctataacctggaactggatgcccagcgccgcctgctgaaagaccccggcggctggctggccgctgccatgcagtcctatacctgccggttctggcaaaccgacggcgtctttgcccaggcgctgatggacaacgaaaaagtgtccacctgggccaagaaagaatttgacgctgccaacattctgggactgatccccgccctcaccgatcagccggcctttacccaggccatcacccgggagcagttcgcccagctgattgtcaacctaactgaaaaggccctgggcaaggaacttgcacaggcctcctcggacacattcagcgacacttccagcccggccattctgaaagcctatgaggccggtatcatcaccggtatgggcgacggaacatttgagcccaagaccaccaccaaccgggaacagatcgccaccatgatctaccgtgcggtgcagtacatggaaaaagagaccggcaaggcgctgactcctgcggccggctctgtggaggccttccaggacaacgcccagatctccgattgggctgtggaaggcgtgggcaaattggccgccaacgccatcatgaacggcacctcccaatctaccgcttctcccaaacagtcctgcacagtggagcagagcatcctgctgctctaccgtctctatcagaaagtctgattctttccaacacacgcaaaaaggcccggcttttttcgccgggccttttctttgcacttctggcctgttcccgcagggcctgtgcccataggggtccccaggccttggttttttgttttcccatggggtacacaaagagtatctgcaaggaaaagcctatttattctctttcagaaaattttctacattctccgtcactttctggctcaggcgctgggtacactggattcccgatccggaataccggggcgtatacagcacatggggcaggtttgcaagctcctcatggcagccggtcataccagtctcatcgcagatataatagttctgccggcttccctccagccattttttcagcgcaggcacatcgaaagaggggccaatggcggtgttcagcaggatctttccatttcccatctgctcaaactccttttcatggagcagaatggtgtttttgttcagatgggtggagatgatctcgcatttttccagaagctccggcagcgggagatagacaaagcccttctcttcctgttccggctttctggtgcggctgtaataatagacctccgccccgaaaaactgaagggcatcggccatgaggatgccggtggtgcccaggcccacaatgccgcatttcacgccggtcagctcggtggggcgctctttccactgatgctccccgaagccatggagcagatccaccaggcggctgatgccaaactcggtgacgcccgggtcgccataatcccggatgccggtgacgacgatgcccttttccctgcagcaaggaatgtccacattggcgctttgctcatcgtacaggctgcagcacattccgatataccgcacattgggacaggcctcaatcaccgcccggggaatgagggtggtaaaggataccagaaccccgtcggcgtctccgatgcggcggatcacttcttccgggctttggggaatgtcctcataggccacatactcccggcacaggtttttcagcctttccacatgctcttcgtccactccgatgggctcgatggccaccagtttttcaaacatggcttccgcctccttttttctctgttctgactgcatgatagcaccattccccttttttgaaaaccccgctttttttccttcggaatttttcccgccggtggaaaaaggaaaatgggtgtgctatcattttttcagagaggtgatattttatggatcgcatcgatctgaactgtgacctgggcgaaagctttggcgcctaccgcattggactggatgaggaagtggttccccatgtgacctcggtgaacatcgcctgcggctggcacgccggcgatcccctggtgatggagaaaaccgtggccatggccaaacagcaccatgtggccgtgggagctcacccaggctttcccgatctgctgggcttcggccgccgggagatcaaggcttcccccgacgaggtctatgcctatgtgaagtaccagctgggagcgctctatgccttcgcccactcccagggcctggaggtgcagcacatgaaggcccacggcagcctttataacatggcgggcaaggacatccggctggctgaggccatgtgccgggcctgccgggactttgactcccaactgatcatcctggctctggccggcagccagatggagcaggccgcaaaagaaatgggcgtgccctgcgcccgggaatttttcgccgaccgggcctatgctcctgacggcaacctggctccccgcagccaacccggcgccgtgatccacgacacccaggtggccctggatcgggtggtgcgcatgatcaaggaaggcaaggtgcaggccacaaacggagaagatatcccggtgcagtgcgacagcatctgcgtccacggggacaacgaaagcgccattgcctttgtcaccgccatccgcagccgccttgcggaagagggcatcacctgccagagcttcggctcctttgtgaggtaaggccatgggaaatgtgcgttttctcccctgcggcgatcaggccgtcacggtggaatggggaagcaccatcgacgagcatatcaaccggcaggtccacgcctttgcccgaaaggcagaagagcttttccatccggccattacagaagtggtgcccacttaccgctcggccaccgtccactaccggccggaggtactctcctatgaagagctcaaccagctgcttgctcccctggcccagggaggcgcagaggaagcggaagaacttccggtggtggagatcccggtgtgctacggcggggaatatggcccggacctagaagaagtggcccagcattgctctctgacgccggaagaggtcatcgcccggcacaccgctcccacctaccggatctatatgctgggcttcacccccggttttccctatctgggaggcatggacccctccatcgccgcaccccggcggaaggagccccgtattcacatcccggccggctcggtgggcattgcgggcgaacagaccggggtctatcccattgtctctcccggcggctggcagctcatcggccgcactcctctgcgcctgttcgacccccaaagagaacagcccattttgctttccgccggtgcaggcatccgcttcgtacccattgatgaagagaccttccgcaagatggaagagaaggagggggaaagagcatgattactgtattgcagcccggcctgctcaccaccttgcaggatgaagggcgcctgggctatcagaaatacggtgtgcctgtggccggggccatggacagcctggccctccacacggcaaaccttctggcgggaaacgatatgggagaagcctgtctggagatcaccggcctgggacccacgctgcgctttgaaaccccggtggcctttgccctctccggcggggaatttgctcccaccctggacggtaagccccttgaaatgaaccgagcctattctgccccaaaaggcagcgttttgcaggtgggcgcctgcaaagggggattccggtgttatcttgcagtaaacggcggctttgatgtgccccttgtgatgaacagccgctccacctacctgaaaggctctttcggcggctttgagggccgggccatccagaagggagacacgcttcctttgcgggaaccccagttctggctcaacgccatggacaagagaagtgcctcctatcctttgccggagggtgtgccggtgatccatgtgatcatgggcccccaggatgattgcttctctccccggggaaagcggactttcctccagaaggaatacactctggggcaaagctgtgaccggatgggctaccgcctggaaggcccggccattgagcggagtgaaggttttgacggcaacatcctctccgacggcgtggccatgggctcggtacaggtgcccgacggcaccccgctgatcatgatggccgaccggcagaccaccggcggctatggaaagatcgccaccgtagcctcctttgacctgccggtgctggcccagtgccgcccgggagacaagatcacctttgccgctgtgacagtggaagaggcccaccgggaaatggccagacgccgccgggcccttttcgccctccgggacgctctggagatgcctcccggcctgtggtaatgcgtccacatggtaaagtgcccaatggaaagggagaatttttgttcattgcaccattgacttacaccccgctccaagcgataaaataataaatagttttgtaacattattcaatgttgcgatcgatcaagcaaaaagcgatggggccgggcggcgcagggccgcccggttcattgcgggaaaggaagaacggcatgcagcaaaaatcccgatccaaccatatgttcctgttttttgtggtgctctccgccttttttgtggcggccagcttcgcccacccagtgacccccaccctgatcaaggaatatgatctgaacgattatatgttcggtgtggcgctggcggctatgcagaccacaaacttcctcttttcccccttctggggcaagctcaacaactacatctccagccgccaggccatgctggtctgcggcatcggctacgccgtgggacaggctctcttcggcatggcccgcaccgaggccatggtgatcttcgcccgggccttcgccggtttcttcaccggcggcgccttcgtcagcttcctcacctatgtggtcaacacctcctccgacaatgatcggggtaaaaacctgaccatttccgccaccatccagagcgtggccggggccttcggttattttgtaggcggatttctgggagagatcggcctgggcgtcacctttgccgcccaatccatctgtctggccgcctgcggcgtgtttttcttctttttctgcaaggacgaccggaaagtgggcgtgggcaaattgcagatgggcgatctgatccacgacgccaaccccttcgccgcctttgtccagagccgtcagttcatgtcggttctctttgccgtgctcttcaccgtcaccgttttgcagaatgtgggctacaacgcctttgaacagtgcttcaactactttatcaaagacgagttcggcctgacctccaaatacaacggcctgatcaaaggcgtcatcggctttgtgtccctcacagccaacgccaccatctgtatgtggatgatccgccgcaccaatgtgcgccgctcggtgatctatgtgctcatgacctgcaccctcaccagcctgggcgtggtgttctccaacgccgtggtgccctttatgacggtgagcgttctgttttatgccttcaacgccgtatccattcctctgcttcaggacatggtggcaaagcgggcccagaacggcaaggactctaacctgatcatgggcttttacaacgccaccaaatccttgggcggcatcatcggctccctgtctgccggtttcctctacaccgtcaattccaaactgacttttgtggtcaccgccgtggtgttcttcggcgctgtgatcttctccaccatctattccaaaatgaaagatcctgcggaaagcccggaacaggctccggcttcctcccgccgagttttgttccctggggcggcctggtgtgtcccggccgtctctctttttgtccatctgaaaggagttttcccctgccatgaaaaaatcatccccaccgcctatgatctttttcttcctggtactcatcctctataacctggcggccaatttcgcccacccggtgacccccaccctcatcaaggtctatcacctcagcgattatatgttcggcgtggcctttgccgccatgcagaccacgaacttcctcttttcccccttctggggcaagctgtccggctatatttccagccgcatgaccctgctcatctgcggctgcggttatgcctgcggccagctgctcttcttcatggcccacaccgaagggctgatcatcgccgcccggtgcatttccggcttctttatcagcggcgcttcggtggcctgcctgatctatgtggtcaacacctcctccgatatggagcggggccggaatctcaccattctggctaccatccagagcgtgggcgctgccttcggctacctgatcggcggatttctgggcgagttctccctgggggccgccttcctgccccaggtcttttgtctggcttccagcggcctgctcttcttcctgttctgccgggacgaccggcggccggagattgcttcccagcccctcacccgcagcaccctggtgcgggatgccaatccctttgccgcctttatgcaaagccgccagtttatgacggccctctttgccatcctgttcaccgtcacggccctgcagaacctgggctataccgcctatgaccagtgcttcaactatttcatcaaagaccagttcggctttacctcggcctacaacggagccatcaagggtgtcatcggctttatctctctggtagccaacgccaccatctgcatgtccatcatccgccggggcaaggtcaaccggtcggtggcttatgtgctgtcggcctgcaccctgaccattttcgccgtgctcttcctggatgaaatgcgcgttcccttcctggttgtcaatgtggtgttttacgcctttaacgccgtgtccatccccctgctgcaggacatggtggccaaaaaggccgagggcaacgactctaacctggtgatgggcttctacaatgccacaaaatccctgggcggcatcatcggctccctcaccgccggtttcctctatgccaagggcgccagcctgtccttcgtctttgccggcattattttgctgctggccactttgtttgcctttgtctatcagcggaaaacagctccctcgcccctgtctgcccgccgctgagttttctgtttccccattccctgcgtgaaaggaagtctttcccatgaatcaaaattcctcccgccagctgctgcgggtctatgccatctgtctgctgggcacctttgccgggtccttcatttcccccattctccgcctgctggtggatctgggggtggattcggcggtgatcaccttctaccggatgctctttgtcagcctgctgctggtgcctctcctcctgtcccggaaagagagccggcaaaacctgcgctccatctcccccaaggtgtttgtgggggtcatcgcctatgccctgtgccgctgcgccggtcttctgttctgggccgaggccatggtgaaaggggccagcgcctttgtggccaacaccttgggcaattcctcggcggtgttcgtggtgctcttctccttcctctttttgaaggaaaaaacctccctccgctctctggcgggcatcggcgtgtgcctcatcggtgtgatggttatcggctcggacaacctgggagaaagctcggcttttctggcggtgctcttcatcctgctgtcctccctgttcaatgcgggcaacaccgtgctgggaagagcggtgcgccgcaccctggacctcctgcccctgctggctatggagtattccatcggcgctttgtgcaccggcgtctatgccgcttccaagggagctgatttccacctgcccccgctggccatcctctacctgatcctgttggcctgggtgtgcaccctgatggctctgtccatccccatctgggccctgcgctatgcccgcccggcctcggtgtcggtaatcaacctggcgggaccggtgttcaccgtgttcaccggcttcttcctcctgggagaggtacccaccctgcccatgtacatcggcgcggccatcatgatattgggcctgggtttttatgtgctcaacgaacagaaagaagctctgcgggtcaaacactaaactatgtctacggcataaaaaaatccccggtttcccgaaaagttgagactatgggaaaagccatcctgtgagaagacctttgccctaccccgaatcaatctgcaaaaagctgcgacctgtgcgcagctttttgcacctatcaaggggccagtgtgcgccgaaggcgtgcacgcagacccttgcggcaatccaaaaaagtggcttcggccacttttttgcaacaaaaaatccccggtttcccggggattttttctgtatgtactatttttacatctggttgtgatagacttcgccgtcgatcatagtgaagacgcagcgggtcatgttgctgaagggatggccgtcgaagatgaccacatcggcgtccttgccggcttccagagaacccactttgtcctcgatgcccaggagcttggccgggttgacggtgacgcccttgaaggcttccttctcgtccaggccgtaggagatgcacacgccgatgtctcttctcagccacttggtctcagaggaggtgtcggcggtgaggcacaccaggcagccggcgtcgatcagggtctgagcgttttccggcttggcattccacagctccatcttggcgggaggcagaagcaggggacccaccacgcagcgcacctgcttcttgcccagataatcggcgatcaggtggccttcggtggcgtgctcaatggtatagtccaggttgaactcctcggccacgcggatggcggtgcagatgtcgtcggcacgatgggcatggatgcggcagcgcatctcgccccgaaccacgggaaccagggcttccagctcaaagtcgtatttgccgatcttggtgcggtcgtcgcccacagccagcagacggtcggaatagttcttggcattggccagagcttcccgccacacgccggcattgcccatacgggtcatgggggacttatcccgggggccatagttggtcttggcattttcgcccagagccatcttcatggcttcggtaccggggatgatcatctcatcggccactttaccccgcagcttgaaggccacgccggtgccgccgatcaggttgcccgagccagggccggtgtagcaggtggtgaagcccgcttcccgcacaggcacgatggcatagtcaaagggattgagggcgtccaggccacgcagatgggactggatggggccgctcatctcgttgccgtcgttgcgggtacgatgccagttgggctcgttgaaagtggaaatatgggtatgggcgtcgatcaggccaggggtcacccatttaccggtggcgtccacgatttcggcgtcggcgggaacctctacctgctggcccactgccttgatctggccgccctccaccaaaacggtggcgttgtccaggaagctgccgtcgggctggagcactttgccgtttttgatcgcgatcatcttatgtcactctccttttcattctgccggggcttgccccggtatgcttgcagcttttattataccacaaagtgaagcgaagtggtatattggccgtgttttcggttgtcccgtttacgggacgagaaaacggccatgaaatcaagtaccacaaaattccccgacggcacccctcttttcttgtgtttttccctggaagaagctatactggtgttatccatcttgagaaaggaagatgcctttatgatccgccggaaagaacagatgcgcacatcggaaaagcccaacctgcggggtggggagggcgtgatccacgcctacgacctgctggaggccccggagatgcgggaaaagctgaagctgtgctccattctgaccattgagccgggctgctccatcggcgagcatcctcacggcccggacgccgagttctattatctgctggaaggggagctggaggtcacagacaacggggaaaagaccaccttccatcccggcgatgctatgttcaccgcctgcggcgagacccacagcgccagaaacaacacccagaaggacgcaaagctcctggccatcgtcatcgcctaggtccggtgtccggacggccatagtccagtgtccggacggccatagtccggtgtccggacggccatagtccggtgtccggacagccatacttgtgcgagcccttccctcaccaattcgcaaaaagccgcgacctgtgcgtggctttttgcaccaatcaagggcggagtgaccccgcaggcaaacattctttgcccgggcgtacacaacctaccggagcaaagaaaaaatgggagcggcggctcgccgccagacccttgcaaaatccgaaaaagtggcggcagctgctttttcggcaggaaaaaagcggccaaaaggccgctttttctattatttctattttagattgatgtccagaatcttcaaaaaggcttccgccatttcctgtgagccgactcccgcttccagctgggccaggcggacacattcttccagtgtgcgctccccgtccatagcaaagagcaacagggtctcaaaaagcatggcatcggggcagcctttccggtactgctcctcataggctttgtaggcctgtttcttttcttcgtcctcccggggcatatcctccaggtggatgatggggcctttcaaggtgcgctggggcacttttcccgcctttttctccgggagtgggggattgcccagtgctttcagagtttcttccatggcccggcgcaggctttcctctgcgtgcaggcccatttctttggccgccgggcacagccggatggcgtcctcacagccccgcacatagaactgggtgatggctctggccttttcgcccagagtggttttgtcctcgcccatcaggcaggcattgcccagccgttccatctcttccccatggcgtcctttcagccgccacaaagtgcgccccgcctcttcttccccgaaattggccaggcagtaggcaaagcctgcggcaatgcacagggagttgtggagcatctgggggtccacctgctccggtgtgtccccactggtgtgataataaagatccggccactggcccagcataggacagggaatacccaccaaaggatcggaaaggatcatgtggtcgctgcccgggacaaaggggccgataaagctgttgaacagcggggccatgttcccctcctttagcacttcacactggctcttcacctggcgcagcaccacatcgctgagagcggtgaccagaggggaagaactccagggctgatccgacagggtaagaggcccatagccccggctctgccgtccacccaccatgtccagattgatggctcccacaatacgggaaagctccccttcccgctggcagagatagggataggtgccgctgaattcgggcaccaggcacacccggatgccccgccggagtgggggaagctctccccgctccagcagctcatggagggtgcgcagcagctccatggccacggcgcagccgctggcattgtcattggccgaaggccggggatggcacaggtgggccagcaccagcacctcttccccggtctcgccggggaggaaggcttccaccacttccagctcaccaggatacaatctggtgtccattttgcacagggcctggggatatttcccctcttctctcatttcccggcagagtttggccagggcgtctccctggcggggtgtgaggacgaagccgaagatgtgcggctctttttcccagtccttccaccagaaggaggtataattgcggatgtcgtacagatcctcccggctgcgcacccccggcacttcccgcaggtagtcggtgacaaagcccaccgcccctttttcggtgaaggcccagtccatataggccgcaaaaggctcccggaggaaaagcagcttgccctgaaggtccacgccttcatagtcctctttccggctgcccttgtccatgaggacgatgtccaggggctggctggaataatcacaggggccgctcttctgcatcaccgaggtggcgcaggtgtcaaaatccgccagccgctgccggcccttttccgtcagcagatccagccagcctcccttgcagtcccactccaggaaggagcgctggccccaataccagtgcttttcgtcaaagggataggaaatcacccgggcgcatatcccctggctctccagcacctgctggcagtggtgggccgcctggcgcaggccggtggagcactggatgcggtggaaggatgcgatctcctgcacccgctgatgggcccgctccccgctgccgaaggagctgatcttttccagatattctttcactgtggtcccctccttgctcttgatgaaaacggcccggcttactccgggcctttcccgtgccgaaaaagtggcaaaagccactttttcgagtttttgcaagggtctggcggcgagccgccgctcccattttttctttgctccggtaggttgtgtacgcccgggcaaagaatgtttgcctgcggggtcaccccgcccttgagaagtgtaaaaaacgccgcacgggtcaccggtttttacaaattgatgaaagaccggacaaataacccctctaaccagatcagttttggggcaatcgggcttttttgattatttctgataatatttgatcagggcctgggtgccgtcgttgtccagccccatccggctcatttcctcatacatcttcaaaacagaatccagcatggaaagctccacgccccatttgcccgcttcttcctcgatgatcttcatatccttgatgaagtgcttgacgaaaaagccgggggccagatcccccttcagcacccggggagccatgttgctcaactgccagctgcctgccgcaccggcgccgatggcggtcagcatcttttccggctccagaccggccttctgggcatagaccagggcttcggtataggccgcggtggcgccggccacggcaatctgattggccgctttggtgtgctggccaaagccggccgggcccatgtggacgatgttcttgcccatgcattcaaacaggggcagggcttcctcaaagtccttctcgtcgccgcccaccatgatggacagagtgccgttgcgggcgccggaatcgccgccggacaccggggcatccatcacacgcaggcccttctttttcccttcctcataaaggcgctgggccagggagggagaggatgtggtcatatcgatgagcaaagccccttccttggcgttttcaaagatgccccctttgcccaggaacacttcttccacatccttgggataacccaccatgacaaagaccacatcggccccttctaccgcctgggcgatggtctcacagggaatgaggccgaactcctctttcaatgcttccagcttgtcctgggagcggttataggccttcaccgaatagcctttccgggccaggtggcccgcctgctggccccccatgacaccggtgccgatccatgcgatctgattcattttgtttcctccttttcagggtgtttcggtttgtttcagtatagcataaacctgcccttttccgccacaaagaaccgaaggtttttttcgtccttttcccatttccaccatcctcctcttgccaaaaccggtggaaatgaattacactgtacttggccccttttccctgaaaaagaaaaaggggatagaaacagagagaggaaggattttatgaaacgacaactggcatccctgctggttctggccttgtgtgcggcctcccccatcaaggcggcctccgctacattttacgatgtgccctccagccactgggcctatgaggacatccagcaggccgcccagaagggcattctgcaaggcaccggcacagaccaaaacggaaaccggctctttgagccccagtcctccctgaccaccgcccagttcatcaccattctggtgcgcggctactatgccggtcaggcgggaagtgccggggatggcccctggtatgctccctacgatcaggtggcccagaaccacggcctgtatgaaggtctcccgaaagtggatctgaccgccaccattccccgctatcatatggcgatgatcctgcagaacattctggaagatctgggaattgctctgccttcccaggaagagctgcaaagcgccgcggccaagatcggcgactggaagagcatccccctggaataccagaaggccgtgtcggtggtttatgcctccgggatcatcggcggcatggatgaaaccggcacctttgcaggcgaaagctctgtcagccgtgcccaggccgccgccatctacacccggctggaaacctatgcagagccctacatccaggccgcagccctggactacaaacgccaggaaatgctgaaagagatcaacctgcagcggcaaaacgccggtctttcgcccctgcgcctggacgaaagagtgtgtgattacgcccaggtccgtgctcaggagatcaccgaaagcttttcccacacccgcctcaacggggaaaactactggactgagctgggacggatgggcattgactactaccccggcggcgagaacatcgcagcgggcaacagcacggtacaggctaccatgaaccaatggatgaactcccccggccacaaggccaacatcctgaaagaaggcattggcggcgtaggcatcggctatgtgcaggtggaaggcggctaccagcactactgggtgcagatcttcgtgccataaatgcagacatagcaaaaaatcccccattctgggggattttttattttttaaaacatatgctcgatgaagatcttcaggccgattcccaccaggatgcagccgccgaagatctcggcaaagcggcccaggaggctgccgaactttttccccagccaggtacccgccaggctgcagaaaaaggtgatgaagccgatggacaaggcggcgatggcgatatccaccttcatgacggcaaagctgatgcccacggccagagcgtcgatgctggtggccaccgcctgcatcaccatggtgcgcccatccagcgtacggtgcacatcgcactgctccttttcccgcatctcccggatggattcgataaccattttgcccccgatgaaccccagcaggatcagagcgatccagtggtccagggaggagatgaaatcgctgaagctgcgcccggccacaaagccgatcacaggcattcccgcctggaacaggccgaacagcccggcatagagggcggccgcctttcctttggcgtttttgtagcaaatgccgttggagaccgacacggctgtggcgtccatggccagccccagggccagcaggacaagggtgagtgttcccatgtttttcctctctttctttggcggggcagtaaaaaagacccacgcccggcaagccccccaaaacggggaccgccggacatgagtcttgttctttaaggcaagccaggccctgtggggccattgtgttgacttgacacgcggaaaccgcgcaaactactccctcacgccaaaatttattttttgacgggtttcattatgccaaatttccgaaaaagtgtcaagagggaaacttcttattcgttgcccacataccggtagagccagctcttgatctccttcaggcggcgcatccggtgacggggtttgcccgaacgggacagctcgtggttttcccctttgaagatgcacatccgggagggaacgccgttgagctgtaaggcggtgtacatggaaatgccttcgggcatccagcaccggtagtcctctgtgctgttgatgaagagggtgggggtgcgggccttgttggcaaacttcatgggagactgatcccacatcttgtacatatcggtgaagggtgtggcctggacctcccgcaggtcaaagctgaggccgatgtcgcaggtgccgaacagggtgatccagctggcgatggaccgctgggaagccgccgccttgaaccggtgggtgtggccgatgatccagttgcacataaagccgccgtaggagccgcccagcacgcccagacgctctttgtcgatggccgggtacttttccagcaccacatccacaaactgcatcagatcctcataatcgatggtgccatagcggccggcgatgttggcaaacttgtctccccgtccgccggaaccggtgggattgcagaacatgacaaagcagccgtcggaggccatggtctgcatctgatggaagaagcaggtgccgaaggtggcccgggggccgccgtggatatccagcatggcggggtaggtcttgctttcgtcgtaatccttgggcagaagcacccagccttcgatggtattcccctctttgttcacaaaggtcaggggctggggtgtggccacatatttgcccttgagggcgtttttattgaagccggtgacttttttctgacttccgtccttttccaggcggtaaacttcctgcaaatcgtttccggcaaagcccacggtgaagattttgccgtcccggatgtcgaaaaagtccaccgagcaatcttccccggtgagcacttccggctccttgccgggctgccaccggtagagcacgctgtaatgggcccgggccgagacataatagagggcatcctcacaggctttcatgtggataccgctgccatagcggcagtcgctgccaggatttccgccgaagtcctcggtctcggccaccggcacggccaccacaggctccccacctgtgagggggatggaatagaggtttgtgcccccgaagcgcatccagtcctccccgtgctcctcggcggagaagatcagctgatcgcccacaaaggccagcgaacccaagccgctgaaccggtcgggcccgaacagttctttcgtctccccggtctccagatcatagagatacaggccggagtgcatattcagctttttgtcggtgagggccccggcataggccagggtcttgccgtcgggagagagggtgaagccccgggtgtcgaacatgggctcggtcacaggcttcagcttcttccgcttcacatcgtacagccacagccggttgcgctttttgttggtaaagccccggccattgaaccagaagggagcctcgtcacacacctggtagtccttttcctcctggtagtccagaagggcccggcggcgcttttcccctttgagggattcaaaatccggccgggcgttgtcgtgaacagcggtgatgagatagagcccctcccgcaccagatgggcgctggccccctgcaaaggcaggcggaagcactcccggctttcgcctccgtccaggggcagctggtaaaagacggtgagcagttctccgttttccacccgtttctggtccttcttttcccggatggcggggaaaatgacgcttttgtccccaaagagggcaaagctgcacacatccccatgggaggtcaggggccgggcggcgccggttttgcagtccaccagatacaggtcggagcggtagcagttgtcctccagatcggccttggcggcgatcaccagggcccggtcatcgggaagcagcttgagcccggacaaaaatttataatcctgcaggtctgtgtccagtattcgttccaagaaaatccctccttcgcagggcagcttgcccccgaaaggggcaagctgctgcgctttcttttgttttttaaaagtccccttccatcaccacatcgtcggaaggatcctgcacaaagccctgggagagatagaactcctccatggccttgtcttcccgggggaagtgggtggtgatacggggcacgccccggctctcggcctgcccgatggcataggcaaggcctttttccaggtctccgtgaagccctgcgatatacagggcccgccccggctggaaccgggcgcccagggccagaacacagccctccccttcgtagagccaaccctgggagacaaatcccccataggtgccctcattcatctggtagaaggtgtgattacagcacatggtatccccgaaagcctgacggcagggctccaggagaaaagcggcccggtctttgtccgccaccagagagagaccatcggccttgcccttgggggcatttgccacttccagggtcatgcctttgaattctcttccccggtgcaggccgtttttttccgccaaagcggcgctggccacatttttgaccccggtatacatggccgcccgggggcagcccatgtcctttatctgctccaggtaccggcggtagatggccatacccatgccccggcgctgaaactgggggtctacccgcagcagctccagccaggccgagccgtcaaagagcaccgtcagtttgccgaacccggcgggctcaccgtcggccagggccacggtgagctcaccacgggtggtggtgaagtaatcggccacatcggcaaaataccggtttttcggggcggtatgttcttcgatgagaaggcagcgggacagatcgtcctttcggaaaggtctggtggaaatttccacagtgtcccctccttcttacttcatgtaatggtcaaaccagtttgtgatctcccgcagacggcggatacgatgcttgggcttgccggaacgggacagctcatggttctccccgtggaacaggcacagacgggtttccacaccgtgcatccgcagagcggtcatcatctggagggcgtcggccatccagcagcgatagtcctcatcggactggatgaacaaggtgggggtcttggccttgtcggcatacttcaggggggagttgttccacatccggtccatgttggtccagggatcggccatcatggcggacaggttgtggtagtagccgatgtcggtggtcaggcacttgctcaggtagttggagatagagcgctgggaagccaccgctgcaaaccggtcggtgtggcccacgatccagttggccataaagccgccgtaggagccgccggccatgcccacacgcttctggtcgatctggggaaccatctccagcaccttgtcggtgaactccatcaggtcgttatagtcccagacgccatagtgctcgccgcggatattggcaaagtcgttgcccttgccgtcgccaccccgggggttgcaatagaagacgaaatagccttcgttggcccagaactgcatctcatggaagaaggtctcgccgtaaaccgccttggggccgccgtgcacattgaggatggcaggatacttcttggaaggatcgtaatccaccggctccaggatccagccgtcgatgtccacgccgtccttgtcggtgaagtgcatatacttgggctccaccacgctgtggctctggaggaattccttgttgaagcaggtcaggcagttttcctcgccgccttccttgcagcaatagatttcctgcaggccattttggcgcatacccacatagtagaaggtatctcccaccttctggaagcaatccacgctgccgtggacatcgggagaaacggtcttgacctcacccttttcatccagcttgcggatgacggagttgaagcccacggtctccaggaagtagaagccgtccttttcgcccttgttggtggctccgccgccatagcggcagtcgctgcccacactggagcccaggctggtgtccagatcggccagctcctgcatcttgccggtgctgatatccacattgaagaagatggggttttcattggagccatagcgctcgccggtggtggcggccatcaggatgtgatcgcctacgaaatcggcggcctggacccggtacttgccgcccagatccatttcacggctctcaccggtcttcagatcatacacgaacatccggctgatctgatcgtccatccactgatagtcgctgccatagtacagagccaggcccagctccttgttgtatttcaggccggtgacctgcatataggggccggtgatggccttctgctcattcttgcagatgtcgcagagataaacccggccgcgctttttgttcacaatgcccttgccgttgaaccagaagggaagctcatcgaagatctcgtaatccttttcttcctggatcttctggagcatttcttccttctcggcgccttccagaccttcggtggtcatggcatagttgtcatactggccgatgcacaggaatttgccgtcgcccagcacgatcaggttactggcggggaaaggcagcgcaaaatattcctcggcttcgccgccctggatggagattttgttgaacacggtgtaatggaagccttcgtcggccatggccttatattttccggtgcggtcgccggggaagaggatatgctcttcatccagccagtacaggctcttttctgcgccgccgcttgtcagcttgcgcactttgccattttccagcaggtggatatgggacacatacttgttggccttcacctgggcctgggtgaccacaaaggccagcttctcgccgctgggggaagcctgcagctgggacagcattttcacctgactgaaatcgtcgatctgaatccgttccatggatcatcgtcctccttcacaaaaatcggtgtgattttaccgctgttgtctgtacactattatacctttctcttttgccaaagacaaggcgggattttactgcttcgtcacaaactgcccgaaacctatcctgcaaaaagagatgatttgccctacccttcatccatccgcaaaaagccgcgacctgtgcgtggctttttgcaccgatcaaggggccagtgtacgccgaaggcgtgcacgcagacccttgcaaaatctcgaaaaagcggcttccgccactttttcgaaacgctgaggcaaggcgggattttactcccttgtcaggatgcgtccgccggtgcgcacgccccagactcctctgccctcttcccggagaagcaggatatcgctttgggagaattccccaggcaggatgatcagatcgtgcccggccatgatgaactcccgttccttgccgcccatggtcagatggagatccccattttcccaggtgaaggtggcctcgttgccctcggcattccggaacttgcccaggcagctcttcttttcctcttcgctccatccggcgtcctgccagtttttcatgggcgcgggcacagcggccccggtgacccagcggagggcctcctcggccacacggctgaccggcacgccgctggtgttgcacagcaccacgacgccggcttccagctcaggcgaccaggcaaaatgactggagataccggtcatgctgccgccgtggcccaccatgcgcaccccttccagctcactcatagccacgccatagccataccactggccgtagcggtaatgctgccggggcttcatcatctcccggatgccataggagctgagcagacggccatgctcgcccttgccttcgttgaggtacatctgcacatatttcttcatgctgcccaggctggccttgacggcgccgccgcccatgagcacaaaggcgttgtcatagtaatcccggcaccagtgacgcttgccgtctttgtggaaatagagctttgtgctgttagggtcctgggccggggcgataaacaggccggtggcccgatccatccccagaggggcgaacacattcttttccagatagtcctggaaggaattttccccgccatagcggcgaataatctcagacagcaggccgtagctgtcgttgctgtagctcatatattctccaggcagaccggtgcgggcttcttcttcgtccaaacccttgcacacccggcggcagccctccatggccaggcccggatgggggccgatctcggctttgccgtcctgccagatgcccattgaccgtgccacctcttccaccagcatccgccgcttgggaaggaatcccccggcgtggctgagcagatgggccaccgtcaccggctgggcggcatgggcgttctggaactccggcagataccggctcaccggccccccaaggtcgatgacccccttctccgccagctgcatgatgctcagggccgtaaaggacttggaaaccgacgccagaccaaaaatcgtattttcgtcaatgggcgtctgattttccgcatcccggaagccaaaaaatttctgatacagggtcacattcttgtcgaccaccgccattgccagaccggcagcctcataatgggccatcatcttttcgatccactgttccagagggcggatgccctccatggtgcctttgttcaactgaaaaactcctttcccaaggccggggccttttctgtccacattgtatcacggaagaggccctctgtgggattttttcttcaaaacttcttggacgcaaagaaaaagcaaatggtttttttagaaaccgaaaaaagcaaatgggttttttagaaaccaaaaaaagccaaagaaaaggaaaaggcaaaggcaaaaacaaaaacgaagacaaaaacaaagacgaagaaaaaagagagggtgagggtgaagaaaaagaaaaagaaaaaggagaaggcggaaaaggggctttgcacccaccccctgtccattccttttctttcttcttttttcaggcaggcaaaaaaatctcccaggacgaaaaacacgcctgagagggagtacactgatggcatgggccggagccttcccagcgggagccttgggaaaaggcccggaaaaactcagaacagctggccctttttctgcagatgccggtaatagagcaggcacaaggcgatctgcaccagggaagaggcgggagtgcccagccccacatggaacagagtggcgccggggagggcgctcatgagccagaccaccgggatacggacacagaatgcgccgatgaccccctggagcatgacaaacaccgttttgccgcagccgttgaaaaagcccacaaagcagaagaggatggcggtgagcaggcagtcgatggcgtaggctttcaggtaggagtgagcggccaatatgacccctgtctcccgggaaaacagggtggccagcccgtcgccgaaaaacagggccagggcccccatcacagcgccggagaacagggccatgcggatgccgtaggaaagggccttgcggctgcggtcctgcaatcctgccccgttgttttgggccacaaaggcggagatggactgcataaaggccgaggcggtgagcatgagaaagacgcagaccttttcggccacgcccaccgccgccgattccaccacgcccatgccgttgaccacgatctggataaagaggaaggaaaaatgcaccagcacatcctgcaaagcgatgggaacgcccactttcaggatgggaagaaggcagtctttgaaaaagcgcacatgggaaagggagaatgcaaagggcaggccccgcttccagatgaccacaagggaaatgagcacgctgagggcctgggccgccaccgtggcgatggcggcgcccttggcccccatccccagtccggccaccaggaacaggtcccctgcgatgttgaacaggcaggccaccgccacggtgaacagcggcgttctggaatcccccaatccccggaaaatggctcccaatacattgtagaaaacgatgaacaccatgcctatgccgcacacctggatataatcctgggtgggaccaaaggcctcctggggtgcatggaccaggcgggtgagcacctgactgccgggcaccatgatcgcggtgcccacaatggccaccagagcaaagagcacaatgctggtgcccacgccccgggcggccttctccttttccccggcccccatgcaccgggccacaaacaccgtcacgcccatggtcaatcccaccaccaacatggtggcagtgttgaacagctgactccctgaggccacgccggactgatccccggtgccggcaaactgacccacaatgatcagatcggcggcgccgtacatggcctggagaaacagggccaaaaagaccggcacggcaaaggtgagcagggagcggaaaatgctccctttggtcaggctgtgttctttcatttttcttctccttccctgcaagcgctccgcatatcaaaaaaagccggataagaaaacgggaaatctcccgccatcttatccggccgtccctttgcttcggggcttgccctccgatgtatggaatatgttagcatgccctttttcctttgtcaaccgccgccctttcctcctttatggaaggtttttcccccggacttgcaacagacaaggcctgagggaatatcctgctactacggaacttgttgggaggaatgtttgctatgctcatgccagccgccgcctttttgtttgtcaattctctttatctgatgctgcgggtatcccccgccgccggctccttcccccggcccctcaccgccgccgaagagcgggaagctctggaaaaatgggcccagggggatctgggcgcccggaacaccctgatcgaacacaatctgcgtcttgtggctcatgtgatcaaaaaatactacgcggcccgggaagagcaggatgatctgatctccatcggcacctttgggctcatcaaggccatctcctcctttgatcccagcaaaggggctcgcctggccacctatgcttcccgctgcatcgaaaacgagatcctgatgcatttccgctcccggaaaaagcaaagctgcgaggtatccctctccgagcccatcgacagcgataaggacggcaatgtgctctctttggtggatgtgatccgctgcgatgaggacatgatggaaaaactggagcaggacgaacggcagcagcagctgctggaaaaggtggaccaggtgctggaaagccgggaaaagcagatcatcgtcatgcgctacggcctgtatgacacccagccccttccccagcgggaggtggcccagaaatgcggcatttcccgctcctatgtatcccgcctggaaaaaaaggcccttctcaagctgcgccgggctttggaggactgatcccattgcctttgcgccctatttcaggtatgataagaaaaacaccggacaggaaaggagaaagggccatggaaatacagcagatgtgggccagcccccatttggggaaaaaaggccactatgcccgcttcctcctgggaagcataggcggaatcctgcttctggggctgcttttgtcggtaggcggggccatggtgctgatgcctctgggaacaaaaaaagcccttccctccctgtttctctgcctgggcaccgcccttctcatgggggtgctggccctggccgcaggacggaaaagcgccatggaatgcactttcttttttcaaaccacccagggggagctgtacgcttttgatgcccggtcctttccatcgggcaaggtgctcctcttttttcagggcatctgggagacccagcgcaccctctcttccctggccatcagcccccgcatccccccaggggcccggaagatcgtccgggtggcagccattgtaccctatcgcacctattttctgctgcgcttgcaggatcaggggcccatctatctgatctcccgccgtttggaaggagtggacagccttgtgtccctgctccggcagaaaaccggcccttcctggggaaaaaacacccaggagaaaaaaggactttggggcattttgggctgcggcacggctctgctgattttttcccttcttgcctgtctgtgccatcccagcctgggagtgtttcccttttttctctacgctccctgcgtgcttctggctttcggaagtttttctcttttggtctatttctttgtgctccgccaccgggggctgtgaccggcctatttttggaagaaaggaggaatccatatggcaaagctgctcattgtaggcggcggcatttccggcctatgtgccggcgtgctggctgcaaaaaacggctttaccgtagaagtctatgaaaaaaacgcccaaccgggcggactgtgcgccgggtggacccggcggggttttcgcctggataccggcccccgctggctttccggcgccgctcccggcggcgaaatgcgccccctttggcaggctgtaggcgctttgggggaggaaatgggtccaggagaagcccggcctgctttggccttttccctggggcagggccagaccacactgcctttgcttcgctgtccggaggacctggaagaggccatgctccacctttcgccccgggacggcccggagatcggcgagctgtgccgcctgctgcgccgcaccagtcagctgtcctttcccagagaaaaacctctggacatgatgatggcctgggaaaaggtgcgcctgggggcccatctcacggcccggggccggcttttgccctatgcccggcaaagcgccggggaatatgcccgctctttccaccatcccctgcttcaggctcttctggaaaaggtgcccccgccgggcgcctctgcctcttttgcccttttgtggctggggcaggccctgcatccccacgggctgtatctgccccagggagccatactggcccagcggatggccgccgctttggaggcccagggtggccggctcttcaccggccagggtgtggaacgcatcctcctctccggcaatcgggcccgtgggctgctgctgcgcagcggacgcaccgctttgggggattatgtgatctgcgcctgtgatccctggctggtgcgcagccgtctgctggggccttcctatctggaccctctgctgggagggtggtacagcgctccggaaaaatacccggtctccagctttctcaccgtctatctggccatccccggccaaagccccctgcccctggaggccccggctttgctgccctgtccccccttctccctggccggagagacatacgataccctgtggctgcggcggcaccctggcggcgctcccaatggcttcaccctgctctcctgccagatcagccaaagcgagcaccagtgcgatgcctggctccgtctggcccagaacaaggaggcctatggcgtggaaaaacaccgggtggccgtgatgatcaaggaaagactggagcagaccttgccctctttgggccagagccgcttgctcagcgccaccacccctgccagttttcatcgggtcaccggggcctacaaaggctctcccatgggcttttatctggcccccggcggcaagctgcaaaacagcccgggcctggtgcccggagtggacaactgcctgctcaccggccaatggctccagccccccggcggtctgtccgccgctctcaccatggccaaattcaccctccagcgcctgtgcgctttggaaggtcaggagtttcatttataatacaaaaagttattttttaataatattctccaaaagagagaaaaaagccgccctttgcaggcggcttttgtgtttgcctattttgttttttcggtgcggctttgggcccagccctggtgccaggcgggcgtccccgccccctctacccgatcgcagccggggacatagggcttgatatccagcaccggtgtgccgtcccaggcatcgctttgatcaatacgcaaaaggccctttccgtggttcacccaatagaccttcaccacatccagagcgatgggattgggccggtggggtgtgcgggtggcaaaaacacccagccgttcgggggcatgggcatgaggcgttttcaccagcagcctttccctgctgtgagggtcctggctctgatcaaaccaccacaaaagatgaaggtactcatattcctcaatgcccttgagggccggacggtatgcaggcagaatctccacaaagacccgctctccttcccggcggatatgccccactggatacagacgcagctcttccatcccatcccctccttttttcttccagtatac

SEQ ID NO: 1022 - DNA, 29090 bp, Unknown
  16S sequences of unknown bacteria
tcttcatggcgggaatacgccgaaagatcgaaaaagatccgtttttacaggaactgatccgtaccgacgtgggcgtcggttacagaatgaacaaaatttaataccgagcgtttgaagaacctcgccattacggcgaggttctttctttatacaatcttaacgccgcacaagtatttctttatgagaaacgaatccgatttattttataatgtaaaaaaatcaaaaggagtttacatgcaaaatttgatatttaagggcgttgcgaccgccctcgtaacgccctttttgccgacaggcgaaataaattttactgcgttggaaaatctcatcgaatctcagatcgaaggcgggtgcgacgctctcctggtcggcggcacgacgggcgaaagcgccgcgttgtccgatgaagaaaagagcgcgatcgcgtcgtttgcggcaaagatcatccgtaaacgcgtgcctttgatcgcgggcgcgggttcgaattataccgccaaagccgcgaaaaactgcgcagagatggaaaaagcgggcgcggacgcgctcctgctcgttacgccgtactacaataaatgcacgaaaaaggggctgatcgcccattataaagaatgcgcaaaagcgagcgcgcttccgtttattttatacaacgtcccccagcgtacaggcgtaaatattcttcctgaaacttatgaagatctgttgaagatacccaacgtgaaagcagtgaaagaagcgtcgggcgacgttcggcaggcgtcgcgaattcgcaatctgtataaagacgatctcgcgctgtattgcggctgcgacgaactgatgccgtccatgttggcgatcggcgcgtcgggcgcgatttccgttttatccaatatctgcccgagaggggtacatgatatctgcgcccgctatttttcgggcgattcggaaaagagcctggaattgcacaacgcctactcgaaacttaccgaggcgctctttcgtgaagtcaatcccgttcccgtaaaggccgccttaaatatattaaagaaagacgcgggaggactgcggctgcccctcacggaagcggataaagaaacaaagaacattctgaaaaaggagatcgcgctgttgcaatgcgcgggattgtgtcaatgaacgatatggaagaaacgcaggcgtgcatcgtctgtaaattcggcggaacgtcgatggcggacagtgaaagtacggagcgtgtcgcagagatcgtgaaaagtaatccgctgcggaggatcatcgtcgtttccgcaccggggaaaaccgaaaacagcgaaaaagtaacggatcttttaattgaatgccatcgggaaatcgaggcgtgcggaaagtgcgatcagacttttcctctggtagccgcccgctttttacaaattgcaaccgatacaaaagacgcagagcgcgaactggcaaaaataaagtcgcagatggaaaacagcgggcaatatgatttctgcgtttcccgcggagaatatttaagcgcctatttttttgcgaaacgtctgggatttgcctttatcgacgccgcggagttgatacggtttcaccgctacgacggatacgattcgaaggaaagcgagaaactgtgccgcgcgaaactgaaaaacgggtatgccgtcgttcccggattttacggcgcggacgaaacgggcgcgatcgtcacgttttcccgcggcggatcggatattacgggaagtatcgttgcgggcgcgatcaaagccgatctatatgaaaattggacggatgtggacggaattctgaatgctgatccgcgcatcgtggagaacgcccgcattattcccaaaatgacatacggggaactccgcgaactttcctatctgggcgcctcggttttacatacggacgcgctcgtgcctttgataaaaaacaggactccgttgcaagtgcgcaatacgttctgtatgagcaagcgcggaaccgtcatttatccgtgtctgaaagaacccgaaaaaaagccggttacgggcatcgtcggcaagaaagatattctcgtgctgttcatccataaaatcggtatgaaccaacaaaaaagcatcgtgcggaaagtcttatccgtactcgaatattacggggtttcgttcgagcatatgccgtcaagcatcgacgcggtcaatttcctgattccgaaatcttctatcaacgacgcgatacgctccgccgtattgtctgagatcaaaaagtctatacgccccgacgagatcaaatttatcgatcggctttccatcgtatccgtcgtgggcaggaatatgtatcaatgcgtgggcgtagccgaaaaaatgttcgccgcgcttgcgcgcgaaaaaatcaatatccgcatgatcatacagggttgccgcgaactcaacattattgcaggagtcgacgaagaccgctatgaagacgcaatacgcgcgctgcatcgcgcttttttggaggaagaaactccttcttaatacaattttaatgcggtcgtgaaaaatccatacgtacttttaatgtattttattataaaattgtcatgaatcaaggaggtggagcgcatgctgacgaaaaaagcacagccgcccgtcgaccccgttctggggcttgcggcgcaggcgatcgaaacgggcgaatattcccgcgcccgccaactgctcaaagagtcgatggcgaacgatatggaaaatcccgaaacgtataatctgctcgggatcagttatgaaaaagagggcaatttattgaaggcctcgcggttttacagggtcgcatattatatggatcagacctttcaggcggccgcggataatctggagcgggtatgccagttctggcgcaaagattccaaagatattcaatggggcttatcgatcgacgggaggtaatggaacatggttgtcgtaacgatcatatccgcaattctggctgcgggactgctcggatacttattctttatgctgtttcacagcgacaagcggtaagacaaattttaacggaggctttttgaatgatcgaaagtgttatcttcaccgccatacaggacatcgtgtttttcgcgctgttcgtcgggatcgcgattttcttcgggtttgcctttttcaggatctataaagggcagcccgttttcatgaagagagcgagtatggcgacggaaaaaggattttacaaggcaatgggcgtttcgccccgcgaagagatgacggcaaaaaaatatgcgttcagcgtgttgctgttcagccttttcggtttgatactgatgatggcgattctgatggggcaggcgtttttgttcatgaaccccgaacagatcggcggcatgagttggcatctggccttcaatacggcggcgagttttatcaccaacaccaactggcaggcatattcgggtgaaacgcaggcgagttatctttcgcagatgctctgcatgaccgtgcagaacttcttgtccggcgcggtgggcatcgccgtattgtttgcgcttgtgcgcggttttacgcgcaaagaatgcaaaacggtcggcaatttctgggcggatctcacgcgtataacgctctttatgctgcccgtatgttttatcggcgcgctggtgctcgtttcccaaggcgtgccccagacgatgaagggcgcggtcacctatgtgtctttggaaggggaaacttcaaaactctatttgggacccgcggcgggacagatcatcattaaacaactgtttaccaacggcggcggattttggggcgtcaattcggcatatccttttgaaaatcccacgccgttcgcgaaccttttggaaacgctctcactcgtggtgattccgggaggtctgtgcttcacgttcggcagagcggtcctggataagaaacagggcgtcgttctctttaaagcgatgtctttcattttcttcgcctgcctcatcgtctgcacgaccttcgaatatctgttttcgcaatttccgcagagcgtgtcgggtatcggcaatatggaaggtaaagaggtgcgtttcggcataggcggctcatctttatgggcggtcgcgaccacttccgtttccaacggttccgtaaacgccatgcacgacagttttacttccatcggcggaatgatccccatgtttttgatgatgctcggcgagatcgtgtacggcggcgtcggctgcgggctatacggcatgatcgcgtttgctatccttaccgtgtttatcgcggggctgatggtgggcagaacgccggaatatatcggcaagaaaatcggcgcgttcgatatgaaaatggtttgtcttgtcattcttacgcctgttttgtgcctgcttttgggcacggcgtcgaccgttcttctggaagaggcgcccgaatggctcaccaacagcggcgcgcacggattttccgagatactgtacgctttcgcctcgatggcgaataacaacggctcggcgttcgcaggtttttccgcgaatacggtctggacgaacgtagtgggcggcgtcgtcatgctgctcgtgagatttatccccatgacggccacgctgttccttgccggcagtctgggcagaaagaagatcgtgccgcagtcggacggaacgctctccacgagcaattccatgttcgtcgggcttttgatcgccgtcatcattatcatcggcgcgctgagtttcttccccgcgctggcattgggacccatcgctgaattcgtaggctaaggagaattcgatatgaaacgtgaaaaacaaaaaaagagcggcttgatcgataaaaagatcgtgctcggcgcgaccgtgcagtcgctaactaaactcaatccgaaagtgcagatacaaaaccccgtcatgttcatcgtctatttaggcgcaatctttacgacgatcttgtttttcctctctctgggcggcataaaagacggaggcagttggtacatattcggaatttccatcatcctttggctcacttcgctgttcggtaactttgccgaagcagttgcggagggccgaggcagggcgcaggcggaaagcctgaaaaaggcgcgccgcgacgtcattgcccgaaaacttgtgcgcgccgaactcgaatcggaatattcggaagtcaagagcaatcaactgcgggcgggcgatatcgtgctcgtcaaggcgggcgagcagatccccatggacggcgaggttatcgtcggcgtggcgagcgtggacgaaagcgccattacgggcgaatccgctcccgtcatccgcgaatcgggcggagacaggagcgcggtcacgggcgggactacgatcacgagcgactggctcatcatccgcgtcacggcggaggccggtaacagttttttggataaaatgatcgccatggtcgaaggcgccagccgtaaaaagacgcccaatgaaatcgcgctgcaaatactgctcatcactttgaccattatctttttggtcgtcagcgcctgtcttttgcccttttcgaaattttcggtggatcttgcggggcagggggagccggtcagcctgacgaatatcgtcgcgctgctcgtttgcttagccccgacgaccatcggcgcgctgctctcttcgatcggtatcgcgggcatggcgaggctcaacaaagccaacgtcctcgccacgagcggacgcgccatcgaggcggcgggcgacgtggacgtgctcttattggataaaacgggtaccatcactctgggcaaccgcagggcgagcgaatttatccccgtcggcgatacgagcgaaagcgatctcgccgcggcggcgcaactctcttccattgcggacgaaaccgcagaagggcgcagcatcgtcgtgcttgcgaaaaacagattcggtatgcgaggcaaagagattgccaaactgaatgcgaaatttatcgaatttacagccaaaacgcgcatgagcggcgtggatatcggcgacgtccatatccgaaaaggcagcgcagatgcgatcaaagcgtatgtacaggcgcagggaggcgtttgcgacaaatcttgcgatgagatcgtggaaagagttgcgaacgaaggcggcacgccgcttctcgttgcgcagaacgaaaagatcctcggcgtcgtttacttaaaagacgtcgtaaaagagggtgtcaaagagaaattcgaagatctgcgcaagatcggtatcaagacgatcatgatcacgggcgataatcccatgacggctgcggcgattgccgccgaggcgggcgtggatgatttcgttgcggaagcgacgcccgaaaccaaactcgcgctcatcaaaaaattacaggaagaaggtcacctcgtggcaatgacgggcgacgggaccaacgacgcgcccgcgctcgcgcaggccgacgttgcggtcgccatgaattcgggaacgcaggcggcgaaagaggcgggaaatatggtcgatctggattccagcccgacgaaactcatcgaggtcgtgcggatcggaaaacaactcctgatgacgcgcggcgcgctcacgaccttttccatcgcgaacgatatcgccaaatactttgccattattcccgtattgtttgcgggcatctaccccggactggaagcgcttaatttcatgcggctgaccagccctacgaccgcgatcctttcttcggtcttatataacgcgctcattatcgtggcgctgataccgctttccctcaaaggcgttcgttataaggaacagcccgcgggtaaaatgctgaaacataaccttttgatctacggggtaggaggggtgatcgcgccttttctgttcatcaaatgtttcgatttgctgctcaccgtctgcggcgtggcgtaaaggaggtcaactatgcaggaaattaccgaaatcgcgggcgaggcgcccgtcaaaaagaaacgctttcaaacggcccgtgcggcgatcgtttgccttctgatcttcacggtcctgtgcggcgtggtttatcccattaccctgactttggtatcgaaagcggcgtttccgtacgaggccgaaggttcgcagatcgtcgtgacgttgcccgacggtacacagagagtttacggcagcgaactgatcgggcagaattatgaaaatccgaaatatatgttcggtcgtgtgaacacgggcgcgccgagcaatctgtcgcccgaaagcgacgaatatcaggatcttttgaacgagcgcattgccgaacgcaaggaaaaacttgcgaagatcggatacgccgataccgataaaattccttccgaactcatcacagcgagcggcagcggcgtcgatccgcacatttcgccggcaacggctgaattccagatccctgtgatcctggcggcgagaaacgcggataagggcgaggatgaggaaaaactgaccgaagaagatctgcgcgcgatcattgataaatataccgaaggcagattcctctggatattcggggaaaagcgcgtcaacgtgcttctcgtgaaccttgctctggacggactgctatgattgccgcgcggggcaaactgaaaatctttttcggttattcggctggcgcgggcaagacctacgccatgctgaaagccgcccaagaggaaaaaagcgcgggcgtagacgtggtgatcggatatctggaaccgcacgatcggcccgaaacgctgaaaatggcggagggactggaagttcttccgctgaaaaaaatacagtaccgcggcattacgctcaacgaatttgacgtggacgctgcggagcgccgccgcccgaagttgctgcttgtcgacgagttggcgcataccaacgcgcccgactgcaaaaacagaaaacgctatctggatatagaggaagtgctcaactgcgggatcgacgtctatacgaccgtgaacgtacagcatatcgaaggtctgcacgatctggtggattcggcgacgtcggtagatgtcaacgaacgcatccccgacgagattttcgactatgcggacgaagtcgtattggtggatatcgagcccgacgctttgatcgagcgcatgcgcgagggaaagatctatccgaaaacgcgtgcgaaagcggcgctggaaaattttttccgcgcggacaatctctcttctttgcgcgaactgttcatgcggcggagtgccgaccgcatcgaaaaacaggtgaatcacggcgagcgacgcacgagaatactcgttctgatcagcccgtcgccctcctcgcagaagaccatccgcgtggcggcgcgcacagcggaagcgtttcattgcaaattttccgccatgtatgtggaaacgaacggcgcgctgagcgacgaagcggcggcaaatctcaaaaaacacatgaatctcgtgcgcgatacgggcggagagatcatcgtaaaatacagcgatgacgttgttgaaacggtagcggattacgtgcggcttgcaggcgtcacgcatcttatcctcggtaagacctggcagtcggcaggcaaaaaagttgggctggaagataaatttatcgaaaggctaccaaatctggaaattctgatcgtgccggataaccaaaggttttacgcgaaaagagcgtacaggcaaacgctgtttgcccgactgttcaaccgcaataaattactgcaaaaatataagacggcgaacaggatactcgatatcgcgcatttactcgaacgggcttctttggaagaatcggaaaaaaataagcggcaggtacagatcgcgcatattttgtcgcgcgcttttgaccgaagcgtcgctatattgtccgtaaaaggaaaaagcaccgccgctgtaaagggggagaacgtcggatttttcggcgaaggcaacgaaaccgccgttgcggaatggtgcagaaaaaatcataaagcggcggggcggggaacggatacgctgcgagaatccaaagcaatttactttcccgtaacgacgaatacggaaacggtcgtcgtagccttttcctgcatggaaaggaaacttacggtgacggaaagactgattttttatcagttggaaaatttactgcgcatgattttataaaagagggcgatcgccctctttttatgcatacggcgcatgatataatatgaaaaataagtattggacattgcgacgttcatgtagtataataatcccgtgaaattttaacgggaggaaatttatggcttatctgggagaagatatcaaaaaattaggcttcggaatgatgcgcctgccgcagaaagacggggcgatcgatatcgggcagaccaaagaaatggtcgatctgtttctcggcgcgggatttacatatttcgataccgcctgggcatatgcgggcagcgaagatgccgtccgtcaggcactggtcgagagatatccgcgcgaacggtttcaactggcgaccaaaaacgcggcttggatcaactgcaagacgcgcgaagaagcaatttcgcagttcgatacttccttaaagcagacgggcgcgggctatttcgatttttaccttttgcataatctcggggaaagcagaacgcgctgtttcgacgaattcgacctttggacgtggatactgcaaaaaaaggaagaaggggcgatacgccacgcgggattttctttccattccacgccgcaggaattggacgagatcttaacggcgcatcctgaaatggaattcgtgcagttgcagatcaactatgccgattgggaaaaccccgccgtacagtcgcgcgcgtgctacgaagtcgcccgaaaacacggtaaacccgtcgttattatggaaccggtcaagggaggaatgctcgcgtcgccgcccacggaagtggaaaagattttaaaaaacgccgagccgaattcttccaacgcttcatgggcgatccgctttgcggcgagtctcgacggagtcgtcaccgttctttcgggcatgagcgatcttgcgcagatgcgcgacaatctttcctatatgacgaattttacttcgctgagcgataaacagaaagcgacgcttgccgccgcacagcaagaactgaataaaatgccgctcattccctgtacgaactgcaactactgcgcgaaagtctgcccgaaaaacatcggaatatcaggcactttcacggcgatgaattatctgacgatgtatcgagacagagcgctcgccgcgtcgcaggaaaactggctcgtggaaggtcacggcaagtcgcgggcggctgattgtatccgttgcggcaagtgcgaggttgcctgtccgcagcacatatccatccgtcgcgaactggaaaaagcggctgctgcattatattgagaggaaaaaaaatgatcgaatcgattttagtaaagaaaaatgtttcgttaaaggcaaaaattacgatcaaaagcctgatatctgcgggcgtcgttgcgtttgccgttcttttgccgcaactggtgcacatatgggcaggctctgcgggcggagtacagtggctgcccatgtatcttcccgtcctgctcggcgcctgtcttttaggcgtttggtgggggctcggcgtggggatcgtttcgcctgtcgtcagttttttaattactttcgccatgggcaaccccatgcctgcggctgcgcgtttgcctttcatgatcgcggaacttgcgatgatcgcagcaatcgccggtttattttcccgaaaaataagtcaaaacggatggatggcatttcccgccgtgcttctcgcctttgtcggagggagaatattttttctcctgctcgccgcgatcttccaaaatatcgcgccctttacggcggcagccgtatggtcgcagatcacgacggggcttctcggactcgttgtgcaggcggttttggtgccgtttttgatcttggggatccgttatcttgccgatcgggacaaaaatcatgactgatttggaaatggccgtgcagaatctggcggggcatacgctctgcctttgccgcgatggtatgtgcatattttcggaaagacgcgggattgccccgatgatggatttgatcgcctcgcatgcggacgtgacaggatatgcggccgccgacctggtcgtcggcaaggcggcggcattgctgtttgtttatgcgggtatccgcgaaatttatgcggaagtcatatcggatggcgcagtccgcatcttaaaaaagtacgatattccttttcgtttcagcaggcgtacgaaacagatcgtgaaccgaaagggcgacgatatctgccccatggaaaaagccgttcaatatatcgatgaacccgaaccggcgctttcggcgcttacaaacgctatacgcaatatgacgtaaaaagagaccgctgccaccagcggtctctttggtactcccgctgggaatcgaacccggaacggccccttaggagcaattagaaagagcgtttatcgcgtacaattcaggcatattcagccgttttgtgcgttatgaacgcttatttttttactcttttttcgtaatgtttggtaactttcatcttgtatatttctgttcgggtgtaattcgggtgtaaaattgaaggtgtaaagatcttccgacaacggcaaaaatattgtaaatttggtgtgttgactattgcttttttgccgataaagtgctatacttataagcgaggtgtttttgtatatgaaatatttatctgtaaccgaaacggcaaagaaatggaatatatcggaacggagcgtccgtaactactgcgcattgggaaaggttgacggtgcgtttttaacgggcaagacttggaatatccccgaagacgcgcaaaagcccgacagagttaataagaaaatagaattgccgactacccttttggaagtgcttacggcggaaaaaaaggcaaaactttcgggcggaatttatcacaaggtacaaatcgaattgacgtacaattccaaccatatcgaaggcagccgcttaacgcatgaccaaacgcgctatatttttgaaacgaacacaatcggtattgacggcggagcggtaaaggttgacgacattgtggaaacggcaaatcactttaagtgtatcgacttgattatagaaaacgctaaaaagccgattacggaaacttttataaaagaattacaccgcacattgaaaagtggaacgacggacgcacgtcaggattggttcgccgtcggcgattacaaacgattgccgaacaccgttggcgatatgttcacggcgcagcccgaagaagttgccgaaaaaatgaaggaactgcttttcgagtataatgcgaagaaagaaaaaactttcgacgcccttttggactttcattacaaattcgagtgtatccaccctttccaagacggcaacggacgcatcggcagacttttactattcaaagagtgcctaaaatacaatatcgttccgttcattatcgacgaagaattaaaactgttctactatcgcggcttaaacgaatggcaaaacgagcgcggttatttacgcgatacctgcctaatggcgcaagacaaattcaaactttaccttgattatttcaaggttcaatattaacaatacaggaaagttatatgacggataaaaattcgatgagattcgatttcgggcaagcaaacgacgaacagaaaaaagcgatacagcatattgacggaccagctcttataatcgcaggtcccggcacgggcaagacttttactcttgttaaaagagttgtttatcttatcgtcgaaaaaggcgtaaaaccagaaaatattttgattgccacctttacggaaaaagcggcaaaagagcttattacgcgtatcacaaacgaacttatcaggcttaatataaacgtaaatataaatgaattgtatatcggtacgattcactctatttgtctgcggctgataaaagaaaatgtcgaattcacgagattaaaaaagaattatcgacttatggacgaatttgaccaaaaatatatgatttacagaaaccataagatatttgatgaaattccgaatttagagcttatagccgatagattaagtccttgggaaaaatcaaagcagcttgcatattatttcaatgctatatcggaagaaatgataaccgtggaagatttgttaaaggacaacgatgcggctgttcaagtgcttgcccgtgcttatgaagtatacttaaaactacttgacgaagaaaacgctatggacttttcgtccatacaggttatcgcatataatttgctaaaagaccacgacctgatacgcaataaaattcaagagcaaatacaatacgttatgattgacgaatatcaagatactaactatgttcaagaacagttgatatttttgatagcggcaaaacatcacaatatctgcgttgtcggcgacgacgaccaaggcttatatcggttccgcggcgcaacgataagaaatattctggaatttcccaacaagtggaaagactgtgcgaaatttaaccttatagagaactaccgttccgaaagagatatagttaatttttataacgattggatgcaaagcaccgaattaagtggctttaaatggcaaaattttcgttatgaaaaagcaataaagccttccaagaaaaacttaatcgaaggtgtaccgacggttgttaaagtttcgggacaaagaaatttagagaactggggcgacaatattattgattttatcaataagttaaaagcaagccatacaattaccgactacaatcaaatagcttttttattccgttcagttagaaacgaccgcgtaaaagcccttgcggattatctggaaaaacacggctacaactatatgaagttacgctatgaagtaaacatacaggcttgtacgcttgccaatgcctttgcgggtaaagccgtgagcaaaaattggagtagcgatcttgccgaacggataggcgttccgttcgacgaattgtttaacgaaaagataaccgaagaaccttacgcatacgaaacgatacacaaattcaaacgcataatccgagcggtactttctcttgcaaagaaaaaccgtttggttacggataactacgcttcggcagactatatcaattttccgaaacgtccgccacataaaatcgagtgcatgaccgacgaagatgccaaacgcttttacaagtttattttggactatcccgatattcgttacaaaacggctatgttattatttttgctgacaggctttcggcgcggcgaagttgcagggcttgaatggaaagacattgatttcgagaaaagcgaaattacggtatgtcgttcggtaactaccgtaaaggaatttggaatgatagaaaaagaaccgaaaacggatatgtcgaaacgaacgctcgccgtacccgaagtattgattgaaacgttaaaagagtaccacgaatggcaaattaaccgccgcgctgaactcggagattatatgcaggaaaatgattatctttttacgcaggaaaatggcaaacgactttatccgagtacctttacgggttggctgaataaaatgttgcgcgaagcgaatatcgaccactattcgttgcacagtttaagacatacgaatatcactttacagattgccgcaggtattcctattgtaaccgtttccgcaagagcgggacatgcccgcacgagtacgacgagcgacatttatgcctatgctctgcgcagtaccgacaggattgcggcggataagctcggcagtatcttttcggacgagcaaaagcccacagaatccccgaaacctaccgaagaagaacctttattcgatgtggacgaacaagccgttatggctgaatttaagcgtatgaaaagcgaaatgaaaaggctcggctttgaaactatggaagaatacaaagaatatctcgaatttttggaaatgaagaaagcaaaaaagaaagattttcaaatgtgaaattttctatatataaaaacaattcaaatacaccgaaatctttttgacttgaataacttttagtgctataatattaaatacataagagttaaacagatttgtgatgctgtttttctacctatgaatccgtttggattggagtggtggttagcacttgtgtataatgctgaataatcaatttagccaaggcatcctcacgctatattgtagggtgctttaattattggcaattcggaggttgattatgaagaaaaatagtaaggcacgttttaataatatggcactttataaggctatggacaatttttatgatgatccgcaagcacaaatattgtgttgcaaagcgggagttcaaaattgtccggcagaagacacacgttattacggcgtatttttaactaattgtaaagataatgaaattaaaatagatattaagcgatttgaaaaaattcttgggttaccgaaaaatgttagtgcggtaataaaagaacgtaccggacattattttgtccctgcaaaaaaagattactatgactataattgcaatatattttttgaagtgattgcaaaaataaaaaaagattggaaagaagaatataagcccttaatcgataaggcaattaaagatatacccgatgcggagtatcgctttgaagatatgtgcgggatattagaacccaatgaagcggttactaattcaatgattttacaggctaaggcacaagcaaaagtacaagcaaggcgtaatcgtttatatttgagcctttatgcgcagttttttcatcaaatggtatctcaaatagaagccattacagtatcggtattaacaaataacggttatgaaggggatcgtttcgatagaaatgttttttacgctttcaagggagctaaccaaagcaaaataaaagaattaaatggttttatggaatacgatacgctttatgcgatatggcattttattaagcataatagtaaatcgacttatgatacgcttttagaaattgctcccgaaattttagttaaagacgcaacgaataatgaaaaattattgaactataagcaaggcgatttagcaatatactatataaattttacaaatgaattaatagaaaaattattgaaccgagttcaaactttttttgttgaatattgcaaaattgtttttggtgaaaactatgacgaagcgcaatggaattatagtaagtttttcctttcgaaagtaaatgatgaaattgaaatgctgcaaaatccgttaggtctgccagattggatataaaagcaatcaaaaatatattttataaaaaacaaaaaaatccgaaacttattaaaataagtctcggattttttggtactcccggcgggaatcgaacccacaaagcctccttaggagggaggtattatatccatttaattacggaagcatattcagtttggaagataattctcaatctcgaaaaattaagaaatatccgttcgggtgtaaaaaagatgtaaatacgtttgcggcaagccgttttgtcggttaaaaaccgccgaaaacacacctttttgcaccattttgcccataatctctcggatatagcaaccccttaggagggggctgttatatccatttaactacggaagcatgtattctgtttactcaatatatattactataattcgcgcaaaaaatcaaatagttttatatgattcataaaataaatgtataaaaacgttgataaaatacgcgtgaaactatataatggtaacatagaaataaaaaggcgggaattggttttggaaaaaaggcgctcgaaaacgaaaatatttttcaaaaatttctttttggcaggactgattgcgctgatgctgatactcagcgtcgaatcgttgatgcccggggaaaaatcggcggaaagcagcaacggtgtgagcgataaggtcgacgaggtcataaccgatatgactgcggacgcaatcaaaaaaatcccgccgcaatccgtccgtatattgacgggcgacgagtccgcggaagttcttatcctgaactgtaattcgacgttcacgccggaaatacagatcttacctacgaatacctctgtcaattatcgcaaaacggtctggacgtcgagcgcggaaaatatcgtttcggtagacgcaaacggtcaactgaacgcgaaagcgatcggtactgcgacggtcacgatttcgttggaggggtatgaatctgtcaatgacagcatcgaaatacaggtagtggaagttttcgcgaatgatttacaattgcatcttacgacaagcgaattacccgtaggaaagaccacggcactgaaagcggctttatcgcctgcaaacgcgacttcccgcggtcttacatataaaagttccgacaaggaggtcgccgaagtatcgtccgcagggatcgtgcgtgcgaaaaaagagggtaaagtaaccatctcggtttcctatctgtcgctgacagataaaaacggagaaaagtttgcaattaccagggaagtgaccttgacggtcgtgcccaataccgaaccgaatattcctttggaaaaaattgaattgtttctggaagacaacggctcgatattttacgatgagggaaaagatcaatactatgtatttgcgggcgaaagtatttcgcaatccgtgaccttggctcccgcagacgcgaccgaccgtctgctcgtatggtcgagttcggacgcttccgttttacaggcgggcggcgaggacggaacgtgtactcttacgcctttgaaaaagggctcggcaacgatccgcgtcagcgcggctgcaaactcgaatgtttcgacggaattcacgcttgaagtccgtaacaggacgctcggcgccgtgatcggcgtgcagggcggcaaatcggaattgaaaccgaccgatcggccgaacgtatttactttgaatatttcggcgggcgcgcgcggtattctcttcgcggtttccgccgcgacggaagaattttacataaagtatgacaccgacgaacgtgaaatcgcagagatctacgaggacggtactttgtctacctacaaatcttctgcgggcacagaggaaggttatgtcacgttgaagataatcgtttccgacaatgattcgttttcttcggacggagggggactgtgcgaaacgtatgaagtcagactcaccgtctccaagcagacgttcagcgaaaacgtgagcggctgggcgctgtttatccgaaaactgttcgggcacttcggcgcgtttttggtattaggcatttttgcggcgggcacgtttattttgttttccaaaaaaaattggaaatcactgctcatcggttttttctttgcgatcgttttcggctttacctttgcctgcgtaacggaattattccagatggatatatttacgagcgggaggcacgcgtctttcgacgacgtggtcatcgattgcagcgggtatatgcccgcggtcctcgcgatctacggagcggttttaattacatggttcatcattgcgatcgtgcggaaaagcaagaaaaagagagatatacaagacgatttgaaaggggcggaataaaccgctccttttttattgtgtaacttgtgaaaatcatgagttataaatttgattttttgacaaaaatgttttataatagtattcggtagaaattggtcaataagctaatggaggtattatggataaaatcaagttgctgcaaacgaggcgctccaaagtattggaggcgggaagcgagatacgtaaaacgatttccgaactcgtagatgccgacagttttgtggaactttccgggtacagtttttccaaaaacgagttttacggagaggatgccgaaggcgaaggcgtggtcacgggatttgcgaccgtagaagggtatcccgtttacgtcgcggcgcagaatattaaagtgatgagcggcggcgtcagcaaggcgaactgcgaaaaaatcttgaaatgccttaccttggcggaaaaaaattcgacgcccgtcgtctatattctcaacagcctcggcgttcaagtcggcgaaggcgtcaccgttctggaggggcttgcctccgttttggctaaatccgcgcgtttgcacggcgtcgtgccgcaatttacgatcgtgaaaggcgaagtgtacggacaggccgcgctgtttacggcgaacgcggatttcaatttctttttaaaggaaggcgttctggctgccaacagcccgctcgtcatttccgcaaagagcggcaaaaatcttcccaaagaggaagttggcggcgcaaaggcgctcgataaaaccaacctcgtttcctttaccgcggaaaacatggcggagatccgctcgaagatctttaagatcatagaccttttacccgattacaattcggtagtcgtggaaaacggtgctgacctcaatcgggcgaacgcgaaactcaaccagcaatgttcttccgacgaacttgtaaaggctgtcttcgacgccgaaagttttgtcgaggtcggcaacgcatattcgcccgaagtaaaatgtattctgggccgcgtgggcggcgtatccgttgcggctgtcgtatttgacggtgaagagggaacggaactcgaccagtataacatggcgaagatcaattggttcctggaatttgcagcctattacagcctgcctttcataagttttgccgacacgctttcggttgcggcgaatacctgcgtgaacaattcgctcgttttaaaacagatatccaaatttatggagaattttgaactgcttgaaaacgccaaaatttccgtcgtctataaaaaggccgtcggcatggggtacacgctttttgcggcgaaatccatggggtatgattatacgttggcgtttgcgaatgcgaagatagcgctgtttgacagcgtggcgggtgcggagattgaacttgccgccgacgggagaacgcgcgaaaaattggcggaaaaatacgcggatgaaaattccgaccccgtgaacgcggcgaaagacggatatatcgacgatatcatcgaaccgcagttcgtaaaacagtatctgatagcagcgctgcaaatgctgctcaaatgaggtgtcgggtatgaattttttattactcgcagagagcgccgataaggtcgttcaaagaatttccattcccgaaagccttctctatgcgcttataggtttcgttgtcacgttcctgggtatcgcaatactgatatttttcgtttgggcgatgggaaaggtcatgggagtcgtaaattcccgtaaatccgaaaagagcaaagagacatccccggagcccgccgttgagacgactgcggaggacgggatcagtgaagaaataaaagttgccatcatcgcggccatcgccgcctattacgacggggaaaatacttcctgcgaattcaaagtcaagagaatcagacgtttataaggagataaaatcatgcgtaaatttatagtaaccatcaacggaaacgattatgaagtcggagtagaagaaatcggcgccgaagaacgcgtcgtaaacacgattgcagccgcacccgtagcggctgcccccgcgcagcaggcggcgcccgctgcggcggtaaacggtgaaaaaattctttcgccctttcccggactcatcaaaaaacttctggtcgcggaaggttcagcagtgaaaaaggatcagcccatcctcgtcctcgaagcgatgaaaatggacaacgatatcaccgctccctgcgacggcaaagtttcctttaaaacggctgtcggcaacaatgtcgaaacgaatgcagttctggccatcatcggttaataggtggcgtatatgcagtcgggtttacttttaaatatcggcgagatgtttaataacttatgggaagcatcaggtttgtcgcagggaaactggcaaaactacgtgatgatattgatctcgttcgttttaatgtatctcgcgatcgtgcggaaattcgagccgttgctcctgctgcccattgctttcggtatgtttatcatcaacatcccgggtgcgagagaagtcgtgtggggcgtgaccgatgatgcggggcatttcgtcgaaggcgaggacagggggcttttaggctacctttatttcggcgtcgaaaaagtcatttatccgccgctgatctttttgggcatcggcgcgatgactgacttcggtccgttgatcgccaatccgaaaagcatgctgatcggagcggcggcgcagttcggcgtattctttacattgttcggagcggtcgttttaggattcgatgccgctgccgcggcttccatcgccattatcggcggcgcggacgggcctacggcgatttatctgacgcaggcgctgtctaagtttacgaacgaagacctgcttgcgaccatcgccatagcggcctattcgtatatggctctgatcccgatcatccaacggccgatcatgaaagcgctgaccaccaaaaaggaacgcgccatcaagatgaaacaacttcgtacggtcaccaaactggagaagatcatattcccgttattggtgacgctggtcgtagggctgttgctccccgatgcgatccctttgctcggcatgctcatgctcggaaaccttatgaaagagagcggcgtcgtggatcgcctgtcttcgcaggcgcagaacggtctgatgaatacgatcacgatcttcctcgggatatgcgttggatgtaaagcgtacggagaagtattcctcgcgttcagtactttgaaaatcattttgctgggactgtttgcgttctgcatgggaactgtcggcggtctgttgatggcaaaactcatgaacaaactttcgggcggaaagatcaatcctttgataggttctgcgggcgtttcggcggtgccgatggcggcgcgtatatccgaaaacgtaggcagggaagccgatccgaacaatcacttgctgatgcatgcgatggggccgaatgtggcgggcgtgatagggtccgcggtcgcggctggtttcctgctcgcatgtttcggcggctaaacagtcattgccgcagatattgcggcagaagtattcagtttgaatcaggagaaatatcatggctgaaaataaaacgaaaaaggtattgatcaccgataccatcttgcgcgacgcgcatcaatcgcaggcggcgacccgtatgaggatcgacgaaatgatccccgtgctgtcgcaactggacgatatcggatattattctttggaggcgtggggcggcgccaccttcgacagttgcctccgctttttgaacgaggatccgtgggaaagattgagaacgctgaaaaagtatctcaaaaaaacgcccattcaaatgcttctgagaggtcagaaccttttgggctaccgtcattattctgacgacgtcgttgaaaaattcgtcgctaaatccatcgaaaacggcgtcagcgtcgtccgcgtgttcgacgcgctgaacgatcctcgaaatctggaaacttccatgaaggcgatcaaaaaatacggcggcatctgcgaggcggcgatttgctatacgaccagccccgtgcataccaccgcttactttgtaaaactcgccaaacaattggaagacatgggcgcggacaatatctgtatcaaggatatggcgaaccttttgcttccttatacggcgtttgatctcgttaccaaacttaaaaaggaactgaaacccgaaaccaagattcacctgcatacgcataatacggcgggtacgggcgatatgatcaacttgaaagccgtagaggcgggctgcgacatcgtggacaccgcgctctctcctttggggaacggaacctcccagcccgcgacggaacctttcgtggcgacgctgaaaggcacgccgtacgatacgggcatcgagatcgaaaaactcgttcctatcgtcaatcatttcaagggcgttgcggaacgtctgaaaaaagataaattcctttcgccgaaagttttgcagatcgatatcaacgcgctgatttatcaggtgccgggcggtatgctgtcgaacctgatctcccaactcgcgcagcagaataagtcggataaacttcccgaagtattggccgaagtacccaacgtacggaaagactgcggctatcctccgctggtcacgcccagttcgcagatcgtgggtacgcaggcggtcttgaatgtcgtgtgcggcgaacgctataaaatggtcaccaaagaattcaaggggatcttgaaaggcgaatacggcaaactgcccgccgaacccgatcctgcgatcgtcaaaaagatcgtgggtgacgaaaagcgcattacgtatcgtcccgcggacgatctcaaacccgaatacgaccagttcaaagcggaaatttccgaatatatcgagcaggaagaggatatcctttcctatgccgtgtttggtcaggtcgcgatcaatttcttcaaatggagaaaagcgcaaaagcagggcgtagacaaaaacctcgccgcgaatacggacaaagtctatcccgtataattaccataggcgccttatcggcgaaggcagtcattgccttcgccgatattctatcaaggatttaatatgaaaagagtcatcgttatcggcgcgggagcatcgggtcttgtcgcggcgtatttcgccgcaaagcggggcaacgaagtgatcgtgatcgaaaaaaacgagaaatgcggtaaaaaaatttatattacgggtaaagggcgctgcaatatcacgaacgatattctccccgaagatttcctctcgaacgtcgttacaaatccaaaatttttaacgggcgcagtgtattcttttcctccgcaaaagttgatgcggtttttagaagacgggggactgcgactgaaaacggaacggggaggccgcgtgtttccgttgtccgataaggcgagcgacgttacgaaatgtttggagaactattgcaaaaatgcgggtgtttgttttcattttaacgagcaagtgcaggaaatttgcgttttgcagagtactatgtcagacgtaattacagataaggctcgctatgcctgcgacgcgtgcatcgtttgtacgggcggattgtcctatccgggaacgggcagcacgggagacgggtacgcttttgccaaacaactgggacataccgtcgttcccgttacggccgcgctatgcgggataaatttaaaagatacggatacggcgccgttacagggactgtcgcttaaaaacgtttctgtttcagccaaaaggggcggaaaggaggtcggctcgtttttcggggagatgctgtttacgcatttcgggatctcgggaccgtgcgtattgtccttatccagtctgatcaaccgtttcccgatgtcggaaatcgaaattttcatcgacctgaaacccgcgcttgatgcgcagacgctcgataagaggatcttgcgcgatttcgaaaaatataagaataaaatgctgattcacgcgctagacgaacttttgccgaaatcattggtgccggtcgtcgtcgcgagaagcgggattttaccttcgacacccgtcaatacggttacgaaagcgcagagggggcatttgctggaaacgatcaagcgctttacattgcgcccttcgtcgctgcgcggaatacgggaatcgatcgtgacggcgggcggcgtggacgtaagggagatacaccccaaaacgatggaaagcagattggtcaaaggactgtatttctgcggagaggtacttgacgtagacgcctttacgggcggttacaatctgcagatcgcgttttccacgggatatgccgcgggaaataacgtataactataatatataagaagaggttttcatgaaagcaatccggggagcaacgacgatatcggccgatacgcccgcagagatcaaggacgccgtcggcgagttgttgatacaaatgcgtgaacagaacggtctgacggacgaaaatatgatctgcattctgttttccaacacgtctgacatcaagagcgcttatcccgccaaggcggcaagggaagccggcttttattcctgcgcgcttttttcttctttggaacccgaaatcgaaggggcgcttccgctgtgcatacgcgtgatgatcttggcggagatcgaaaatccggtgccagtatatcttcggggagccgccaaccttcgcaaagatctcaaaaaatttgcggtggcgctcgacggcccgtcaggcagcggcaagagcaccgtggcgaaaatgctcgcccgaaaactgaatattttatatctcgacacgggcgccatgtatcgagcatgcgcgctgaaagcgatcggcgaaaaagtagaacgcttcaccgaggacgcggtggcgccactcatagaaaacatatcgctcaacatacaatatacggacggcgcgcagcggacgatcttggacggggaagacgtatcggaaaagatacgccgtccggaagtttccatggcggcgtccgccatttcggcgctgccttgcgtgcgaaaaaaaatggtggagatgcagagagagatcgcgcggaaaatgtcctgcgttctcgacggacgggatatcggaacgcacgttcttcccgacgctcccttcaaatttttcgtgacggcgtcgagccgcgtccgcgcgaaacgccgctacgacgaactcagacaaaagggatacgacgtcgaatacgacaatgtgttgcaagagatcgaagaacgggactacaacgattcgcaccgtgcgttttctccgctccgacaggcggaggacgccgtcgtcgtgaatacggacgaaatgaacgcacaggaagtgctcgatttcatcgtgcgcaagatccaggaaaaagtataagaggacattatgtataaatttttgaaaggctttttaaacttcatcgtgcagatcatctatccctataaactgtacggaaaagaaaaaatcgtaaaggggcaggcgtgcgttctggtcgggaatcattatcggctgtgggatatcattcatatggcctgcacgaccaaagaccaggtgcactttatcgccaaacaggaactgttcgacaaaaagttgatcggttatctcgcccgcaaaatcgacgcgatccccgtcacaagggaaggcaacgacatcaaggcggtcatgacggcgctcaaatatctgaaaaacggcgaaaagatatctattttccccgaagggacccgcaaccgtacagacgccgaccttttgcccctcaaagggggcgcggcgctgttcgccatccgcgccaaagcgcccatttatcccgtcatgatggacggtaaaacgaggctgttccgccgcacgcgcatcgtcgtgggggatcccatcgatctgacggaattttacgaccgtaaaatgacggcggaggactacgcgaaggcggaagagatcatacgcgacaagatgctggagatcattcacggatttcaggcggaacgcgcggcgaaatcggaaaagaataagaagaaaaaatgaaactgtttgtagcaaaaaacagcggtttctgcaagggcgtgaaaagcgccgtggaaaccgccatgaatatcgaccccgtcaatacctttttattgggcgaactcatccataacgaacttatcaacgacgccgtgcgtgcgcgcggcatcgtcaccgttgaaagcgtgtccgacgttcccgacggcgcgacgctgatcatccgatctcacggcgcgggaagaaaggttttcggggaatgcgaaaggcggaatatccgcgtcgtcgactgcacctgtccctttgtcaagaggacgcaggacatcatcgacggattaaacggcacgggaaaaacgcttgtcgtcgcgggcgagagtccgcaccccgaagtcgtcgggcttttgggctggttcgagggggaaaccgtcgtgataaacgatcccgacgatcaacgaatttccgcgctttcagaaaaaaatttggcgatcgtgagccaaacgaccttctcggaagaaaaatttaataaaattattaaaaatattgcaaaagtttgcaaaaaaacagttgaagtttttaaaacaatttgttatactactaaagagcgtcagagggaggcggaaagactctcgtctgtatgcgatgcgatgctcgtaataggcggtttgaacagcagcaataccaacaaattatacgacatctgcaagcgcaactgcgggcatgttttccggtacgccgactcgggcgaattcgaagcagaaaaaattaaaaaatttaaaaatgtaggtcttgtgctcggcgcatccacgccggacacgcaaactcaggaggttctttttaagatggatagtatcgacacagaagtgaaagcaacgaccatgaacgaaatggatgaagtcgttgcacaaatggacaacggacagtcaaaattaaagagggggcagcttgtaactgcaattatatcttcggcttcggacgaaggcgtggctgtgttgttaccgttcttcaaaaaagaaatactcctcgaaaaatccgaaatcgaatgcgaagaatacaaaaaggaagacttcgcggcgaaagtcggcgacgagatcgaactgatggtcgtttccaccaatcccgtcaaactttcccagaagatcattgcccagatcaaagaagaagagggcaagatgcaggcgatttcggacggcgaggaattctccgttgtctgcacaggtttcaataagggcggtctggtttcctctatgggcacctattcggttttcgttcccgcgaaagagatccgcatgggctatgtcaaagaactcgacaaatacgtcggtaaaaaactgcgtctgaaagcgctcgagatcaaaaagagcgaccgcaaaaaggagatcatcgcttcccagcgcgtgattctcgaagaggaaaagaacgcgagagacgccgccaaagcggaaaaagaggctgaattctttgccaatattcacgtggacgacgttgtggaaggcaaggtcgagcgcgtgaccaatttcggcgcgttcgtatccgtcaacggtttcgactgcctcgcgcacatctccgatctctcctggtcgggcgtcaagaatgtgaccgacgttttggagatcggcaaaaaatacgatttcatcattttgaaagtcgacgaagaaaacaagaaagtttccatcggctataaacagttgcagccccagccttgggatcttgtggctgaaaaatacgcgacaggcgacaccgtgcacggcaaggtcgtccgcatcgttcctttcggagcgtttgtggagatcgaaaacggcgtagacggtctggtccacgtttcgcagatctctcacgaatggctggaaaatcccacctcagtgctcacgatcggcgaagaggtcgacgccaagattttggtgctcgatcccgcgaacaagaaaatgaccctctctatcaaagccctgctgcccgaacccgaggtcacgaaagtgcgccccagacgcgaggacggcggccgtgaagagagaagtgacagaccgagaaacagaaagccccgtgccgcatccagagacagagaagaagacgacttccgtgaatggaccgaaggcggagtcggcggcgcttccattgcggagatgttgcaaaacaaaaacgataactaagaaaaaatcaggcaaccccgctcgcaaggcggggttttgctttatgtgaggtgattaagatgtctaaacaaggtaacattcggattgctagcgagaacatgatgcccatcatcaaaaaatggctttactctgacaaagacatttttcttcgcgagatcgtagcaaacggcgtagacgcgattacgaaattccgtaaacttgcggacatgggcgaggcacagacctcggaagaagagtattgcatcaaagtttccatagacaaagatgcaaaaactctttccgtagaggacaacggcatcggcatgaccgaggacgaggtggaaaagtatatcacgcagatcgccttttccggcgccgccgattttctcgataagtacgagaaagcggacggagacgggatcatcggacatttcgggttgggattctattccgcctacatggtttcggaaaatatcgagatctttacgaaatcgtatcgggacgagcccgccgttcgctgggaatcggacggcgagagcacctataccatcgagccctgcgacaaggaaacgcgcggtacgaagatcgtcatgcatattgccgacgcggaaaaagagttcttggacgaaggtacgatctccacgctcattcataaatattgcggtttcatgccttataatatttatctgaactttcagggtaaggacgacaagcctttaaacgatccgcagccgctctacatcaaaaatcccaaagactgcacggacgaagaatataagagtttttataccaaaactttt

SEQ ID NO: 1023 - DNA, 13652 bp, Unknown
  16S sequences of unknown bacteria
ccgcggccccgtccgccgttcccggcggtcaagggcctgttcggccagcccacgattttgaataatgtggaaacctgggctaacattccccgcattattctgcagggagcggactggtttgcttccatgggtaccgagaagtccaagggcaccaaggtattcgccctgggcggcaagatcaggaacaccggtctggtggagatccccatgggcaccacgctgcgcgaggtaatcgaggagatcggcggcggcattccggacggaaagaagtttaaggctgcccagaccggcggtccctccggcggctgtatccctgcggagcattttgacatccccatcgattatgataacctgatctccatcggctccatgatggggtccggcggcctgatcgtgatggatgaggattcctgtatggtggatatcgccaagtttttcctggagtttacggtggacgagtcctgcggcaaatgtacaccctgccgcattggtacccgccgtatgttggagatcctggacaagatcaccgagggcaatgccaccatggaagatctcgacaagctcgaagagctggccgcttatatcaaggacaacgctttgtgcggtctgggccagacggcgcccaacccggttttgtccacgctgcgctatttccgcgatgaatatgtggctcatattatcgataaaaaatgcccggccggcgtgtgcaaggccctgctgcgctttgaagtcgtggcagacaagtgccgcggctgtaccgtgtgcgcccgtaactgccccaccggcgccatcagcggcagcgtgaagcagccgcacagcatcgaccagagcaagtgtgtcaagtgcggcgtctgcatggatgtatgtaagttcaaagcgattgtcaagagataaaggtggggggagaatagttatggaaaacgttacgattacaattaatggccgctcggtcagcgctcccgccggatccaccattttggaggctgcacgcctggccaatatcaccattccgacattgtgctatatgaaggagatcaacgagatcggcgcctgccgtatctgcgtggtggaagtcaagggagcaaagacgctggtcacggcctgtgtgtatcccatcagtgaaggcatggaggtgtggacaaatacacctcgtgtgctggcagcccggcgtactacgctggagctgatgctgtccaaccacaaccgctcctgcctgagctgtgtgcgcagcggcagctgcgagctgcaggctctgtgcaagcagtacggcgtggaaaatgaggcaaaatacgacggcgcgaagacgctttctgaaatcgatgattcagcggcccatatgatccgcgacaacagcaaatgtattttgtgccgccgctgtgtggctgtgtgcaaagaaacgcagggcatcggggtgatcggcgccagcaatcgcggttttaagacggcgatcacgtctgcttttgagatggggctgggcgataccagctgtgtctcctgcggccagtgcattgccgtatgtcctacgggagcactgcaggagaaagacaatactcagcaggtgttcgacgctctggccgatccggaaaaggttgtgctggtgcagacagcacctgcagtccgcgctggcctgggtgaagcgttcggttatcccatcggcaccgatgtgcagggcaaaatggctgctgcgctgcgcgcactgggctttgataaggtgtttgacaccaacttcggcgcggatctgaccattatggaggaagccaatgaatttgtgcagcgtgtgaaaaatggcggtatgctgcccatgatcacgtcctgttcccctggctgggtcaaatattgcgagcattatttcccggagatgacggagaacctgtcctcctgcaaatcgccccagcagatgttcggcgccgtggccaagagctattgggctgagaagatgggtatcgatcccaaaaagattgttatggtgtccgtgatgccctgcacggccaagaagtttgagattcaccgtgccgacgaggacgccaacggcgtgcccgatgtggatatcgccctgactacccgtgaactggcccgcatgattgaccgtgccggtatcgatttccgtgccctggcggatgagaactttgatcagccgctgggcagcggcaccggcgccgccgtgatttttggcgccaccggcggcgtgatggaagcagctctgcgcacggcggtgtatatgatcaccggcgaagatgcgcccagcgtggactttaccgaagtccgcggtgtggagggtatcaaggaagccacttatgagatcgacggggtcggccccgtgaaagtggcagtggcttcggggctggccaatgcccgcgacttgctgaaaaaggtccggagcggcgaggcggattaccagtttatcgagatcatgggctgtcccggcggctgtgtcaacggcggcggccagcctcaggtgccgtacgggatccgcaattttgtggacattcgggccgagcgcgctaaggtgctttataacctggatgcaaagaacctgctgcgcaagtcctatgagaacccggatattcaggaactttacaagaactacctgggtgagccgggcagtgaaaaagcccatcatctgctgcacaccacctatgtcaaacgtactgttaacagggtatatggcaaataaaggctgcgcgtgataatgcatgacattccctccccgaagtattttcttcggggagggaatgtgcgttgctggtttctttttcttcataagaggcaatggtgtgttatcatggcattgcttgctcggagagcgtatcgttcagaaaaatgatgagctggataagcccggcagactgaaatgtctgccgggcttatccagctctttttttatcagaaaggaggagcggaatttcgggtatggcccatatctgggcttttgcaaaaagtctattccggctgaagcggcattggtttgaaacaggaggaatatggaatggaaaaacaatatcgtttgatagaaggagctattttaagcacgctggtgcgctttgcgctggctgttttttacattatttttgcaaggtattgttgtgtggcggcgtagatctgttaccgggctgtgtgtcagatgcaacactgtttcaaatcggtttaggcacacctgcatctcatctggtgcaaatccttatgtgtgtgaggctgttcctctttttggagcacggggaacggaaactgccgcaggcatgacggtgggagcgacgatctgcggcgcagacgaagtcaaggcgcgctggtcagggcagcaaggacggcttcgggcgtgcgctcggcacacagcagtgtatgctccggttcgtggatgtgctctaaatagtgggcgtcggaatcacagattactgtgcagtgctccagataaggattgtcccggcgcacacggtggagattctccatgcgctgcagctcaaagcaggaaaattggcttcccggtggtacaaaacccaagttggacagcagactggtgctggatttgtcgatgtgggccgggatcatgaggccgtggtatcgggcagcgaagtcaaatacatcagcaaagggaatgtcagtggccgaaatcagaagacgcggctctgtaccgcagaccgcgtcattttcatcgtagtaaagctgctggccgaataaggcttcatcattgtcgatgggcagaatgtgagaatacacggccgcatcaaaatccagagcatcgttcagattagcaaacagacacagcacatgcacctcttccattgtgcacagctccatgcccggcagcgccaccagtccgaaatgtgctgctgcgcgcagcagagccgggcagttgcggcaggagttgtgatccgtcagggcgatcacgtccagccctttcagggcggccatacccgcaatgttggagggggtcatatcgttgtctccgcaaggggacaggcaggagtgcaggtgcaggtcgtaatagagctgctcagtcatggagcttttggtgaatggcgagagccgcctcaaagatggcttcatctgtggccagcacagtgatctgctgctggcgggctttggccagggcggcttcgtccaggtgcgcaccgccggccagcaccacgcaggccgcatcggtcagggccaccacagccagggtgttgatattgcccataacagtaacccatgcgctgcctgccggcgcgtggcccatggctacgctgagcaggtcgcagcagtaaacggaagtgatggcgcggtcggtatccgcgccccggttgaccacggtaaacaggccgctttcgatcagagtttgaatcgtcatatcagctttcctcctgagttgtgtccggccctgcaggcgcattttgcgcagcaggcgtttttgggaaatcgggtgaggcagattcggcttcggcagcgcgccgctgcagcggcccatccatcaaggccgcctgagcgccgagtttttgaaggctttccagcaacggctgcaaacgcgcgtctgcgccggggatatcgtgcaaggcttgatcggccagatctgagcaggcggcggtcagttccttcacactgcgtttgagcacatggatgcagtccaaggtagagctttgtcctcggacaatatcctcggcccgggcacggcaggtgggggcgccgcaggaaccgcagtccagtcctgggagctgctcaagcagttcgttcatctggttgaccatggcgatgctctcacgcacgttgtggccaaggcggaacacaggttcatactgtacctcgtcgtcccatgggagcgcctgctgtgtgcccggcggatctgtactggtgcggacggggggcagaaaatggttcagacgtttgaatttgcttttggccacataggcgttttccacctgaagcgtaccgcctacgcagccgccgggacaggcgtccaattcgatgaattccagatcccgcagcttctcgtcctccagctcttcaagtaccttaatgatattttcgatgccatcagcagccagaaaacggtcggtgtccagggcataggattcgcctgcacccttgccccagcccacaccccgctgccctgcagtggaaagagagagcggatgtttgcgggcttctttcatatggaacaggagcttgggatagatgtctttaatggcgatggcgccgtcaatggcgctggagtctgtgcccaggggcgttttggcataggtgatcttcgccggacaaggggagagaaaaatgacgccgatttgatcagcacgcagtccggtgcgctccatggcccgctgccgggccagccgcgcggccacttctaccggcggattcaggggcagcaagtgctccagaagattggggaagcggatccgcaccagccgcaccactgtggggcaggcggtgctgatcaggggccagttttccgggtggtcggcgatgtagcgctttgtggcctcggacacctgctcggcggcgtccgccacttcgtaaacgtcgtcaaaccccagatacaacagggcggtgagcagaatgttcacgtcctgcagattgttgaactgtgtgtaaaaagacgggggcggcagggccacggtgtagtcgtaccgttccaggatccccaggttgtcgcgccggatgcgtttggcgtggtagctgcaggtgcggacacattcgccgcagtcaatgcagaatttttcaaggatatgggcctttccgtcccatacacggatggcctcggtggggcagcgcttgatgcagttgacgcatccgcggcacagcttgtcgtcaagatatacggagtggaaaaacttctgttcgtccatgggaacctccttctgctgctgtgtcagagacggacgacggcggtcacggtggtgccgacgccgacgacagtgtcgatttccagcgtgtcagcattctttttcatgttgggcaggcccatgcctgcaccaaacccctgctggcggaccgcctcgctggcggtagaccaaccggcctgcatggctttttccacatccgggataccggggcctacatcggcaagcaccatggtgacggcatcgtcgtctacggttacggtgattttgccgccgtgtgcgtggatgaccatattgatctcgccctcatacattacaatggaaatgcggcggattatgtcgggcggcaggcccatctgtttgagcgtgcgtttaagacggctgctggcttcgccggctcgggtaaaatcgtcgctgtccacatcgaaggtcagtacgatagagtctttttcaaccatggtgctctcctcctctcagcccggcctgatacaggatgccgcaggcattgaacatggtcatctttgtctgcaggatgcaggtgtcggtttccgctgccagctccagcatatcctcgctgggtattttgccgcgtacgaacacgatcacgggaatgtccagcatttccacggtgcgcagcacctggagcgtgcacagacccgtgagcaaaagagtgtggctgtcagcataggccagggtgtcgctcatcatgtcgctgccgaaagcggcgttgatctccgtatcgagataagcgccagtgtgcaatatatcagcgtgcagcagtgaaacgatctctttgactgtcacagaatattcctcctgccgccgcggcatcggcgcggcgattacttttctttcattttaaaacgtgcccggaaagaattcaatagtgttttcgagcgattttgtgaagagaaaacaagggcgtacagttgcatgcgaaatgcagatttggtatactttgagaaaaagaaaggagagaggagaacagggatatgaaaacagcggcgatgcagcgtgcgatgccggtggttctgtgcctggttttggttgggttgctgtgtctgccctgcgctgcgcaggaacaatccgtgctcagtccctgggctgtcgaagaggtggcccaggcatgggagacaggcattgtgcctgcggatctggatctgggggaagattacactgcgccgatttcccgcggtgcctttgctcgtctggctgtgggaaccgccgcgctctaccggggaacggatacggcagcacttttggcggaatacgggctggaagcggaaagcgtagcagaggaaagcccttttgccgatacggcggatccctatgtggtgctggctgcccgaatgggcctggtgcagggcagcaactggggcaactataatccggacgggatcctcagcagggcacaggctgcggtgatgctgcaccggcttctggccctgatgggccgcagcgaagccaatgccacgcccatgtggttctccgacggctatagcattcctgcctgggcgcgggagagtgtgaagtttatttccggccgcaccacggcgcaaggaaaagctgtgatgggtggtgtctggggcaggtttgacccaaacggcgtctattcggtggaacaggctgtaatctcgctggatcgctgccggcagtcagccgaagtggaaggaatatacgatgcctggcgcgacgcgccggggtatgatacggtggtgctcaagctgtctttcggcggagactgcacgttcggccgcaatgccggcgcggcttacgccggttcctttgacgccatgtacgacaaaatggggccgacttactttttcagcaatgtgaaagagtttcacagcgacgacctgaccatggtgaacttggaaggagcgctgaccacgtccaatcagccccgggagaacaaggaatttgtgttcaagggacggccggaatatgccgcgatcctgaaagagggcagcgtagatgtggttaccattgccaataaccacgccagggattatggaacccggggcctggaggacacggttcgtgcgctttcaccctatgtggcggtgtccggttatgcccggcagcctattgtcacggtgaagggcgtcaagatcgggtttgcctccaacctgggctggagctttgacgccagccaaaagaaatttatcacagacgctatcgcggatctgcgcgcgcagggcgcccagatcattgtgttcaattatcactggggcgaggagcggcagtacaagagcaacgccacccagcgtaccatcgcccattactgcatcgacagcggggcggatttggtcatcggacaccacccccatgtggtgcaggaggtggaaacctatcgtgaaaaacagatcgtctattccctgggcaacctgagcttcggtggaaaccgcaatccgacggataaaaactgcctgatttatcaggcggattttaccgtcaatgtggacaccggcgcggtggtgtcttccggcggaacggcgctgccttaccgggtttcttcggtggatacttataatgattaccgtcccacgcctgtaaaaagcgattctaaatagaaatattttgatgaataacaacaaatagtattgaaatttgacggaaagagaggttctctgaccatgcagctttgcgagggccgcccagcagatgcgcgggaacggctggaaaaggaacggcgcacatacgatctgttggactcgctgggtatccgctattggcgaacggatcacgctccggcgggcagtattgcccagtgccaggagatcgacgcggtgctggacacggtgatctgcaaaaacctgtttttgtgcaaccggcaggaaacgcagttttatcttttgatgatgccaggggacaaagcattcaaaaccaaagacctttcggccgaactgggcgtcagccgcctgtcttttgcaaaggcggaggcgatggaggcgctgctggatgtgacgccgggcagtgtcagcatcatggggctgatgaatgacaaagggcatcgcgtgcagcttgtaatcgatgaagatgtgctccgtgaaccctatatcggctgtcatccctgtatcaacaccagcagcctgaagattgccacagcggatatcatggacaaatacctgaaggccgtgggacatacggcgaaaattgtacatttgaaaaagacagaggaggagtaaagcaatgatgaagttttatgggacgatggtgtgcccggattgtgtgaaggcccgggaggcgttgaatgcggcgggcgttttgtttgattatgtggatatcacggtgtccacggcgaacatgaaagaatttctgtatctgcgcgatacgcacagggagtttgacgctgtgaagaaagccggagccatcggcgtaccctgctttttgcaggaggacggttcggtggttctggatccccaaacactgttggaggcggcgcagcagtgaaaaaggaaatcgccgcgctcagcatgcacgaactgcgggtgactgcggtgtataccggatccatcggcgagttccgctaccggtttcatatggagttcgattccaacgaactggaagcggcgacctataccaaatggtgctatgaaaaggcggatgatgtggaaaccgcccgctttacgattgaaaatggtgacctgagcgcgctgaaagaatggatgaacgcacagtattacaagtattttccggacgcgccggtggaatgaggggcgagaaatgctgatcggaaaagaagtgacccatgagtaccgggggcgcggcacagtgattgccgtaagagagggagaaatcgttgtgcgtttcggtaaggattatgatctctcctttccttatccgagagaattcaatcacatgctgcgtttgcgcacctatgacccggagactcaagcggagatcgacgcggctgtccgtgcggatcgggagtgccgggctgcagcttaccgccgcacccatgggagggaatgaccatgccggcgctgctttctgcttttgacaactggtttttcctgctcaacgccatcaccggtgtgctgtttttgattgctggtgtgtattttacagtgaagccggaaaaatctgctttcctgatttcaaactttgcataccgctcgaaagaggagcgggagcgctatgacctgattgccctgggccgccacctgtgtcgtatgctgaccgcctgtgctgtggtgtgcctggcgggggctgtggcgtctctggcgctgggggctgcagcttattgggccgccacgctgggatggattgttctggcggtgctctcgctgcgggtggacaatgaaaaactgctgcgcaaataccgcaaagactgaaaaaggccgcccctgggcggccttttctgctgtccggaaaaaatcaaaaaaaagaagtaacctgaggagccatttcttgtgtatataagtaaaagaaagaaggaggcaagcacgtggaggacggagaaatcatcgagctgtactggcggcgggacgaggcggctattgcccaaagcgagaaaaaatacggcgcgtactgccgtgccgtcatttgccggattctgcagcttccagaagatgtggaggaatgcctggtggacacatggatggcggcgtggaacgctatgccgccgcagcgcccgacggtactgcgtacctttttggggcggctgatcgaccgtttcctgcgcactcttccggagaaagagtgcagcattttcctgcgccgttattggttccttgattccgtggaagaaattgcaaggcgctatggcctgcgcggcggctcagtgaaaacccgactgcaccgcacacggaaaaaactcagggagtatctgaaacaggagggatattcactatgaagcacgttgatgaaaccatgctgctgctggcggtgggcaatgtgggcgaagacctggtggctcgcgcagagaagcgcagcgtcccctcccgccggcgcgtttctttgcactttgctgcgctggcggcttgcttgtgcctgatcgtgggcgtggcggtgccctatgtgatggatggatttggctcaggaaataacgccggctgcatcggcgatatcagcgataaaaatgctcctgaaacagtttgtgaaaacggtgcattgcctggggacagcgctgaaaaaaatgcttctgtagcgctgcaggagctgggaatcgcatctgcagaggacattgtctccgtttcggcggcgccggtctccggtgcggggcagtacgggattgccagtccgcaggactcggctgcggtgcggcaggaacaaagcgatgctttgccgggaaccggtgcagagctgtacgccctgttggtgaagtctgaagcggcgcccgccgaagaagatatgccgagcctgtgcccaacggcgagagttacgcttacgctggcttctggcgcggtgctggaaggacagtatgatgccgtgcagaaccttttggaagtaggacagtggcgttttgatctttcagaacattggtaaaatcagaacatcggtcagagaggagtgcagcagatgaaacgaagaacaagaagtgcggcctttatagcggcaatattgctgggtatcagtctggctggctgcggggggaagcccgatgtgccgtccccgggcgatgatatgccagggggcggagcgtccttttccgcggacgcgggtgaatattttgccgccgttaccggggcggagctgctttcaggcgctgaaaaccggtgttacagccctgtcagcttgtatttggctctggcgatggcgggtgcgtgcgcggcgggagatacgcaggcgcagatttatgcactgctgggagcagaggacacagaaacgctggcggctggctgcagagtgatgctggatacgctgcagcgggatgaagaagacagcaagctgtatctggcgaactctgtgtggacacggcagggcatcgaaacgaacccggattaccagacgcttttggagcaggatttttctgccgaaagtttttctgtgccctttgggcaggccaaggcggatcagaacatgagcacctgggtcgaacggcataccagggggctcctgaagccgcagttccagcatgaggcggacactgtggcagtattgctcaacacgatctatttcaaggacggctggacggaatcgtttttggaagggaatacggaacgcggcgattttaccacagctggaggcgaaaccgtgcgcgcggacttcatgcagaagcagagtgccggccttgcccgggagggggaggcttactgcaaagcggagctgtcgttccgcagcggcgggagcatgttctttgtgcttccggatgaagacgttccgctgcagacgcttctgacggggcgcggcctgcaggagttgctgacggacgagggcgtgcagaaccgggacattgcctggtcggtgccgaaattccggcagaacggcgagatgcagttgatcgacctgctgcgctcgctgggagttaccgatgcttttgacagcgacgcagcggatttcagccatggctggaatgtgccggcctatatcagtgaagtacggcagggaacggctttttccgtagatgaaaacggcgtggaagctgctgcttatacagagatcagcatgaacgagacggcggcgcttgtggagccggagccgccgctggagatgcgtttggatcgccctttcctgtatggggtgcgcagcgctgacagcacactgctgtttgtgggtgtgtgcgccgatcctacacaggaggattaagccggggaaggaggaatcgaagatgaaacgaaataaagcggttcggtttgccgcactgacactggcggcggttttggcagtggcgctgcccggctgcagcgccggtgcggcgacgctcgccgggccggctgtggggacgccggcacgtgcggaaccggagacgaggatttcggtgcagttcgtgcagtctctgcgggatttcatggcacaaaccggcgcggaagcgcttgcccagggggaaaatgtatgttattcccctgtgagcctttatattgccctggccttggcgggcatcggcgcggcaggggaaacgcaggaggaaatgtaccgattactgggggcgaaggattcgcagactctggctgcggatgtgcagctcctgcagcgcacgctgcatcaggaggaaaagcgctgcagcgtgtatctggccaattccctgtggatgcgcgagggtgtggacttttatgacagctttacgcagagggctgcagagcagttttacgccgaatgctacaccctggattttgctgcgccggacgtcggcaagacagtgggccgctgggcgcacggccacaccggggggctgctgcagccggagatcgtgctgaaggacaatgacatttttgtgctgctgaacacggtcttctttcaagccaactgggtggatgccttttctgcatccgccacagaaatggcagactttactgcacagcaggggcagacgctttcctgtccgttcctgcatgccgtccgctccggcaaggcggtgatggcggaaggctggaatttggccagtcttccgatggaaggtgggtggcagatgtttttcctgctgccggacgaaggagagagtatcgacagcctgctggccgggccggggcttgcggcgctgctgaataccgatgcggcgcaataccggcagatcgagtggagtataccaaagtttgcagtcaaaggggagatcgaccttgtgccagtgctgcagcgcgcgggtgtggagcgggccttttgtgcagacgaggcggatttcagcaatctgtgtgacgtatcgcagctgccgggcggcgcggcatatctttccgaagtgcgtca

SEQ ID NO: 1024 - DNA, 3543 bp, Unknown
  16S sequences of unknown bacteria
ttgaaaacattgattttactgactttcttatgttttcttattaggaggcgagggatggcgacctcttttctcattgtttaccagataatacttgacaaacacaggaaaaagtatataatggtaatatgtcattctgaaaggagaagtctgaaaataaattttcagaccaaacagttttgaggctttcatgacgttgggtcgtgaattctgaaagacggacaagccgtctttcaaaaccgcctcaaaactgtaagtttgtgcgaaaggcatggtcataaaaatgaaattaacacctgaaaaagacggaattcttctcggaaggcgccttgagttcttccaccacaatacgatgccggagtggggctacgcggctgaccagaccgacacatacgcgctgctgcacccgaagaacgagattgaaggcgtgagatacccgctttacgtggtctttcactcggcgggacatgacgtctattcgacgatcggctgtacatgggcggagggcaaccacgatatctatcacgcgccggaggatatgtacgctctgtacctcgactgccgtgcgaacgagaagaacgactggtggtggggcggaataaacgcccacggcgagggcgacccttctcgctcagggacagagcttcagccggtcgaaaagcgctgtatcgtgacaatagaacacataatagagacctgcccgatagacactgagcgtgtgtacgcggtcggaaactcgatgggcggaagcggcgcgctcggaatcgcgatgcgccgaggagatattttcgcggcggttaaagtcaatgtcccggcgggagtcaggcatttcgcggacaggtgctgtcttgacacggtcgcgcctgatggattcaggatacctgacccgccggtgctcgtcgattactctgcgcagaacgacggctggtcggacgggcacgaggtgctgtacagaggaatgcgggagaagcgttacgccctgctcggctactggggcaatttcgggcatgcgaacaataatagtgtcatggaaaaggagaatgatctcatccattctttcgatatcttcagtgtcagaaagagcacaccgtacccggtcttcacgaacgccacaaccgatgacaagaacccgtgggagaacgacaggagcgtgacgacgtccggacaggtgaactcgttcttcaggtgggagaacgggactgacggagagcgggagttcagcatgacgctgagactcctccgcgaggacgagtggaagtcgagggtgacgttccccgacagctcgacagcggacgtcacgataagaagagcggacaatttccgcccgaatcccggagagacgataaactggaagtatggaaccgcgcacggaaccgcgacagctgacagtgaaggtctcgtgacgatagagcgcctgacaataacgaagactccggaaacacttaccctgacccgcgcgtaaggcgaacggggatatcacacctttcccctgagctcttcccctagtctcgagagaatcttcttctcaagccgtgagatatacgactggcttattcccatcatatcggcgacttccttctgagtgagctctcttccgccgttcagaccgtatctcaggttgattatgacctgttcgcgctcgtcgagtccgcggatggcgtcgcgtattgtcttcttttcctcgtttttttcgaggtcgcgtgagatgtcgtcctcgtcgctgccgagtatatccgagaggaggagctcgttcccgtcccagtccacgctgagcggctcgtcgatagatacttcgcgcttgcctgaggatttcctgatgtacatcagtatctcgttctcaatgcaccttgaggcgtaggtcgcgagcttgatgttcttgtccgcgcggaaggtgtttatcgcttttatgagaccgattgtaccgattgagacgaggtcttcgattccggtcccggtgttcccgaatttaccggctatgtagacgacgagccgcagattgtgctcgatgagagtctgccgcgcggcgccgccgccgtttccgtcaagctccgcgataacacgcgcctcctcgtccgacgtgagaggcggcggaagcgttccggcgccgttgacgtaaaagattccccggtgtcgcccgatgccggatatcagccgtgacagagccctcgcgacccgtgccgcgaaaccgctcataagtattccgagaccgttcagtttcatttcttgttcctccttgtgtgtatgtcattgcacgacagatgacggaattatgccatccagcccgccgaaaccgctgtcggctgtcgccgcgacggcgtccgtctcgtacccgtcaatcattatcctgtccggaacgagaccgatgagaagttcggcgtttccgatgccttttgccggtatgagacggattctgcgcgccgacgcgctgtcgagcgacgggatgttgttcacggtcagacccttgagcggttccggcaggatgtcagccatcttttccggcgagacgagtatcaccgctttcccgctgagtggttcggtcaggagatttccgctgtcgacgagcatatgaaatgtctttgtcctcccgtcaatcgtgatgctgacgtcggtttcccgcagagccgtcgagcgtggtctgagccttccgtatatgacacagacgacacccgccacgacagcagggaacgcgaacagagaggcgctgcctgatccggtatatccgaaccccgccacgcgcaaaatcctgccgagaacgctcatgagccctccgagagcgaggttcgccgcgaggaacacaggaagcgttctgaaaagccgtccgttataagcgacaaggcacatggcggctccgaccgagataatcccgagtgcccacacaacccggacgccgccgtttcccggaaacgcggtccgcagaactgcgcacagagccccgagcgccgacgccgcggcaagccttttccccctgacaggcatactgagtatcttcccggtcaggaacagcgcgagaaagtccatcgaaaaattgattacaaacagcacatccgcgaagatttccacgcgttcacccccgtgacagatcaattatacacccatgcggcgcgatctttctgtcgcattttatcgccgtgaaaaattttccagtcatcgcatagaacggcgccgttttgtcaacactatcctcgaccgggtcagaaaaatccgcccgaaagaaaggaagatcataatgcttgacagaatagctctgataatcgccataatcggcggcatcaactggggctcgataggactcttcaaatttgacatcgtggcatggatctgcggaggacaaggatcgctcgccgcgagaataatctacacagtcgtgggtctcgcctcgatatggtgcatatcgctcctgttcagagagacgaacgaagactactcaagggaataataaaaggggctgtcgcaataacgccctcaaaaaaacgtccaggccacccaaaaaagggtagcctggacgctgcttttatggtataatataattgcaagaaaaacaccaga

SEQ ID NO: 1025 - DNA, 19753 bp, Unknown
  16S sequences of unknown bacteria
tgctcttccgatcttacgataatgctcaatatagtatttcagcagatggtactgatactgcccgattgaatccagattatccagaatcggctgcagacggcggtataccggcggcatctttttcaggtcatctatgcatggcggcgcatcaaatccaaactccgtattcattttttctgtcgtcccgtaaatgtcgctgtaatgtccctcagctccattcaacgatccggtatagttatggctgtctccgctatccggatcatctacgcaaaaggaacccttgataatcggacggctcggatcatgctcacgtatcgctgcaaacagcttcgcccccgtacttactgtcaggtcgcccggctcattcatgcagatccagcaaaacagcgacggatgctttttcagcatgtctactgtttccagatatatacgaacaaaacgatcggcaaacgcttcatcctccggatgtgtccagttatattcagaatcatgcataattccaagaccaagctcatcacacagctcgtaaaaaaccggaagatccacatgcacatgaacacgaaccatattgaagccgctgtttttaatctgcaacagatctctgcgataacgctcctcattcattgccgatacatacacatccggaaaatatgccgttcctctcatataaaaatcttttccgtttaagataaactttgtcatctccggtgtccgctgcatctcaattttccggaatccggtcgtctcctcataagcatccagtaccggtccatcctttgcgcaaagcgtcacttttacccgataaacaaacggtgttcctttatcccaggtgttccagagccggacattggaaagggttccgtccagacaagcgactgccagctcagagtccccgctaggctgtacaccgatcagctcctcatttttcgtcaaaaccaccgccccggtaaagcagtccgtaatactccatctcaaagaaacagcttccggcctccgcacctttaccttcaaatgcagatcagcacgctccaacgcttcatccagctgataggaaaattccggattttctgcaaaaccggctcctttctgtatcctcaggctgacgcttccataaatgccaaccgggtttacatctctttgaataaatgtatcggaatgctcataagtgccttttaccatattccgatagaccgcaaaagtacgtttctcctgctggtcagccgccaccttttcatcccatggtgaccagacctttacaatcagccgattctttccatttcgctgtaccacctcatccagtgaaaaggaaaacggagctgaatatccctcgtgaaaaccaagatatacaccgttcagccagattttgcagtaataatccacattcgtaaagcacaattccacatgatccgtcgcatcaagtgacagctcaaattcttttttataccaccacggagcatcattaaaatagcgcagctctcttccccagtacggatgctcggaatagagcagctgtagttgcttcagctccggcagcggctcccattctgaaatctgcggtccctgcagggtcataaattcttcatgctccggcagcccaagctgctcacacgtgtcatgcacatcctgtaaaatttcccagttctttgataaatcctgtctcatagaatcctcctatctcaactcttgacagcctccaccctaccattctatctgcaaaaaaggtacaaaacaaccttagcattgttctgtacctttttcaataatccgataaaaatatctgaccttttattttacgcctctttccgcttccggtacaggtactcgtccagttccttcctgatcttctccggaatcgtgcgggataccggacaggtcgctgcattggcgaagcgttttgtaaatgtggtaaggaagttgatgtccttttgcagctgctccatcgacaggacttcttttaaatcgtacctgctatgaatcggtgcgacattgcggctggcgtcgcgtgcaaaggataaggccgggacaccctggtccgcaaacggggtggaatcactggagtagacaccggtctttgactcaaccgggaatccaacctccgctgccatgtaggtgatataatgagaaagcttttcttctgcggatacgcaggcaataaatttacccatgtacgttccgatcatgtccagattgatattgagcacaatcttgtcgagctcctccgcgtgcgctgccacgtaagcctttgaaccgagcaatccgcgctcctcgcttccgcaaaagacaaatctcagtccataatgacgcggctgctccttcatctgctccagaataccaagcaaccccgcacagccgctcatgttgtcatatgcaccgtgcgaaagagaagtcgtatcgtagtgcgcgctcaggacaatccactcatcacaggtacccggaagctctgcgatcacgttatgggacttgccgtcgtactccttctgctgtacctcaagccgaatctgcttcacgcccgtctttaccagacgaacggcctctccggaatgaatagtcgcacagagcacctttttcccatcccctacgacggcctcacgcaggtctctctggtcgatatccgcatgcggataatacatattcccgtgctggaaaagaattgcctttgctcccgccttcatcagatcctgatacacgaaatgcgtcacgcccgccatatccagtaagacgatcttatcctttgctccggcaattgatattggatccgttcccggcatatagtacagctcgccttccacgcttccgctgccgcagcactgacaggcccgacactcgatctcctctccatccgcatacagatgcgcctcctcgatgtcgcccatcggcacacggaaagcttccatatgcgtctttgcgccaagtgtctcgcactgcgcttttaaatactctgctacctgcagttcctctttcgttccactcgtgtggacaaaatcggtatcgtcgaatatcttctgtaaattcatgttactttttctcctttttcctggtaaagcggacattcgcaatccatccctgcagctctgctgacagggcctagcttcgctacttgtaagatcataaggaatcctcccgcaagcgggtccctctttatgatatgtcataaccgaatgctgcttcgcagcttattcggttaaaataaatgcgcaaatgtcaaaagcaatgattcttatgcgacggcccgcttcaccacctgcgcggctgcccccataaaatgtccggtcagaagccctgataagagcacgagcagcagcgtaccgattccaaactgtccgcctaaaagcacacctgccagaatgagcactgtgtcacagcataaaatcacaaggtatggccgcttctgcagccgcacgctcagatgccgcaaaaacagctccattggaagtgtgccactgtcactctggatcagaagcgccatgccaaatgcctgcaatagacagcaggcaaatacgacaagcagccgggccggaaagaacagctcctccccgatccattctgcaaacagccaaagaaagccttctaaaatccagccgcccaaaaatgcgcacagcaaagagcctatctgtggccgactacggaaaaaaagcaatgccacgagcagaagcaggctgacaatcgtatacaaaataccataggaacttcccgtacgttgcataagcccctgcagaaatacgtgaaaaggatctgcacccagtgcggtgagcagtgtgagcgcattcgaaagctgcagcagcacaaggccgactgccgccagcgaaagccgtattcctgtttcccgtatgctccgtttcctcatcttccgctccttctacactattcgttctctttttccttctcccggaaattgattggttcataatccttcaactctgccagaaaccctttttcctgcagtttgtcctgaatcagatccagaagtttttctgatggtgcacttaccgtatgataatgatactctgatgtaatattttttaacagtgcagaatgtccgttctgcaagtcctgaagaaattccctgatgtcgtttctgctggcaatatgaagatccgcccggacaattccatagaccttatgatatacaaatacatcttccacatgtccgccataatccacaatcaggctcagctcctcttccacttctttatcactgtgaatgactttgaatacacggctgatctttttcccgcctgtcagcagatatccctgattagttgaaagaatttcatggtcctgtgcccgcagaagtgccatgtcctgcacgatcacctgtctgcttacgtctaatcttttcgacagctcttttccggaaagcggcgtactgctttccgacagcatctgaatgagcttgtttcttctctctcttccgttcatcatccggcaaacctctcgatcaactgtgtcatatatggtttctctaatctggcttcctttaatacctcgtcctgtgcaaacacttcctctgaagttccgtctgccagtatcgttccataagccatgacaatcacacgctcaaagttttccgccacaaaatccatgtcatgaagaatcgcaatgaccagctttccggtctctgaaagcctctgaatcatctctccgatccgttttttacccggatagtcctgtgcgatcgtcggttcatctaagatcactgcatccgtattcatagccaccacggatgcaatggccaccatctttcgctcatacatttccaggtcatagggattctcgttttcctttccggaaagtcccatcatctctaatgcttttaatgccttttcttttgcttctgcctgactcattccaatattcagcgggccgaacatgacttcgtccagaacattgtatttgaatatctggtcatccggattctggaatacataccccacttttccggccagcatagctactgtcttttgtgagatatcctcccggccaaaatacacggtgccggaaaccggcttcagtaaaccttttaataaacggaccaatgtcgtttttcccgctccgttttgtccgatgatggctgtggttctctgatccagtgacagatgcaaatgttccagcaccggaacatttttctgataggaaaaagaaatatcttccatccggaacaatacttcggagctctgcttccggactggctgctttactttcgagtgcagtttctgtgtcatgtcaccatcacacttctgctgatgaaataatgcagccgttgactccagcgtgaccggataagtcccatctgcattcatcagtcccatctgcttgctgattcgcacaaaagccggtggctggatacccatttcacccaaatcatcccttgcaaaaatcttctccggggtgtcaaaatccaccacttctccatcatgcatcagaatcagccggtcacagtactttgccatcttttccagcttctgttctaccataatgatcgtctttccggtcccggagagctgctcaaccacacggaatacctcttccgttccttccgggtccagctgggaggtgggttcatccagaatcatcacctccggctgcattacaagaatgctggcgatcgccactcgctgcatctgtccgccggacagttcaaaaggattgcggtcacgatactgccagatatccagctgcttcagtactttctcgatacgcaccttcatctcttcccgccggattccaagattctgaagtccgtaagcgacttcaccatagaccgtatctctcgcaccggaaagctgattaaaaggattctgaaaaatcagtcccacatcctcgcacagctcctgcaccggtaccttttccgccagacgctcctttaccttcacaaagccgccataggctccatggtaaaactgtggcaccagccctatgattgcctgacataaggtactttttcccgcaccgttctgaccgacaattccgataaattcacctttttcaatggaaagtgtaatgccgttcagtgccagatggtctgtccccggatatttatatttcagattttccatcgtaattattgccattacagtatcctccagacaatggtgataatcataagcatgagcagaatcacccggatcaccggatcccatttgtatttcggcctgtcatacagccaggtcttcttctgctttcttccgaagccacgcacatccagcgcaatagcccgctctcttgtattgatcagtgagctcatcactaccggtgaaatcagcggcagaaatgctttgattcttacccgcagattgccttctgtctccattccacggcttcgctgcgcatccgtaatcgtatcctttgttgccatcatctgtggcagaatctgaaatacagaattgatcacatatccaaatttcggagagaatccacttttttccagctcatccacgagctcctgcggagaagtggtcagtacgaatattccaaaggagagaagcatattcaggatattgcagccgattctggtggcaaagagcattccctctttatagaacgtaataactccaacagaaaacaggactgtttcattgttgtaattgaaaagtccctgtatcaaaaaaatgacaacaattaaggtaaaagagaacgctaccagcggcagtgccctcttcagaattttcccactggcaagcagaaccaaactgcttacaatcataacagggaaaagccaaagctttccccctgtcaatggaatcataattgctgtcagaatatataatagcttcgtatacgggtgcatcttatttaaccatgaaccctgattgatatataaactgatatttttcattaatccagtctctctacttctgcatttacatcatacagcgcggtcagcttctttggaagcccttttaagataaaataaacgatgataattgtcaatatcttatccggtacatctaccacaatttcatctaagaaggatccgatgcctacagccattccggaagcctgtgtagctgcaaataccgcatctccccatacgttaccggtcgtaccgccccagaacacaatgttcagcggtgtggaaatacatacggctgccataccgccgccaagcgcacatacaaaggactttggaaatgtctccataaatcccattcgagcgagaatacctacaaccagaccgattccaagactggtaagcgcataaatcagcgtaatattgtcgcctgtggtcagaccatagatcaggttattcgctgctccgcagatcgctccgatcaccggaccgccaaggcatgcaccgatacaggttccgatacagtccagccagagtggcagcttcaggagggatgcgaataattttcccaaatagttaattccgatacaggccggaatgagcacgatagtagctgtcgtcagtttggttttaaaaatttttcccatgttgctttccctttcttttgtgcagtttgcactttcactcggtcttcctttatttgatatctgtcatttcaggtgacaagacacaagacctgacagttactttacacctgcctgtaaaaaaagtcaactataacgccatataaaacaaaaatacccggcggtcctgagccgaaccattccgggtatccttgctatttctgtcatttatttcatcaggacacttcctgttctgcctcgtctcatgcctgtcctgtcctgaccccctgtttgcagctgtcaccggaaaatccagctctggcgcctttactgcctacagattgatatgtgaccgctgtttctccttcagtctggaaactgcacgcgccagcgacgccttggacatccggtactcatagaccgactgcttctgccgcagctgttcctccgcgcgttccttggcctcttttgcacgaatttcgtcgatatcctccggtcgctccgcagagtcaaccagaattatcacacgattgttcgccgtctgcgcgacaccggctccaacaaccgcatactgccacgtcccatccggcttcttgaatcgaagctcaccgggccgtactgccacgaccatctcctcatgctttgccataaatgcatactcgccgtccagtcccggaagaatcacgatctccgtcatgccactgtaaaagaccttatcactggctacgatcctaagatgaaattctgccatattttctgctccttttccagaactacttttgagtcaggctcttatcaagcctcagcctgcagcttcttcgcattttcaatgacctcatcgatcgtaccgacattgaaaaatgcagattccggatactcatccatttcgccatcgatgatcatcttaaaaccacggacggtctccttgaccggtacatatttgcccggcacaccggtaaagttctccgctacatggaatggctgagagaggaaacgctgaatctttcttgcacggtaaaccgtcaccttatcctcctcagaaagctcttccataccgagaattgcgatgatatcctgcagctccttgtacttctgaagaatctcctgcacacggcgtgctacctcgtaatgctcttttccgacgacatcctcctccagaatacgggagctggactccagcgggtcaaccgccggataaataccctgctctacgatctttctcgaaagaacagtcgtcgcatccagatgggcaaacgtggttgccggagccgggtctgtcaggtcatccgccggcacataaactgcctgtaccgaagtaacagatccctttgtcgtagacgcgattcgctcctgcagctctccaagctcggtcgccagcgtcggctgatagcctaccgcagacggcatacgtccaagcagtgcagaaacctccgaaccagcctgtacaaaacggaaaatattatcaatgaacagcagcacgttctgatgctcgacatcacggaagtactctgccatcgtaagtccggtctctgcgacacgcatacgcgctccaggcggctcgttcatctgtccgaacaccagcgcggtcttatcaatgacacccgaactcttcatctcggtccagaggtcattaccctctctggaacgctctcctactcctgtaaaaatggaatatccgccatgctccgtcgcaatattgcggatcagctcctgaatgagcactgtcttaccgacacctgcacctccgaacagtccgatcttaccaccctttgcatacggggcaagcaggtcaatgaccttgataccggtctcgagcatttctacgaccggactctgctcctcgaagctcggcgcctctctgtggatacaccagtgctcctccttctccagctgctcaccgccgtcgatcgtatcgccgagcacgttgaacagtcttcccagcgtcttctctcctaccggaaccttgatgccgcttccggtagccgttacttccatatccttatgcagcccttcactggaagccagcataatacagcgcaccatattatcaccgatgtgctgcgccacttccatcacacagcgcttcccgttattggtcacttccagtgcatccttgatgtagggcagatcaccgtctgcgaattccacatcaatgaccggaccagatacctgaacgatttttcctttcttcataattctaaactccttctatgctctgcagctgcttttcctgcatccgcttctgctttttccgcttctgcgccttcgcgcctgcgatgacctcggtaatctcctgcgtaatcgctgcctgacgcacccggttgtattccacagacagatcatggatcatggcctgtgcgctgtcattcgccgcctgcatggcgaccatacgcgcattgtgctcactacagtacgactcgaccagcgcaccgtaaatgtatccaaccatatagtttggaatgacggtatcgagcacaacctccagggaaggcttatatgcaaaatcctcctgatacatatcgaccggaatctttgccgtctgaaataccgttttatcaatcggcagcagctgtatctgctctgtctccgtctgcagtccgtttttcatggatgtataaatcatatgcacctcattgacagcgcccgactcatacagctcaaaaatacgggaagcgatgacacgcgcccgatgcatggtcgggttctgtgccgtgtagaggaaatgctcctctacttttatttttttcatatgaaagtactgacggcccacctcgccgacgacaaacagatgctgctccttacagtctgccagctgctcttctgccagtttcagtacgttgtgattgtacgcacctgccagacctttatctgccgtgatgacgagaaatgcctttttccgatccgtctgtgcatctgccccggaaccatcggaaatatacttatgctgaacctccggcaaatgccggatgatccgcgccagcatgccctgaagggtaaagaaatacggctctgtatcctccagctccttctttgcccggcgcagcttggtcgaggaaatcatgtacatcgcgtttgtgattttcatggtatcctcgatacttttcattctgctttgaatctcacgtgtatttgccatccgctcaccaccttttctgtgttttaccctgcctcttatgcattctggctctcactggtggttgcgaattcttttgctgcctctacaatgcgggtgcgcagctcatccggcagctccccggttgtctccagctcatgtacgatctcggaatgaacctcatggaaccatgcaagcattttcccctgataagccttaagctccgacaccgggacattcatcagcgtctttccggtcgctgcgaccagtgtgatgacctgctccgccattgagagcggctgtccaagcggctgcttcaaaagctccatcaggcagcgtccatactgcagctgttccttcgtcgcagcatccagatcggagctgaactgcgtaaatacttccatctcacgatactgcgccagatcgatacggatgcttcctgccgcctttttcatcgccttcgtctgcgctgctccaccgacacgggatacagacagaccgacattaaccgccggacgcatgccggagaagaacagatcactctccaggaaaatctgaccgtctgtgatggaaataacattcgtcgggatgtatgcggatacatcgcctgcctgtgtctcgatgatcggcagcgccgtgatcgaaccgccgccgttttcctcattcagtcggctggaacgctccagcagtctggaatgcagatagaacacgtcacccggatatgcctcacgtcccggagaacgctccagcagaagggaaagtgcacgatacgccaccgcatgcttggaaagatcgtcgtatacgatcagcacatccttaccctgatgcatgaaatattctgccagtgctgtacctgaatacggagcgatatactgcaacggtgccggatcagacgcggtcgccgcaacgacgatcgtatagctgtccgcttcctgctttttcaatgtattgaccagcttggcgattgtggatgccttctgtccgattgccacataaatacagatgacgccctttcccttctgattcagaatcgcgtccatcgcaatcgacgttttaccggtctgacggtcgccgatgatcagctcacgctgtccacggccaatcgggaacatggaatcaatcgacagaattccggtctccagcggaaccccgacggatttacgctccacgatgcccggcgcctcctcctcgatcggacgatacccggacgctgtgatctttccttttccgtcaatgggagctcccagcggatcaacgactcttccaagaaaggcatctccaaccggaagccctgcctttttgcacgtacgcattgctctggtaccctcgcggataccggtatctctgccgaacaaaatacagcatacctcatctctgcggatatcctgtaccataccgcgcacgccattatcaaaaataatgatttcgccgtacattgcgtgatccagcccgtcgatattggcaattccgtcgccgacgtagctgacaacgcctacctcctgctccttcgcctcgagatcaaaattctcgatctcgcttttcaggatggagatgatcccctgcaggctctgtccctgcggagcctgtgcctgctcgatgcgctcctttacctgctcgactcttcctttattcgaccagtcatattcctttccgtcaatggcaagtacaaagccgccgcctaaagacggatcttccttcttctggaagtcaaccttctctgctccgctcttcctgcggacaaattcttcgatccgcgcgagctgttcctcactcggggcagtcacatagcgcaaggtcgcctttacataatccttatgctccggcgtccggttgcggtatgcctcgcagatatccggaaacagggtgatcgcgtcctcgtcacagagcagctttaaaaagcttcggatctctgtcgggaatacccggtcgatgacgttatgctttgccgtcagctcatttgccgggttcgaaaaatcctgcataatttccggaactgcctcgaaaatcccctgcgtctgttcgagcacgcttgcggagataccaaggcttcctgccatttttgcatatttatctatatcctgtaccataattcactctccatgcaaactgttctgttatgcttccttcgtctccgcaaggaacttgtcatataaggcacggtcgctctcttttgcgtccttcatcgctaccatgcgtgccgctgccgtcacgaccatatcacggacagctgcatcagcctgctgcatagcggcagctttctcattctcagcatctgcctttgccttctcgacaattccgtctgccttatcctttgcttctgagacaatgcgtccgtactcggcagatgcttcctgtcttgcatctgcaacgatccgctttttctcatcctctgcgccctgtaccagcgcatcgtaatgctcctgactctccttcgcctctgccttctggcgatctgcctcggcaaactgcgcatcggcagcctgctggcgcttttccaaaattgcattgaccggcttgaagaggaagcgtttcatcagtaaatataaaataatcaggttaataatattaaaaagtatattccagtctaaccggagcacctgaattcaccttcctttctgagacttttgttgcttatctgaacgttacgtgcatcaggtcacagacacgtttgcttcgcaaactatccgctgcttacgcagctcctgtcttcctgatccttttgctgcttatctgaacgttacgtgcatcaggccacagacacgtttgcttcgcaaactatccgctgcttacgcagctcctgtcttcctgatccttttgctgcttatctgaacgttacgtgcatcaggccacagacacgtttgcttcgcaaactatccgctgcttacgcagctcctgtcttcctgatccttttgctgctgtacgtaactgttaacgcaacatcataattattaacagtgcgattacgaatccgtaaatagcggttgcctcggccagtgcacatccgagaagaagcagcttactgatcttaccctctgcttccggctgtcttgctacagcatctgctgcctttgcggttgcgattccgataccgatacctgctccgatacctgtcaatactgcgatacctgctccgattgcgattaatgtgctcatacgtttactctccttttcttttctgatggctgcacatccgggtctgattccctgtgcaaatttgttttttccttttttccgattgctattctatataaccttttgaccctggcatcatcactctattgcctctttgacaaacagcgaggtcagaaatacaaatacgtacgcctgaatcaatccgtcaaaaatgtcaaaataaaaactaaatacaagtggaacaccgattgggatcagctgcttgatcagctccatgataacaaatgctccaagtacattaccaaacagtcgcatgcacagcgacagcggacggatcacgacttccatgatattgatcggcgtaatgatcgctaccggttcggcaaagctcttcagccatttctttgctcccttttcccgtatgccggatgcctcgatcaggatgatgctcatcagcgcaagtgcgactgtgacgttcatatcctttgtcggcggcttgaatccaaacagtccgattacattcgaaaatccgatgtagacaaggactgtgacaagatacgggacatactgtcttcctttttctccgatcatcccctcgacaaaaccattgagccagagcacagcgctctcgactgcggcctgccgcttgctgatgtgatcgaccttcagatttctggtcatcagccatgccagaagcgtcagcacagccataatcacccaggtgacgacggttgattcggaaaccccgattccgccgaataccggaatcgtgaatacattttcacaattcagttcttcgagcagattcgctgccagtttttccatatcactgcttcctttcttctttattttattgctttcttaccgattttgtattatactcacagaaaattcgttagtaaaatgtatttttgtaatggttggtatgtcaaaaatacatgtcggaggagtttatgaatattacttatgattattaccgtattttctattttgttgcaaaataccagagcttcacaaaggcggcaagcattctactcagcaatgagccgaacatctcccgttcgatccgcaatctggagcatgagttcggtgtcagtctctttatccgctcaaaccgcggtgtgaccctgacaccggaaggtcaaaagctgtacacccgcgtcgcagctgcccatcatcagctcagctccgccgaagccgagctggccgatgccaaaagccttacgagcggcacaatcaccctcggcgtcagcgaagccgccctgcagatcctgctgctgccgaagcttcgagaatttcaccagaaatttccggagatcaagatccacatttccagcgtgacaacgcctcaggccgtctcttccttaaaaagcggactcgtcgaccttgcgatcgtcaccagcccgaccggcgtcacacgccccttaaaggagattccgcttcgtccgatccgtgaggttctcatcggcggtccacgctttgcctccctctccggcacacccaaaacgcttaaggagcttgccgactatccgtttatcctgctgaacagccagacgaacgctcacgacttctatctgcacttcttttccgagcacggcatctcgatcaagccggacattgaggtcgtgacgacggaccagattcttcctatgataaagtacgacctcggcatcggctttttgccggagcagttcgcgatggacgcactcatgaaaaaggaagtcttccagatcctcatgagcacgccgctcccgtcgcgctcgatctgcctcgtcaaaaatccctctcagcccgccagcatcgccgcgcgggaatttgagaagatgctgcggagctgaaaagcaatatgcaggcaaaacccgcttcattggcttcgcctgcatatcgctatttcctatcttcggtagtaatccgcttcccgttcaaattgtttccgttcctcatttgcgccccatttgttgtcttcatcgctctctttgatcgtcaccgcaaacgtcattccgatcccgattgcccccggtataagaaacaggcatacgagacagtataaggtagactttccggcatcatgaaagcgcttgatcgtcagcaaggtcagatacaaaaagtgaaacaggccaactgcacacagggctgccagcatatacggagagtttccatttccatactccaccagcagtacccactctgccatcccgcagattaaattacaaagcgcccacgcgatccagtaatagaggcgggggggtttttttacgcttggataaaatggtttcatttttcctcctactttaccaacttatgtacctcatacaaaaggccatccgacaaatcctctgcctttccatttttaagtccgaaaatcacataatggttcttttgtgtgatctctattctttcaaatttcaaatactgatccgaaatttcctgtataacattagtgtcggtgttcagcaaaaaaatcttactacactgatcagcatttccagctccactccaacacacaaatacatcagagtcttccgagatatcccattcgattcccgcatcatccagtataacctcatccgccgaatcctcgtcctgcttctcctcagtctgcttttccagctgatcataacgcttctgcgcttcttcaccagtataatagcgaagctctccgttctcatccggaattgctacctcaatcacccgctcatcagactccggttcccgagcagtaacgaatatcccattcgaaaaaaacattcctacgcctgcgattaccaataacattcttttaaatctcatggcattttcctccttaggcttgttgatatatagatttattttttaccgattgcttccactattccccctgttcctacattttgcagaatctatcttatatatattatctgtcaatttgagagtagtcgtcagcaggctccgcggtaaaaatggattgcgcatatttacttgctgcttctagtaaatagcattgcaaaaagcactgtatatcaattgcaacaacataatcacgttttatgagcgaatattggcctgattttcacgtttttcactgaaataattcttcttttttcacgtttttaataaaatatcttttctcttattaagcaatatgcaggtaaatcctgctttcatcgattttacctgcatatctctcatgatatttcacttactaatatctttcattacactacactggataagcttcataacaatttactcaagccatattacatctgtcgcaaattccccatcctcattcacagcaaaaactttttcgattgcgcttatctgattggtctgtgaattaatggtaattccaacaatatcatcgatctggagtttttgcacatatgcggcatcttcggcagacgcaggatcctttttcagataaaaattcatatcgtttagttcatggtctgccatcgtatatacttcataattttccagattcccctcctgcagccattcggccagcggtttactggacgtttcatctgcttcctttccaagatacaccgatcgaaccagataaccctccccataatcctttaaaattggagtccccacagtggtcttatctgtgatttctgtcggagtggtctcattatcaatttctatctcatgcggattggaatcttttgtaaaatgagaggtataaaaaacaggccggaacatcccgctttcggcatcttcatattgtccaactgcctcgatctgctcatcctctgcaaaatccccaacgggttccccgtcttccatatagctgtcacccgttccgtcattataccggatatgatcgcctacattcagcgcatactcccactgatttcctccgaccggttcttccagcgcgacgccattcagtcccactccatagaaattgaccgtattcgtataccggtcaaacaaagtacggcgcaggcagttattctgctcttcaaaccagtccccaagcggaatcgctgtataactcccgtcttcttttacatccgtcacgatccgcttcaggttatcaatggtcagaatatcattcttctctaccttaaaatcatttgcagagatatgctttgcgcttactggtaatgccagcatgccggaggccagacatgcgcatgtgaagattgatgctgctttatatcttttcatccagcttcctcctatttgtcctccatgtttaattcattattttctaatatttttcgttctacttgcaagtagtatattttataaataccatttatcatttaatttgtcaagcaatattctactctcttttagaatatccgttgactttcattctaatcttctgtaaaatacatatataccaaaaacaaagcgaggaaactctatggaatctcattacggtctgtccgacattgaatatgaattgatgcaattattctggagcagtgaccatccgcttccgtttgcggatgtgcttgcctactgcaatgacacattgaagcgtgactgggcggctactacgctgcatacttatctgacgcgcatgatccagaaggaagtgctcggctctacgcgcaaaggctataagcgctcctattttgcaaaagtcagtgaatctcagttgtcctgcaactatgccaatgactttctgaaagacagcttcggtggctctcttaaaaatctgctgcttacactgacctcagaatccaagctgacacaggacgaggcagatgaactgaagcaaattctggatgaaaatattgaagacccaagctaaacaaaactcgcaagagaaaagccttgatttaaacgctgcaatctgcgtgacgtttgagcttcgcaaaaataatataaggaggaacctatgcttcagatcatttacctgctctttgccacgagtctgtccggaaccgccgcgtttctgctctatctggcagcgacctctcttctggattcttatatcagcgccagcatgcgttatctgtgcctgaaaatctgcatgttgttttttctggttccctttccaattctgaagcatctgtttgtccagctgcttctcccatcttcaaatattgatttctttgcaagcagagtcactgtttatccgaaggaagcgattattcagaccgccaacgggttttattttccttttctggatctttctgtacaaatcgcacttggcatctggggaatcattctattgacactcattggctatggcttctggcgcttctggcagttctatcatgtatttcgtcattatccaacggaacggccagaatacctgcatctgctgtcttccctgaagtccgagatgcatatccccactcccgtccgtctgtatgactgcaacgcatcgatctcgccgtttacctgcggagctgtgcatcctgcaatcctgcttaccgctctggtcgatgacgattctgtcgagctgacgttacgtcatgaactgcagcatatccggacgcatgatttcttttaccgtgggcttgcagccgttctcattctgctgcactgctttaacccatttgcatatattctgtttcgagaactggcggaggtacaggaaatgaactgtgatgaacacgtactgcagaccctgtctgcaaatgaaaagaaaaaatacgggcatatgattattgacttcgctgtccgtacccagaagttacacacaaaagcaatctgcttttccagaaataacacccgttttctgaaaaaacgaatccggaaaattgcttccggcacacagaaacgcaagctgctgacaccggtgcttctgactgtcctttgcctgactgccggtattccggtagccgcctacagcccttatacgattgactggagaaatgaaacgaattttctggaagaagatgactttactgccgactggattgaatatagcgatgacctgactgcttctgatattccggatgatgaacagaccttttctatcacagatgcttacattcttacggacgaaggagagattattgttctcaaaacctccgctgcagtacgtgctgcatgcaagcaacatacctacaaatcgggaactctaaaaaaacatcgtccaaatggtaaaggttgtacagtggatacatataattctatacattg

SEQ ID NO: 1026 - DNA, 3112 bp, Unknown
  16S sequences of unknown bacteria
agatttacacttgtgaaaaaactaacaaagaaacttacacacttttcttgacaaataaaaagcagattagcgaacgactcgcacgatctgcctgctcatgtccacgattcttgcgtcaataatactggatctgttcgctgatgtgacggattacatccagcactggcctgatcagacatgcgcatgccgcaaggagcagcgcgcacaatgagacgccgacaatcccgcaagcgaaccctgcagtcgccatcccatttgatccatttttgcaagccttccttccgagcacaatagcaatgatgccgcatgccaaaccgattacgccaccacaaatgccgaggcatgcgcatacgacggagtcgatacccaacaccagcgaggcaacagccattccattatcatcttgccccctttgtttcccgttaccttgattcttttgattttcctcatcttgattcatctgtttcccctccttctcttttattttgccataaaaaaaagctttgcacaactgcactgaaaaaaaacttcatactatcgaatctttactgtggcaagcgccgcgctcacctcgccgccggatacgccgaatttcaacatgttcatcaccagcggacacatctttcgatgccgatcacgccgctgttcaggcagagatcgtagtttttcgcatctccgaactgctgtccggaatagaagcgataatactgttcccgtttcttgtctgtcttttggatatgatcgaccgcctgttcagcgtcatcctgcccggcctgggcaatgcggcggatgcggctgtccatatccgcatagatgaacgccttgatcacgttctcccgatcctccagcgcattgtcggcgcaccggcccacgatgacgcatggcccttcatcggccagctggcggatgagctgagactgatgcagaaagaccttgtcatccacagacagatcctgctggacaccatcggaaagatgacgcagcaagccgtcgctgccgctgagctcttcgtgttcaaagaactgcttgtcgatcgtgctggtctgtgccgcccgctcgatcagcgcgtagtcataaaacgggatgcccagctgttctgccacctttctgccgatctcccatccgccgctgccattctgccggctgatggtgattaccgacagaggagagcttacgcctgcctcaggggcttcctcgccttgattcagtttccctgcccattcaaagcctttcttggccatgatgaccgcgatgatctcattgatgacggctgcggcggcgatcgttccctgaatgatctgcacgcattccggcgcaggatcgcccagcacgccgaccgcgatgccggcaaagaccagcgacacgcctgaatgcggcagcaagatgaagccaagaaagttgcgcacggtcttgggtgaaccggtcactgccgcgccgaagaacgcgtcaaaatatttaccgaacgcccgtgagacgatatacactgccgtatataagccgacgccgaagatgagatgataatccagcggcgcaccgaggttcaggatgacgacgatcatcgccgcgccgaggatcaggttgaatccctccatgatctgttccaggcgtttctgcgagatcatgttggagaatgtcgctgagaacgccataccgatcagcatgaagttgagcagcgggcgggacaagagcgcattgcccaggaaacctgccccagaggcgatcaggatgctgatccccagcagacaaattgcctaccacgatggcgacggtgctgaagaagacgatgcatcccacgatgtcatccagcgccaccatagggatcagcgtcaaggtgaccggccctttggtcttgaactcccgcacgatggacagtgccgggccggcgcggtcgccagagcgatgccgccgaacaaaaaggccagatacagcgggatatccgtgatccagaagacaagcaggaaagccaggggaacgaccaaaaacatgcccaatgactgcgtcagcgtagtgatgatgatcgaacgcccggacttcttgatcttgttccagacaagctcggtcccgatcatcaggcccacggcacactccaggacatgcacgacgctttgataccatgcggctcctgactgagcaaagaaagggcatgcggccccaggatcatgccggcgatcagccagcccaggatggaaggcagcttcagcttcgacaccagcttgccgacgagcaatgccagcgcgagcgccgcaaacagccgcacgatcaacaagatgacgctcatttcttcgtcctcctctctccgatgccatacagcatcatattcagcagcttggacagccgttcctcatgatcgctgaccaggtcgcggaagtccttgtccgcataggccgggctgctgaaatacccgttgaacatctcctgcttgatctcgtagtattcgatcgcatccgcctctctgatgccctcacgcaaggtcatcttcgagagcgctgcccgatatatcccccggttaaagacgtcaaacgtcttccgcaatgtccggatctgcgcagacagcgcagccggcggctgcagcatcgcctcaaagaagatcctggcatacagcggatactgagagaaatactgaaaccgtatgcgcatatatttttccagatcgtcctggatatcctttcccttcagatattcggtcacatccagaaagcaatgcgagacacaggccaggtaaagatcgtctttcccggaaaaatgatagtaaagcaggcccttgggaatgccatgtgtgctgcagatggcattcagccgagaagccgcataaccatttgtgccgaattcctggatcaccgcctgcaggatccgctccttcgtcatttccgtcttcttttcccgttccatctgattcctccttcatcaaaaattgaccagacggtctattttcatccaacagcttatcgcgtttaaaccaaacggttaacttttgaccatgtccgcttcatcaaaaaaaaatccagaaatgcccctgcgcggtcatctctggaaatatgctcagcgtgccatgaacagaagacgaaaaaaaagcagatgatgacacctgctgtttcttcaatggtggtctcgg

SEQ ID NO: 1027 - DNA, 3339 bp, Unknown
  16S sequences of unknown bacteria
tggctcattgccactccctctttccattttccggcttagtccgcaaatgcggctgccgatgtaccggacgtattgtaagaatcatacgacgccgatgcatgtccggtaatcagttcactctcatcctgcagcttaaagtaataagaaatgacatctcttgcgacaagcgctgcatttccggaggaataaccgttcgtaatacgcacagcaagtgcaatctccgggtcatcatacggtgcatagccgatgaacagtccgtggttcggcttgtccttactctgctgtgccgtacccgtcttaccggctaccgccagaccattcgttccgttaaaggccggagcattggtcgcgctgaatgccgcatggttctgtaccacaccacgcattcctgcgtggattgtatcccagagctcctgcgggagctcaaaggtgttgtggacatttgcactgttgtcctcgagcacactgcccgccgagtctgtgatcgactttacaagtgtcagatcatagcaggtgccgctgttcgcaatcgtactcacatatcgcgccagacctgccgtcgtatacagatgtgtagactgtcccatggcggaacgtgccgcgtccttatctgacacatgtggtgtcgtctcagggacctccagaccggatttggcatccaatccatacatctccgcatacttctgcagcttttgaatgccctcctcatcggaataatcaccgttcattgtaccgagccggtaaccgattgtattaaagaaatagttacacgaatcccggatcgccgtctgcagcgtctccaccccgtgtccgtagatattccagcaattgatcggctgctcgtcgaacggcggtgtgtcgaatttaccggtacagttgatgccctcaccaaggttgatgacaccctccatatagccggcggtcgccgtcacgatcttaaatgtggagcccggtgcaatcgcttcctgtgtcgcgcggctgtagaacggggaggatttatccatgttcagctttgtaaagtaatccgaatccatctcattcgcaagccggttattatcgtaacccggataagtcacacaggccagagtctctccgttgttcggatccgtcagcacgagagatccggaacagggattcagagccagctgagacggtcggatctccaaattgtagatcttctggtaaataaaatcaaatccgctcagagaaccatccgaaagctgctgataagcggtcgtgtccatatccagcacgccctgatcgaacagaagcagacagatctccgcctcattgattcgttcttccttcaacagataccgatatacctgcttgcagaaattatcatcatcatacagatagttggaaatataatccgccagcgtcgtgaacatctcgtcggtatccatatattccgtatcgcttgtaatctttgtaatatcaagccagttctgctgaatcgcataagtcagaaattccttcaggctgatcgtctcatcctccgtccactccttgtagacgagatctgtcttgtcgattgcgtcagcatccaggataccggtatcagacatcagcatattgttgacaatataagactcatatgcctgatactcttcttccagatccttgtaagccgtcggtgtatcactgagcagctcatttttgatcgtcgcaaaaatttccgatgcctttacaagaaacgcattgtacacttcctgctcgttggctgtcgcatcatccgcctttaaatgtcccacgttcagcacattgttctcaaacagtgcatagtagacatcataaaccggaatccagatctggtcagccgactcgacgaggtctgcattgaactcttctgtatctgccagcttcgcgcagataattccggcgatatactgctccaggatctgataggctgctttctgcagatccatatcaatcgtcaggataacatcattgcctgcctgcggttctacacgggaagccacctccagtgtccgccccatgttgtcgacatagagtgtctccgaacccttatctccctgcaaagtcgtctccagtacgctctccagtccggttttcccgacgatatcagtcgcatcatagctgtcatcctcttttttgagttcctccagctcctctgcggaaactttgccggtataaccaatcagcggtgccagatactctgcatccgcatataccctgcggtattcctctgaaatatcaattcccggaaaatctgctgcgttttccatgatccgtgcaacggtctgctcactgacatccttcgcaatcgtcacggcctgatagcgctggaaactgttcgccgcgatcgctgctcgcagggttacgagctgcagcagctcatggtccgtataactctccggaagatcatattccttccgctcggcatcggtaatcttcggatcgaacagtccgtaatgatccttatcacacagcttagtcatcagatcttctgcgctgatctccagctgttcctttttcagatccgatatttgtgcctgaccaaacaaatctgccttaaaccggttcagagtgaagccggataccatatacttccaggagccgtcgtctgcctgtccgatctcaaaatcatctacgatcgaatcgccctgctcctcaatcattttaatgacatggtacagaatactgttcaaggccagattcttctcatgcgtcgtattataggtctcgctgtcctcaaaggtgacacagtaggaaagctcgttgtatgcgatcgcttttccgttccggtcgtaaatatttccgcgggagctttttaatgttcgctcctttttaatagaaagagaaaaattttcctgatagctttctccctgtataatctgcagataaaacagtcgttcaatcagaatcgccgccatcagtacaatgacgacaagcagcaccacaagcctcggtgggatcaccttcgatgcccgtttcctgatgtctttaaacaaagctgtctgcacctcctccgtcagtcatactcagcttctggttgatcctgtaaagaagccggtaaagcacaatggtcagtatcaatgtgtaaagcacctccggcaaaatcacacgcccgaggtagcggaaaaaatgaattctccctctcatcagaaacataaagccatactgcacaatcccgtatatcagatcggaaatggagatcagaaacagtggggtcttgatgtcatcgtcataaaaaatgcggtaaaaatatccgctgaaatacccaacccaaagatagatcagcgcattgaaaccaatgatgctgttgaaaaaaatatccgtcagcagtccgcagaagaatccggatatttttttcaa

SEQ ID NO: 1028 - DNA, 25727 bp, Unknown
  16S sequences of unknown bacteria
gacgtacagttttcagagggtacgtcagcggaatacggcgagatgacagatgatataaacaggataatcaaaacggttaaagctatgggaggagcagaatttgttaaaggataagcttgaaaaactgagagaagatttaatcgctaaaagaaatataactattgcgctgtcaggaggtgttgacagcgtatttcttgtctgttttgcaaaggaagttctgggggataaagtaacggcggtaacgggtacggccgcaaactttgctcccgatgaaacagaatacgcaagggagatttgcggaaaacttggagttaaacataaagtcatagagatttccgttatggacgtgctcaggaacaatcctaaggacaggtgctatcactgcaagaaaaaaatattttcagagctgataaagacgggtacgaatctggccgacggcaccaatcttgacgatatgtcggactacagaccgggactgaaagcccttgaggagctcggtatatggagccccctcagagatgcgggacttaccaaggccgaaatcagacaggcgctcaaagaaagaaacataagcatatgggataagcctgcatttgcgtgtctggcatcgagaattccctacggacaggagataacagaggcaaagcttgaagctgtatataaggtggagtgcgcacttaaacagatgggcttcacgcaggtaagagcaagacatcacggcgaggtggttagaatagagcttctgccgtcggaatgggatattgccaaattcaaagaaatagatgaggcgggcaaggctgcgggctttaaatttacagccttggacctcgagggatacaaaatggggaggatgaacggataaatggaaatactgcatattgtactgcctcttgtcttaggggcgctcataggatatgtgacaaactatatagcggtcagaatgcttttcagaccgtacagggctgttaaaatagggagccggactctgcctttcacaccgggagtgataccgaaaaacaagcagagaatagcgaaagcctgcggagctgtggttgaaagcagcctgttctcacaggacgatattaaaaaagcaataaccggcagcatcaaaaaacccgatatagacagcattaaagtggctgatattgtaagcgaggacctgtcggagcagtttgcggaaacccttgcggacaagctgacgggcgagattaaaaagatagacatcaaaggcatcatagctgaaaaaggtacagcgatactggaggaaaaggtcaaagataccatgcttgccatgtttgtaaacagggatatgatagcttcgtttgcagagccaattgaacagaaagtgatgcagtaccttgacggagagggatatgtatatcttaatctgaaaatcaaaggcgaaattgaaaccgtaagaagccgtactctgggacaggaagccgcagcgcttaatcttgacataggcggctttacagacaggatattcgatgagtttatcgatgagaaactgggaacgcttacctcgaaaatagatatagccgctgtggttgaggacaagataaaccgtatggacgtcagagagtttgaaaagctggtgctttcggtaatgaaaaaagaattgcaggcggttgtcaatctgggcgcgctgataggatttgtaataggtcttatcaacctgctggtgctgtaacatatgtaaattgcaggagtaaaatctacagtatggagtgttgttggagaaagaatactctatactgtggtattacagatatgaaaaagaattattgatgcaaaacaaagacctgttttccggaaagctatggttcgaacatcaggtgttgaatttacttttacaattcagttttacaaaaaacatttgctatatattaaatttatccttgaaatatgagaaatttatagtataataatagagtatctggtcctatggtcaagaggttaagacaccgccctctcacggcggtaacccgggttcgattcccggtaggactaccatctgcggatatggcggaattggcagacgcgcacggttcaggtccgtgtgagtaacatcatggggggtcgaatccctttatccgcaccaaatcaaaaagacatccataaggatgccttttttagtatacatgaaaaatgatatattttcctatctaaaggaaatttttctgagaaaccgtagaatgacttccggctgtatcgggaaatatctgctctgtcagagagcatctgcacaaaacagtaattatcacaggaggctatatgaaaaaaaggattttgagatttgcatcaattgcacttgccgcggtgcttatagtgcttactgtgccgacagacagcgcttttgcggcgctttccgaggtgaaagctccggcgcaggtaacgacatttaaatccacaacggattttgaaaaagaatatgtaagagcctatgttacagacgatacggttctgaaaatcaactacaagacacctcttgaagcaacattgttcagagtttctctttatcgggtaggagcagacaaaggcgacatcaacctggatatttttgttgatgcaaagcagagcgcagcatcggacggcactacgctgtacggctttacctattatctggatgtggagcaatttgatgttccggacggatactacaatctctatctcagacgctgcacaaccgcagccgatgccgaaaccctgaactacaagtccagcggcgttctgtataaaaatatggaaatcaaggtgacggacggcaaggtaaaaatcctgcgttacaaggatgttatcgaatacaacaactctataaaggatatcggcgcgctctacagcactgaccgttatctggacaacacgctggaggatatccgcttcgtgctgagaaatcctgcaaccgatgtctatgcgaagatgacaccgagcaaaatcgcctacattcagaggatttccgaccgcgttacgcagggcgcttatacgaactacgacaaactcctcaaaatatatgagtataccgcaaagaatttttactacgactctgtggcattttccacgcactcgtatcagtatgcggacccttatgataatatttacaattacgaaaacggtctgagcagtgcaaacagcgttttcgggcgtgttcacactacatgtcagggcttttctgcgatttaccttgcgcttgcccgcgcacagggtattccgaccagatttgtttacggtcacagacttgccattccgtctaacgactggctcacagaagataatattgatgtgcgcgaccactggtggacggaatcctatgtaaacggcaaatggatttttgtcgatccgactgttggaacaaccaataaatacaacaaaaacacaggcgcatggacttacacaggactgacaaactatacatacttcgatgcgtcgaacgagcaggttgcgaccagccatgtatatatgaatatctacccggactacagagccggaaaatatattgacgatacatacgaaatggagaagctccgtactttctttaaccagcgcgtcggcgattccaatcagacaaacggctcggtaatgaacagttcctattcggattatgatacagccacatggggagacggaaccaagtcacactttatgacaaacggacgaggaaaaacagcgcagattcagtggagctataaaggcttcaccggtccgctcaatctttcgggatttacaaagatgactttattatcttctcacgataataaatacgagacggctgacctgtccggttcgcctgtattaaagagcgtttatctttacaacaacagtctgacaagcattgatttaagcagttgctataagctgagctatgttcgcgcgcaaaacaacccgatgaaaaatcttaagctttatgtcaacggtcgcaaccgaagcttcatcgcaggcgataacggaactttctgttttacgctggatacaagctacaaaaacagcagtctgtcgctgtattccgacccggacataggctataaactgggtggtgtttacagtacaggcacaggggacaggctctcgactaagacgacttatcattttacaccgaaagcagtcggctacagcatccgcttcgtgctgaatccggacagctacaaatattatctgaacgtcggtgaatcgaggtcgtccagacttccgtatatccgcgcagcagcaaaacgcttaaatgcgctggggtactacaatcagacggcagtcggtgaagaagcttcatatacggaagcgcttgcggaagctgtaacgaaatttcaggtaatgcatgacctttccaataacggtgccatcggcaaagaaacatggtccaacctgtttaataactcggcgaatactatggtttccgatgaggaatacgaacagattcttgcggattacgaagtaagacaggcgcagcgtaaggaagcagaagcacttgttaaaaacctgactccggttgcagcttcagctaaagatgcaaaaaagaacgttaaagttacgctggaacttgatgagcaggataatgagattataaatcagctaaaaggtatgggctgtactgtaaagtaccgattttatcgttcagagggcaaccggtcatcatacgaagcggtggtgacaaaagaaaccccgtattatactaatacaagcggtaaaaacggcaagaaatacttctacagggctcaggttattgtttacgacaaaacaggtaaactcattgcaaataccgaaccggagcagtgcagatatacctcagtagtgtggagtaaaaaataaggagcggacagaaaagaaaaaccgtcgaagcagagcattctgtggacggtgctgccctgcttgctgtgttgctgaatgcatagattaaggacattaaaatatttacagggagataagccgtttggactggattgatttcagaacaggcggctttttatgagtaaaccgccggataaagatggaaaaacacatttaaagaggcggtttggctacaaaaaaggctgttgaccgccgcttaaaaggttttatgatgtatataataataagaaaaggtattacggatatgataggaagaataaaagaaaccggagaattaaatcgtttatataacagcggcaaagcagaacttgttgccatttatggcggacgtcgcataggcaagacatatttagttgatgaatcctttaaagggcgtattacattcagacacgcaggtttgtcaccggtagaagaaaacaaaagcggtatgctcaaggcgcagctggagcacttttattattcactgcttctgcatgggatgaaaaaaagcaaaaaaccggaaagctggctggaggcattctatatgctggaaacattcttagaagaaattgataacggtgaaagacaggttgtatttttagatgagctgccgtggcttgatactccaaggtccggctttatgacagctttcgaaggcttctggaatacgtggggctgccacagggacaatttaatggttgttgtttgtggaagtgcaaactcatggattttagataaactgataaacagtcacaggggattatataacagagttacttatgaaatgaagctggcacctttcactcttggagaatgtgaagcgttttatgagagcaaagaggtgaagctgtcccgatatgatatcgtgcaaagctatatgatccttggcggagtcccgtattatatgggctacttccagaaaggaatgagtctggcgcagaatatagataatatactgtttaacaaacgcggcaaattaagagatgaatatgatcgcctgtttgcatcgattttcagcaaccctgagtcgatgaaaaaaattgttgagcttctgtataccaaaaacgccggatttacaagaagtgaaattgcagaaaaactgaatgcaaacgacgggggaagactgtcaaagagtcttaatgctctgattgccagtgactttgttgttaaatatattccgtttggaaaaggcaaacgtgagcattacaaactgattgatccgttttgtctgttttatttacactttgttaacaaaaaacgcaacctgagtgagaacttctggagtcagaatgtaacctcgcagcagattgccgtatggagaggctttgcttatgaaaacgtctgctttaatcatgtgcctcagattaagaaagcattaggcataagcggagtgattaccagccattcggcatggtcaaagcggggagatgatacggacggacttcaaatagatttgcttatttcacgaaatgataatgtagtaaatatgtgtgagataaaatattacagtgataaattcactgtagaaaaggaatattatcaggtattgcttcaccgtcagggaattttatcaaaagaagtttctccaaaagtttctgttcacagcacgctgataacgacattcggacttgcctataacgaatacagcgggatattttctaatgtaataacaatggacgatttgtttcaggattgataaaaaccgccgggcagattatctctgttttggctgttttctgtcattctgtcttttcggcaacgtatgaaataacctgcaccttttctttgcctatctgccttgtgaaatcttttttccttccgcgaggcgagccgagggcgtttttttctatgaattttattcctgccattgcaagattgctgtatatccttttgaggttaatcattttagggtcaaagtctttatggtctttcctgaattcctcaagactgttgggagcagttgtatagtctatatggatgcctgttatatttccccgtggtttaagcaggcggctgacggcgccatatacaccctcattgtatgtaaaaatatgattgatgtttgaaaaatcgtctatgtataaatccagaaaagaagctttcagaggcagcctgtttatgtcacctgcaataaacatgatttttctgtcggtgtcgctgaaatattctttgagcttgctgattttttgaacagatatatcaacaagtatatacagagcctcctccggcagacctctgatgtgcttgagcaggaagttatatgaaaaaggtccgtccattatatatctgaactcttttttttggaggtggatctgctgatatacccaaagctgagccttgtccatcaggtttctgtagccgggagaaaaattgtctgttgctgacagaattgaatttatattttcaaacagcttaaacggtgtgtcattcagatgttcatcgcataaaagcacgccgtctgaaacagcagccgtatatccgcattcacagtttaatgccgcggatctgatgccgcctttggagataacagcgtctattacagaaatctctccgaaacattcggggcagcacagaatattcaaagcatctaaaggcatagcagtattgtccggcttttcatgtaccggccatatgtcgttatatctttttatctcttctgccagctgctctttggccgtttcaaggtcttttgcttcagtatccagctgaatcatttttgcttcaagattcgctaaaatagtattcacaactgccctgtcttttacagcgccggaatgttcatagtttaacataatctctatttcttcaagagtgaacttgagatttttgtacttgatgattttttccatctgatccatacaggtgtggtcaaatatatactgaccgttttcaagtttcggagtaagcagcgccttgtctatataaaatctgacagcgcttggctttaatccgtatttttttgcaaaagctcccgttttcatataatcaccccctcccgtattttattacattatacacttaaacgtataacaaactcaatatataaagcaggtttatcttttcggataaaacggcgaatatgtaaagtagctttgggttatataaactttaactgttgaagtcaatcagactttaggttgtaaaatgattatgcaatttattgattcaagtttaaaaaggaggaatttgtagatgagtactatcacacaaatcgaaaaaaacggtctgtttgaattatctcaggaagcaagagaagaactttcaacctcgaaatatttcaatgacgacctcgctccatcatcggttgccgagagaacatggactacatacaccataacaatgttatgggttggaatgtcaatatgtattccgtctctggcgttggcttcagggcttataacgatgggcgtatccccttggctgtcggtatttaatgtagcgctgggaaaccttatcgttttaatacctattcagcttaactcaactatcggtaccaaatacggcataccgtttccgctgttcgcaaggctgaccttcggaatgaagggagcgcaccttcctgcgctgctgagggcatttacggctatgggctggtgttctgtacagtcgtgggtaggcggtggcgcttttgcagcgattatcggttgctttgcgcctaaattcttagatgcgaactggactatcggacttccgtcatggggcggaatacagactgcttccgcaggaactttcgttggatttattctgtttatggctcttactgcatgggttgcatacaacggtcttgaaaacattaaatgggttcagaacattggaggtcctatacttattgcagtaatgatcggccttcttctgtggtcttattcttatgcgcacggtgcatccggcataggtttctgggaagtaatgaagcagccaaacgatatgactcttattaatgagaaaggtggctgggcatttgtatacctgacaggtctgatgggcaatatagctttctgggctacgattgcgcttaatattcctgacttctcaagatatgcaaagagcaacggttcacagttctggggacagatgattggtatgcctgttccgatggcgttctgtgcgtttgtaggcgcatatttcgcacaggcaaccaaacttgttgacggcactgcatcctttgacccgactacagtattctactatcttgacaacaaggtggttatattcatatcggcgatcggcgtagttatggcaacaatcacaacctgctgtgccgctaacgttgtagctccggcaaacggactttcaaatgtataccctaggaagataagctacagaggcggcgttattatcacctgcctgatggcattcttcattctgcaggcatggtggatatacggttcgggttcggcatacttcacatggatgaatgcgtacggtaccatactgtcaccggtagctgctatccttgtggctgactactggatagttaagaagcagagaatcgatattaaggctctgtttgtcggcgacggcagatacgcttacagcaacggtatcaactgggctgcggtaatttcgtggttcgtagcgttcatacttccgctgatgctgtactttggagttgacaatgcattcttcacagctatcaactcaatcaactacatatggtcattcgtagtaggcttcgtagtttatatgcttctgatgaagaccggtcttgcaggcagatcgcatgtaactgaagaagaatatgcggcaatgactaaaatcgaataaaatgtaaagtatagtttgtatttttaaaaaatatgttgttgcagtcaatatagcttaatggcatatactaaaagtataaattataacaacttgtttaaagcttgtgaataagtagactgaaaaatatacaaagacttaaacagcaaagatactctccaaggcccggagagtatttttgtttgcagcggtatgcttaatatgtgtaattaaaacagaattcaccctctgttgtttctttgagcttttctatcttcacataataggttcctttgtcgagttctttctctactgacgatgacatagtgtactcttctttattcgatgcatcgggtgagctttcaagcaaagccttgtctcctgcatcataagcagtcatctttgacggcatggagctgcagcaccagaagtcaaacagcacctgctttttctccggtaaggtgaatttgtaccatgtcaggttttctgacttcgtgaatatattgcccagcccgccgttgttttctacatttagggccttggacttttcggtatgcagggcaggctcatatttcttctggtattccgtataggtgccgtttttcatcattgatatgcgtatccggtatgtgccggggtcaagtattttactcagtgatgcgcatgtatcgtctacaggcgatttggcgagcttgtgccatttgccgtcttttttttcttcaagtacaaacttatttatcagaagtgcgccaggctctgtataaatgcttacagtgccacggcgctccatatcaacgggaacaatcaggttttcatagggcagaccggttttgacatagccggcataggagttttcaaggtctataagttttgccctgccaaaacacaggaatactgtgactgccgcgcatatgataagaattgcgattactgcttttttctttgcggatatatttctcattgcgtatttcctcctcaggattaagtatagatacggcgtaagcgaaatgcaagcctgatatttggcattaatatatttaccacttgcagccgtattcctaccacttgcggataagctgtttacaggtagtttgtgagtggtataatggggctatcagataacaggaggagatgcggtgaagatacgaatagaaacagatacagatatcgaagaagaaatcgtaataaaatgcagacagcttactcctgaaataataaggcttcagcagatgcttacagaggctgcaggaagcagcaggcagctggcgcttttcagaggcgatacggagtattacatagaaacggcagatatacttttctttgaaacagagggcacctccgttatggcgcataccgctgcggatgtatatgaaacaaggctccggctgtatgagcttgaggagctgcttccagcatcgtttatgagaatatccaaatcgtctattgtgaatacggacagaatatattcgattaacagaaatctgacggcatcaagcgcggtggagtttcagggcacgcacaagcaggtatatgtatcaagaggttattacaaggcattaaaagaaaaacttgaggaaatgaggtagatatttatgaagagaagaggaagatggttttacggactgattttaatagcgatagcgctgctgctcatactgagccagcttggccttataactgcgactataggcatatggagcatacttatgggagttctggctgctgcaatgcttgttcacggaattgcagagcgcagcttctttgaaatattctgcgcgctgggtattgctcttgtcacctttgacgaggtgctgtcgcttcccaatatatcggtatggatagtgatacttgtggtaatactgctttcggcaggctttgaatgtatttttcccaaaagaaaaagaacaaaccaccacagaaacaatgatgagaaatggcagccctatgaggacgaaaatcagacaggagaataccagcaggtaagagaagaaaacagagacggacacatatactgctgcaaccgcttcggagctgcggccaagtacataagcagcgatgatctcaaaggcgcggaactagagaactcattcggggaacttaaggtatattttgataatgcaaagataacagagacatcaatagatatacgggttaataacaggttcggcagcatggtgctgtatatgccgtcggcatggaatgttatttcggatataagtgtgtttcttgcatcatctgaacacgagagcagatttacagccacagacggacctaaggtaaatgtaggcggcagcgtaacctgcggtgaagtcaagataatatatgtttaattaaaccttgcgaaggacagacaggacataaaattatgctctgcctgtctttttttgaaatttttttgcgcccgcaaacgttgaaaaacaggcgttttgcgaaaattattagcactctttggcggtgagtgctaaaaaagtgtttactttttgcttcaataggtatattatataaatatagagattggctaaaacagatatattgattatgggggtaaatatatgaacatagaaaaattcacacagaatgcgcagcaggccataatggactgccagaatatcgcaatatcagagggtcatcagatgcttgacggagagcatctgcatctggctcttttgcagcagacagacggacttattccgaagttgcttaaatttatggaggtagacccgcatcttatcattgcggaccttgaggaggagatggagaagctgcctaaggtttcaggcggcggagacaacatatattcctcccgcagactttccacgatacttatgaatgcggagaaaaacgcagagagtttcaaggacgagtatgtaagcgttgagcatatataccttgctctgcttgacgagaagggcactccgtctgcaaagatatttgccaaatatcacatagacagaaacaaattcctcgaagcgctgtcaaaggtcagaggcaatcagagagtaaccagccagaaccctgaggacaattacgatgcccttaacaaatacggcagagatctggttgaaatggcaagagagggcaagctggaccctgtaatcggcagggacagtgaaatccgtcacgccatacagatactttcaagaagaaccaaaaacaaccctgtactcataggtgagccgggtgtcggcaagaccgcagtagtagagggactggcgcagagaatattaaacggcgacgtgcctgagggccttaaggataagactatatacgctcttgatatgggctcccttatagccggagccaagttcagaggcgagtttgaagaaagactcaaggccgtacttaacgaaatcgaaaaatcagagggcagaattattctgttcatagatgagatacacaatatcgttggagcaggcaggacagaaggctcaatggacgcaggcaacctgctcaagcctaaacttgcaagaggcgagctgcactgcataggtgcaactactcttgatgagtatcgtaaatacatcgaaaaggacgcggctcttgaaagaagatttcagaaagtgctggttgaccagcctacagttgaggataccatctcgatactcagaggcctcaaggaacgttttgaaatccatcacggcgtcagaattacagacaatgcgctgattgcgtgcgctacgctttcggacagatatatttcagacagatttctgccggacaaggccatagaccttatggacgaggcggcatcaaaaatcagaacggaaatagactcaatgccggcggagcttgacgagatatcaagaaaaataatgcagcttgaaatagagaagcaggctcttggcaaagaggatgacaagggatctaaagcaagacttgaagccatcgaaaaggagctttccgctctcaaggaagaagagctttccatgagaacccagtgggaaaacgaaaagaaagcaattacagaggttaagagcaccaaacagcagattgaagaggttaagcatcagattgaagatgccgaaagagcatatgaccttgaaaagctggcgcagcttaaatacggcgcgcttcctaacctcgaaaagaagcttgaggaagaaaaagaccttgcaggcagaggagatgaaaacagactgctcaaagaggaggttacagaggaggaaatcgcagaggttgtatccgcatggacaggcataccggtatcaaagctggttgaatccgaaagagaaaagctgcttaaactccctgagatactgcacaggagagtaatcggtcaggacgagggtattcaggccgtttcagaggctatattaagagcaagagcaggcctcaaggacgaaaacagacctatcggttcattcatattcctcggacctacaggcgtaggtaagacagagcttgcaaaggcgctgtcggaagccctgtttgactccgaaaacaacatgataagaatagatatgtccgagtacatggaaaaacactcggtatcaagacttgtcggagcgcctccgggatatgtgggatatgacgagggcggtcagcttacagaggctgtaagaagaaaaccgtacagcgttgtactgtttgatgaaatcgaaaaggctcaccctgatgtgttcaacatactgctgcagctccttgatgacggcagacttacagacaatcagggcaggacggtagacttcaagaatacaatagttataatgacatcgaatataggcagtatgagtctgattgagaatatcagagctgacggcactattgacgagacagttaaagagcaggtcaaaaacgaaatgaagaactacttcagacctgaattccttaacagaattgatgatatagttgtattcagtcctcttacagaggcgcaggtgggacagattatatcgctttcactcaagagccttgaaaaacgtcttgcagacagagatataagtcttgtactttccgatgagggcagagactttattgccaaagaggcttatgaccctaactacggcgctagacctgtaaacagatatattcagaaatatattgaaaccgagctggcagccaagataatcaggggcgatatcgtcgacggcaatacagtaaccattactgcaaatgcggatggtctcgactttgaagtgaaataaagggtatatataaatacgggacaggcaatacagcctctcccgtgttttttaatgtcgctttagcagaggctccgagcacagagtgcaaggaacaataatccatcggatatgccggtgctgctttagctataagtaaaaaacctcctgtattacaatgaatgtggttccccaaccgcattatgtaacaaggaggtagtctatgaaagacactgatagtttagcacatacagcttggaattgtaaatgtcctatttttcaagggtgtcacttatggccttgagaagtgatgttttacctgtcatatcctgccccagagcccataccataacaccgccgtaatctgcgcccagcagggcttttttgcttacggtattgataccgttatatctgcatgtcccgcttatatcatcatactcggagtctgcgttgtaggttgcgacctccttgtaggttacgaccttgccggtgcaggtgccgtttgcatcatatctgtagccgtaaaacggaattcccagcaccagcttgtctttgtctacatttctctcattttcaaaatatgaaagacagctctgcgcatattcataggttgaatggttctcactgcttcccctgttgtcatatgccataacagaaatgaagtcaaatctgtccagggttttctcctctatgtagccgtcaaaccacgaagcgacggcgcaggagagaatgaggctgttcttgcggcatttctttgataaatcctttacccatatatcgtagcttttccagaattcagactccacatctccctctatattaaggtcgatgccgtcaaatccgtatttctgtatatactctatgattttgtcatcaaaggctttgattgaggctctgtctgatgtcaggtccgtatagtgcctgtagcctccgcctccgccgagggctgcgataactttgaccttgtgatgatgagcctttctgattatttttttaagctctttgtcgggaatactgcatttcatattaccgtctgagtcgggatttacaaatgcaatgttgatatgcgtaaggtctgcaaaatccacatcgtgatagcactgatagtaccagctcggcagatagccgacaattctggtatcgctgtgtgatgacgagcagcttttcataaatatgagtacaagcagcagcgccagcgtcagcagcagtgaaaatatatatttcttcctgttttttgtttttcgttttctttttttcgacataattcaccccttttccccattgcttgaagtatatactttttggggcgattagtcaattatcagtatttcgtgaatttcagcaggaatatatcatagggagccagctctattgatgtgtagtactgctccatcataggaataagctcaaattctatgtcgggctttgacatatagtttatattctctatatcctcatcttcaaggctgctgctgaaattaagctgcgcccagaaattgaggcaggaattggccgcaatcatcttgtgctttgtaaccttgtactcggaggaaaggttccttgcgattatgtccaccgtcagattttcgttcttttcgggattgaaaatcagcagatatttagtgtccgtatcctgtaatccaagatagtttgggccgtgaagcacgatgtctgcgggaagcctttcaagcatttccagcaggtaatacaaaggctttcggagaccgttgggcgtcagaagtccggcaacagagtcgggtctgtcggtaaggtttatctgaggataggcgaagcttcccggagcttctgttatacagcgcagcaggcttacagccgactcctgcggcagtatgtcgcgatatattctcgacatatcgtagctgacagagccggtggcgaagcctgaatatatatcatcgaatattgcggagttttttgcaggcggtctgaacctgccctccggctgcgagctgaaatccatttcaatatgatttaccttttcgatatcatttttgaatacgggatactgagtgaaattcccaataatcggcttgagcttttcaagagaatattccgttacttcaggctcgactgctcccagaaccttatcgcgatatcttctgcggtattccttggggtgacagcccatatggttatagaaatggctgacatagtatttggcgtccgaaaatcccatatcctgcgaaatctgcgcaatgctcttgtctgttgacagcacggaaacctccgacatctctatacgcaccatacttaaaaaatccctgaaattcactcccaccagcttgcgaaacacatgggagagataatacgagctcatatgctctttttcagctatatccgaaaggcttatcttgtacgggtagttttcgtaaacaaactgaatgatgcggcttattctgtcaacctgcatatagtcgtgagaggttctgtgaacaaaagccttttcggaggagtctattacaaagcctctgaaattgttcataagggtgttgataagagaaaccgcagcgttgtttatgcgcgccacataaccgggagaacggtcgtaatcctctgcggctatggcaaatatctgatcccgcagtatatcacgcttggcaaaagagccctcttcgatatttgtaatgaacacagtagttacaaagtgaggaaatacgctcttgaaatagtccctgtcaaagcttaaaaccagcacaagattgctctcggtaatgcttttgattgaatgtacgtcctcggaatgtattatatgaatactgccaggctgaagtctgtaggtggcgtaaaacagcgtcagcgacagttcgccctccagcacataaaaaatctgaaagtcaggatggctgtgtatgggatagctttttatgtccataagctcaaccttgacggacaggttttcataataggtaatgtcttttatcatcaatatctcctttaaaacggtcaaaaaactgattaagttgctataaacaattatattatatagcaaaaatgccgtaaaagtcaaagaacaatcataaataaatcatatattaagcaacaatattctgtaaattcaaaaatgtaatgtgtatactgtagcaacaaaacaacctctaaaaaaataaagtgaaaggacaaaaggattatgaacgaaaaaagaaaactgtcaaatggaacaatatttggctacgggttcggcgcattttccgatgcggcggcaaacaactttttcctcctgtacatgctctatttctttacaacagtagtaggaatgagcgcaggcaaatcaggagcgattatttcaataacaacagtggtggctgcggttgtcgcaatatttataggaccggcaagcgacagaaccagagcaaaaaaaggtacaagacgtatataccttgtaatcggagcgcttatgcttcttgtaggcttatcactcgtattcagaccgatgctgggacttggggacacaggaaagttctgctattatatcgtattttttatgcttacatatctgggatatgtagtgttcctggttccttacaacgcaatgggcgctgaacttacagacgactatgacgagagaacaaagctcagaaccccggcaacaataatgaactatgtcggaaacattatcggtatttcacttcctatggcaggcgttgcattctttatgaagcacgttgaaacagagggagctgcatggaacatctacgcgattatcgtggcagcggcatgttttgtggctgtaatgatatcgtggataacaacaaagggcaaggaactcaaggttgaaacagaggtggcagcagagaatgccaatatctttaaagaattctggcgcataatcaagctgaagccgttcagatggattatagggattgttgcaagcttcggcataggatacactgttttctcatcaggtcttacatactatgtgctgtactatgcgggacttacagaagttcagatgtcaacggcaacactgctgtggattttcataggaatgggactgactgtaattatgtcattccttgcaaccaagacaagcaaaaaaacagctatagcgataggcttcctgctttcggctgcatgcgttgcaatcttctgggtatgcggagtgcacagcttcggaatgctggtactgatgcttacagtattcggattcggtaactcatcattctggctgcttatctatccgatagtatatgatatcgtagagctttacgaatacaaatacggcgaaagaaaagagggtgcgatgctgtcactttacggctgcatattcacactttcaacagcactgggtacacaggttctgactattgcaatgacaatagcaggatatgactcatcacttgccgttcagtccgctgacacaataaacggtatcgcagcaatcgtgcttggcatacctgtaatcgcgtttgttatatgcggcatcttatgtgttacttatccgctgacaaagggcgcttttgaaaagcttatggtacagcttgagcacaagagaaaaggtgagcctacagatgaaacaggcatagaaagaatagtatagattgggtaaaggctaaggagaataacaatgaaaacaaatttaaaggcagatataattttagagggcgcaagtttttattgtggcagaggacttgacaacgatgtggattttgttgcggttaagggcagcagaatactggctcttggcaaaaaagaggaaatgcaggagtatatcggcgatgacacaagggtcatatcatatactaaggacaacttcataaccgcagggcttcacgacaatcacgttcatcttattcaggcgggtatactggaaaagtatgaaaagctgtatacaaatccgtcaaaagaagatgtggcagaggcgatggcaagatttgcaaagactattcccgatgaaaaatgggttatgggcgtaggcttcagaagaatgtcgtgggaggacacatctatgccggactgcggcactctcgatgcgactatccctgacagacctgtatttcttctcgatgaggagcttcatatggcgtggctcaacagcaaagggcttgaagaatgtcatatagacagcagcacccctgaccctgagggaggcattatatgcagagatgaaaacggcagacctacaggagtgcttcttgaaaacgcagtggcgcttgccgcaaaatatgcgcttgatttcgatatgccaacggcaaaggagcttatttcagactatatagacaaggctgtaagccttggaataacatcggtaagcgatatgactccatacctgtcgctggatcttgcatatcctgacgtatactttgatatgattaaaaacggcgagttgaaaatccgcgtgaatgcagcaagaaatctatttgaggatatcgatacattcaatgcaatcagaagcagggcggaggcagagggagagggtatgtaccgcataccgtttatgaagcagttcatagacggaactcccgcaaacttcacgggtatgcttcttgaggactacagtgataatccgggagaaagaggcaaggctactattgaccttgacaagatggcttcggcaatagaaactgcaacggaaaacaatgtttcggtaaggcttcattcctgcggcgacaggtcgtgcagagaggctctcaatgcctatgaaaacgcattgaagaaattccctgaaacagaaagcagacatatggttgaacatcttgaggtggttgatcctgctgatattccaaggttcggacagctgggcgttatatgttcgatacagcctgagcatctggcggcgggaactatgaagtggactgagaactgctaccctgaaaagcttggtcctgtccgtgaaaaattcacatggccgttcaaaaagctcagagacggcggcgcggttcttgcaggcggtacagactgccctgttgtagacggcaacctgttctggggaatgtatgtaggaaatacgagaacatattatgacggtatgcctgagggcggatggaatccgcaggaggatcttcctatggaggatatgatagatatgtttacaagcggagcagcctatgcagagcacagagaaaacgaacttggaactcttgaggcaggaaggcttgcggatatcactgtttcggacagaaatctgctgaagctggcgggagacaccgcgataagagatacacaggtactgctgactatggttgacggcagaattgtatatgaaaaataatgacctcactgagtataaaatattaagaagaagcaggagccttgtacatattctgtaccgggctcctgcttcgtttgaaaagtttctgtcagcctctgccgagaatatcgtctaaatcctgcttaggatctgtaatcgggcgtatatcaaaggtttcctcaagaattttaagcacattttcagagaaaaatgcgggcattgtaggtcccagatatatcccctttattccaagagaaagcagtgttatcagtatgcacacggctttctgctcgtaccatgagagtatcagagtcaggggaagctcgtttacagagcagccgaatgcgtccgcaagagcaagggcaacctgtattgcgctgtatgagtcgttgcattggcctacatcaagaattctcggaataccgtctatttctccaaggtcaatatcgttaaatctgtatttgccgcaggcaagggttaagatgatggagtccataggcgcgttcttgacaaactcggtgtagtagtttcttcccggatgagcgccgtcgcagccgcccacaaggaatatatgctttatcttgccctctttgattagagagatgattttgcctgcgttttcaaggattgcattgtgggcaaagcctgtggtgagcatatgaccaccgtttattccgctcatactgtggtcgttttcatagcctccaagctccagagccttttctatgacaggtgtgaagtccttgtgattgtttgcatccccgcttatatgcacaagaccctcgtagcctacgacagaggtggtatacactctgtccctgtagctttcgcggggcggcatcaggcagttggttgtaaacaggacaggcgcaggaatattttcaaattccttttgctggctctgccatgaggtgccgaagttgcctgcaaggtgggaatatttcttgagccccggatagccgtgggcgggaagcatttcgcagtgggtatagacatttatacccttatcctttgtctgctccagaagctgatgcatatcctcaaggtcatgacccgaaacaacgataaaaggtccttttttaatgtcggtgtttacactggttggcacaggctgaccgaaagcgccggtgtttgccctgtcgagaagctccatacatttgagatttaccttgccgaattcgagtataagggagagccattcctctgcggtatgttcgcaggaaacctctttgagtcccttgtagaaccagtctgaaacctccttgtcatagtggcccagagcgtaggcgtggtgcgcataggcggacattcccttaattccgaatagaagtgtggagcgcagggaaacgatatccgtatcaccgtcccaaaggttaatttcagcctcgctgctgccgcctttttctctgattaaatcagtgacacgatcagtaaatccggttatggctctgtcatcaaagtttacattggtgagagtggtaaaaagtccgtcaacgataagcctgtcagccttgccgggactgtcgctgccgtctgatgagcctgtaagctttgcaagagtgataagctgtgatatcagcctgtcctgcaggtttgacgtttcaggctgcttgccgcacacgccggttctgatgcagccgctgtttccggcggtctgctgacattggaaacaaaacatatttgacataataatcctccgtagtttattttaagatttattatgccgtatctccgtatattctattcgtacgaaaagtgtgcaaatacaaaaaacaactgtaaaatacagtctgatatgcttgagttttcaatgtgtttcttgacattatgccaccggttgatttatactgttattaagtatagactggaggcgtctgatgttttctataggtgataaggtagtataccctatgcagggagccggaataattgaaaaaatcgaaagtcagcacattttaggtgaagacagggattattttgtcctcaaatcaccttacagcgatatgaagatcatgatacctgtcaaaacctgtatgcaaacgggtgtcagagctattatcagcgccgaagaggttgacgcggttgtagaggttctaaaaggcccgtctaccaagatgaacagcaactggaaccgcagatacagagaaaatatggacagactcaaaaccggagacgcagaagaggtagccggggtggtcagaaatctggtccgtatcgagagagtcaaaagtctctcggcaggtgaaaagaaactgcttacaaatgcgctcaggatacttgcaagtgaatttgtaatggtgcttggaattgagcctgcggcggcagaaaaactcatcgatgatgcaatctaattttcacgtcttcagatgacggatctgccggggcagcccgcggggctgccgcaaatatataagaaaggaggaaatttatgttcaaaggattattcagaactttgtttactgtgctcggactggttataggcttcggtcttacagagcttattgtttatctgcttagaagcggcgttcttggaactgacacgattgccttgtcaacatttcagaaagttgcggcagacgttgttttcgcaattatatttggattaatatttttcaagctcactccgttcataacaaaacaaagtgaaaaggcttcaaaaaacatagagtcaaatcttgcaagcatacccacaaacaatctgatagccgcaactatcggtcttatactgggactcataatagcgtacttcataactcagatttacgaaagcagcctgcatatgccggttgtggttatagtgcttaacctcataacctacatagctttgggttcggtgggaatgatgataggctccaagcgtagcaaggatctgttttcatcaattcttgcagcaagaaagaccacatcgtcaaagagcaaatccaaagacagcagacctgcgcctaaaattcttgacaccagcgttataattgacggcagaattgccgacattatgaaaaccggcttcatcgagggcgatattgtaattcctgagtttgtacttgtagagctaagacatatagcagactcctctgacagcctcaagagaaacagaggcaggagaggtcttgacattctcaacaaaatccagagtgaatacggcatagagatatacaatacaactgcagagaagtcgcttgatgagataccagaggttgatgtcaagctgttaaagctggcgcagataatgggcggcaaggttgttaccaatgactttaatctcaacaaggttgcaactatcaagggcgttgaggtacttaatatcaatgcgcttgcaaacactctcaagcctgtggtgctgccgggtgaggatatggaagtattccttatcaaagagggcaaggagcacggtcaggcggttgcatatcttgatgacggcactatgatagtagttgaggaaggctacagacatataggcaagagcacaacagtagttgtaacaagtgtactgcagacttcagcaggccgtatgatatttgcaaaaccaaaaaaacgacaggacagataatgtacagagataaaacagtaacagtaattattgcagcggcaggaagcggcagccgtatgggaggccgcctgcccaagcagtatatgaaaacaggcggagaggttatactgcgaaagacagcttcggcatttgcctcctgcccggttgtagacgagataattgttgtggcagacagggcatatatggatctgtgcgaggatgttttaaagggcatagagcacaggactgtatcaggaggagagctgagacaggactccgtatatgagggactcaaatgtacagatacagatattgtactgatacatgacggagccagaccatttgtcacacagcagataattacagaggtgacggctgcagcagcagaatacagggctgctgtttgtgctgtaaggccaaaggacacaatcagaacaaagcagggcacgcttaaccgcaatgagctttatgcggtgcagactccgcagggctttgatacggcggcgattaaagcagcctatgaagctgcatatgccgagggcttttacggtacagatgatgcgggcattgccgaaagagcaggccttgaaatcagaattgtttccgggagctatgacaacatcaagataacaacgagagaggatttgcctatggaaaccagagtcggcacaggctatgatgttcacagacttgaagagggcaggaagctgatactcggaggcgtatgcataccttttgaaagagggcttctgggtcattccgatgcggatgtgctggtgcacgcaataatggacgcactgcttggcgcggcggctctcggagatatagggaaactgtttcccgacaccgatgacagatacaagggcatatcaagcatagagcttctgaaggctgtcggagcggctgtagcagatgcgggctatagcgtaggcaatatagatgccacccttgtggccgagaaacctaaaatcgcgccatatattgaagctatgagagaaaacatagcgggcgctcttgatattgacacggacagagtaagcgtcaaggcgacaacaacagaaaaacttggatttgcaggcagacaggagggtatggaagcccaggctgtatgtattctaaacagatagaaggagatttatattatgagactttcaaagatgcacttaaagactttaagagaggtacctaacgaggcggaaataccaagtcatatcctgctgctcagatcaggaatgattaaaaaaaccgttgcaggtatctacagctatatgcctatgggctggagaacagtaagaaaaatagaggatatagtcag

SEQ ID NO: 1029 - DNA, 16393 bp, Unknown
  16S sequences of unknown bacteria
tgtcaggagcgggcgaccattggtcgcccgccgcgaagacacacccggaacctcatatcaatgctcacacgtaattgtatctcttccgcatcctgacaaagaagaacgtcgtcacgcagagcgcgaacacctccgcgaccagcaccgacgcccacactccctcgacatcgaagaatatcggcagaaccagcacgacggtgacctggaacagtaatgttctgaggaatgatatcagcgccgagacaagcccgttcgagagcgccgtgaacatcgacgagccgaagatgtttatcccgcacaccgtgaacgccagcgcgtaaacgcagaacccatgcctcgtcagagcctcgagctcagcgtcgtatccgacgaaaattccggtcagaagcccggacagcgatatcgcgagcccggcgaggaagacgcccgttatcaggttgaacagaatgctcttcttaaacatattcttcagctcgtccgtgtttccggagccgtagttatagccgattatcggcgcggagcctatcgcgtagcctatgaaaatcgcgatgaagatgaagtttatgtacatgatggcgccgtatgccgctacaccgttctctccctcgaaatggaggagctgcttgttgtagagcatattgacgaccgacgacgagatgctgctcatcagctcggacgaaccgttcgtcaccgtgtgaaaaaggacgttccagtcgattcccgcttttgtcagcttaaggcagctcgtgttgaaccgcccctgcggcaggaggaaatagacaagcggtatcacgccgcccacgcactgactgagacctgtcgcaacagccgcccccgcgacgccccacctgaacaccgcgacgaaaagatagtcgagcaccatattcgtgcatcccgccgcgacagtcaccgccagccccatcttcggcttctccgccgtcacgaggaagctctggaacacgttctggagcatgaaagcggtcagcgcgatgagattccgccttccgtaggacaggcagtacggcatcattgcgtcgtcagcgccgagaagccgcgctatcggctcaagaaacgcgattccgatcgccgaaaagataacgcccacgacaaccgtcacgtagatcagcatcgagaatatccggttcgccctctcacgatctccttcgccgagtgtccgcgcgacgatggcgcttccgccggttcctatcatgaagccgattccgccgaagaccatcaggaacggcattatcaggttaatcgaggcgaaggctgtctttccgacgacattcgagacgaagagcccgtcgaccactccgtagatcgagatgaagaccatcatgacaatcgacggcaggacgaatctgagaagtctgccagttgtgaagtggtcggcgagtgttatttgttttcgtttatgttttttgattgatttttccattggtttatcccccttgtggtatgaatgacgtgtcgatccggaggacagctacggagccctcaccggcgctctcatgaaccatggaaaccatattccttttatccgcaaatgatctctcctgtcttcagatctccttcccggccgcggcgaagagctttttcacgtttccggcgaatatcttctctttttccttatcggtcagcgacgggtcgaagaggacgccgccgacatacatatacgggttgcaggtcgggtagtccgagccgaaaattatccggtcttctcctatctcgtcgaccagccgtcttgtcagtcccatgcggaagattccgtagccagagaggtcgagataatggttcgggcggttcttcaggcgctttatgtggcgcatcgcctcgttatactctcccggatgcgcgaagactatctttgtgtccgggtgacgctcggacattctgtccatttcgtcctcgcccatcgagtggatgctgacgatcatgttcttctcggtcgcgtagtcgagcagcttcgagaagccctcgcaggagtagtcgctccagccgtgcgtatacggcacaagctcaccgataagccgcccgccgcgggcatagaactcgtctatcatctccttggattcctctacatatttcgggtgaatcatcagaccggggacgtagaaatcgccgagcatatcccatattttgtacatggcgtcgttagagcggcggatgacgtcgagcgagtcgggagtctggttgtcgcgcatgatgactgagccgcagattttcgagataccggcgtctctcatgtcctgctcgatgtgctccggggtcatcccgaggttgtcgcggtgcgagcagatattctccccgccaaagccgaacgggtgggtgtggaagtcgatgatttcgtagtctttgagtatcatggttgttttctcctttacatttcttcagcttgttttatatacaggttgccgtacttggttatatattcttttctcgcttcgagatcgtcgcctaacagtgtgtcgaagattctcgcggtctcctcggcgtcggcggcgtttaccttgatgagacgccttgtttcggggttcatcgtggtctgccacatcatttcgggctcgttctcgccgagtccctttgagcgctggagggtgtatttctgggttccaagtttctttattatttcgaccttttcctgctcgttgtaggcgaactctattttgtccttacaggtgatctcgaagagcggggactcggcgatatatacgcgcccattctttatcagcgtcggaaggaggcggtagaacatcgtcaggatcagcgtccttatctggtatccgtcctcgtcggcatcggtacagattatgatcttcgaccacctgagagcgtcgtaatcgaacgggacgatgtcgcccttgaccttggattttatctcgactccgcagccgatgacctttaagaggtttacgataatttcgttcttgaatatcttgtcgtagccgctcttgaggcagttcagcgtctttccgcggacagccattatcgcctggaactccgccgcgcgaccgagcttacaggaggtcagagccgagtcgccctcgactatataaagctcgcgccgctccgggtccttagtacggcagttgacgaatttatcgacacggttcgcgatgtcgatcgttccggtgagcttctttttgaggttcagtctggtcgattccgccgtctcgcgggagcgcttgtttatcagaacctgagaggtgaatttgtccgcctcgccggggttttccgcgaaatagacctcgagctgatgcttcagaaagtcggtcatcgcctcggctatgaagctgttgtttatcgccttcttcgtctggttcgcgtaggaggtctgggtcgagtagctgttcgagacgagaacgagacagtcctcgatatcaccgaaatttatcttcgactcgttcttgttgtactttccctgcgccttcagatagtggtcgaccgcccacacgaacgccgagcgcaccgccttgtccggcgagccgccatgctcgagaaacgacgagttatgatagtactcaatcacgttcacagtgttcgacgcgcagaatgaaatatccgctttcagtttataatcatccttgtcctcacggtcgcgcccggacgtctcgaggtgccagagaaccggctgtgtcagcgactgcccgccggtcagctcgttcacgtagtcgatgattccgttctcgtagtaatactcgctgtgctcgaactctccgttttccttctcgaagtcgagcgtgaagcgtatcttcggattgactatcgactgctttttcagcgtctcctcaaagtactccttcgggatgtttatgtctgtgaaaacctcgaggtcggggagccagcgtatcacagtcccggtgcgtctcgacttcctgtcaagaggcgtcacggtcagctcatcgaccgggaatcccttctcgaaatctattttcgacacagtctcgccgttatacgacgcgacatgcatatactccgagctgtactgagtggcgcacgcgccgagaccgttcagtccgagcgagaactcataggacgcgcccgccgagttgttatagtactttccgcccgcgtacatctcgcagtatacgagctcccagttgtatttcccctcgtgttcgttccagccgagcggcactccgcgcccgtggtcgtcgacctctatcgagtggtcggcgtacgccgtcacctttataacgtcgccaaagccctccttcgcctcgtcgaccgcgttcgagagtatctcgaagaacgaatgctcgcagccctcaagcccgtcggagccgaagattaccgccggtctcttcctgacccggtcaggacccttgagcatgattatactctggtcgccgtaagccgcctcgttctttttatcatctttcttggttgccatttttatctcccgttatatcacaacaaaacgccgccggttgaacggcagacgtcttaacatacatatatatctctattatactatattttctcccgaaagtaaagagtattttgaaaaattctcttgaagttatcggaaagttctgctataatatactcataccccgacgaaaggagcacaaaatggaacgaccggatatcctcagcgcaaaaaacatcttctcgctctacatcgaccgtgcccgctccacctccatctggaacgccgccgaccgcgccatcaagtatacacgccgcttcttcttcataacgaagctcctgcgcttcgccgccgctgtcatcacgttcgtgcagacaagcgcgatgctgatcgcctccgcgacgctgatactgacccttctcccgctcgtacttatcgttgtcctcgccgccggaatctccggatggttctgcgagaaccggatactcagaaagtacccgccgccaaaggacggaagcatctacgttcttctccccccggaccgcgaacttctcgaaaagcaccagaaagattccgaaacaaccaacaaacacccgaaaaagccagacaaacacatctatcgcgaagccctcgcccgcgacctctcatcctccggaaccgtatacgtcgtcgattcagagccgggatacctgttcaaaggtcttgtgcgcggtctctacccggcaaaagacgtgaacggcgtcacctatctcagcaaaccgttattcctcagaatgcgcgcgaaatacttcgacaaaacgccggaacggatgaattatctgatataatcgtcagcttgcgggggagaggacccgctttgaaaagcgggtcccctcccccgcccccctccctcccgtaaactttcaaaaaaaggatactctgatgatacactttatatgcggcagagccggttacggcaaaacaacacgaatacttaatatcgcggcacaaagcgtcagagccgaaaagccgacattcctgatagtccccgaacagcacgccgtcgacgccgaaaaacagatgaccgatctcctcgacggcgcgccctctctctcgctcgaaatactgaacttccgccgcctctgcaaccgcgtcttccgcgaatacggcgggctctcatactcttacctcaccgacagcggcaaatccctgctcatgtggaaagccctgcgcgaaaccgctcccgccctgtcatccatgccagggactaaaaccgacgacccgagcctcatcgagtcgatgctccgcgccgcgaacgagttcaaagtctgccgagtcacccccgccgcgctcgaaaggtcagccgccgcgctcacggcgaaggacaacccctccgcgagaacagagcgtctctgtgctaagataaacgacctctcgctcattctcgccgacttctcgcgtctcgtctcggagaccgcggacgatgcctcgggcgatcttgaccgcgccgccgaactgctccgtgagcatcgcttctttgagggttcggacgtctttctcgactccttcaacggcttcacggcgcaggaattcgcgcttatatacgagatgatgcgtcaggcggacgatatgacgatatccctctgtctcgaccccggaaacgcctccgctccgttcgagaacctgtccgacacctacggaaggctgataaggctcgcgaagtccgccgggcaggattacacactcgagacgctgaccgaaaaccaccgcgcgaaatcgccggagctcgcgtttaccgagagaaatctatggtcgaccgacccttcatcgccggcggtttatgacggagcttccgggcgcctgcgcgtcgtctcctgtcccgacctcttcaccgaatgcgaggcggtcgcggaggacatactgaaaaaagtccgcgggggcgcaagatggcgcgacttcgcggtcataacgcgtggcgccgcgagatacgacgggataatcgacactgtgcttgaaaaatacggcgttcccctgttcttctcgaagcgaaccgacctcatgtcaaagccgctcgtccgcgcgatactgacctctctccgggtaaagagcggaaacttccgcccgtccgacgtgataacctacctgaaaaccgggctttccggcatcgcccccgacaattccgctgagctcgagatgtacatagaacgctggtcgatacgcggcaggaaccgatacacccgcgaatggacgatggacccgagaggacacggcttcaccgaactccccgaaaaggagagcgcgagactgaaacgggtgaacgaacagcgaaacatactcgtcccgccgctgacagctttcttcgataagctcgacgcttgtataaccgtactcgaccacgtaaaggctctgtacgacttcctgacctccctcgacgtccccggaacgctcgagagacaggcggcggaactgaaacgcgagggaacgtccacgtctcttgccgagggcgaagagcttgaacagatatacggcatcctgattgacgcgctcgacgagatggcaagcgtcataccggagacagaaaccgatatcgataccttcgcgagactgctcacaatatgcctgtcctcggcggacatcgggcggataccggcggctgtcgacgaggttgtcgctggcgacgcgtcgcttctcagggcttcgagaaagcatatctatctgataggcgcgaacgagggcgcgtttcccggctctcccgacgacggcgggcttatcggcgacgctgaccgcgagcttctggcgaccgtcgggatagagctgtccgacagcgaataccgcgccgccgacgagagattccacttctaccgcgccgcctccggggcgtccgaaacgctgacgatatcttacgcctgtgccgacctcgcgggaaagccgctcagaccctcgtcagccgtgaggcgcgtcatgacccttttcggcaaagaacccgaaagctacgataaaaagccgctcgccgaccgtctcgagggacgcgggaagctgctcgagtacactgctgaagccggagacaccgcgctcggaaaggctctcagaaggtatcttgaaaaatccaccgaaactagagaaaaactcgcgaagctcgatatcccgctgaccggggcggcaacagaacttgaccgtgagaccgccgaactcatatccggcggggatctcgcgctgacacagtcgcggctcgacagctatgtgctctgccacttctcgtatttctgcaaatatgtgctgaagctcgaggacgcgaagcccgccgactttgacgcggcgaatatcggaagcttcatacaccacgtgctcgagctgttcgtttcaagggcgtccgagggagagcttggaagtctcaccgacgaggatatcgaccggatggtgtcggaaatcgtcgagagctatatggacgacatatcaaagactctccccgaagtgcgcgggacaaggctcgggcatctgttcacgaagctgcgcagatcgtcgaagctgctctgtaaaaatatcgcggaggagttctcggacagcgagttctcaccggcgttcttcgaattgcctataggtttctcggacagtcaggggaagtcggtcgctccgctgtcggtcgacctcggggacgggtcgaaggcatatatctacggcgtcgccgacagggttgacctcctgcggcgcgatgacaagctctatgtccgcgtcgtcgattacaagaccggaacgaaggaattctcgatggacgacatagcgatggggctgaacctgcaaatgctcctctacctcttctcgctctggaagaacggcgcgaaacctcacggcgcgctcagggacgccgcaaacggacgcgaagtcatccccgccggtgttttatacttctcggcaaatgtcccgacagtgacgctcgaccgcgaggaatcgccggaggacgttgagaggatggtgtccgacaagctcgcgaggcgcgggcttcttctcgacgacacggacgtcctgaccgcgatggagcatgagctctccggcaagtacctgcccgtcaaagtaaagaaggacggcagcttcggcaagaccgacgcgctgaagacgctcgaggatttcggcagtcttctctccgagatagaatccaccgtccgccgcataggactcgaaataaagcgcggaaacgcctccgcccacccgatgaagacaaagaaacacgacgcctgccgcttctgcgagatgaagccggtctgccgcgccgcgaacacacaggagaagcactgatggcacagaaaagaatatggacaaaagcccagagcgaggcgatctccgacagaggtcacgaccttttagtctccgcgggcgccggttcgggaaaaaccgccgttctcaccgagaggataatccgccgcctgaccgaccgggagaacccgctggacataacaagaatgctcatcgtgaccttcaccaaggcggcggcgagcgagcttaaagaacgcatatcctcggctctcagtgacgcggcggcggagaatccctccgaccggagactcacgcgtcagctcttcgcgctcgagcgggcgcagatatgtacgatacacagcttctgcctcgatctccttcgcgagaatttttcgaatgtgggactgcgcgcggacttccggatagcggacgacgcggagataaagctgctcgagagcgggcttatgaacgagcttatcgaggactactattctggaagcaccgaggacggatatgaaatcgcagacttcgaggacctcgccgacagcctgaccggaaccaaaggcgacaaagggctcgcggatatcttcctgtcaataaagcacgacctcgaatcctacgcggagggaacagacttcattctgaactttgcctcggagcttgaggacgattccacacgcgacttcgctttcagccggtgcggacgggagatcctgaacctcaccgaaaacacgctctcggtctaccgcgacctcttcgccgacgcggcggaggaagtgtccggcgacgagaagttagcgaaggctctgaaaccggcgtttgaggctgacgtggagttcatcgaccgggtgtcggtattgtcgttcaccgacgactttcaggggctttgcgaatggttcgacggttattcgcccgtgcgcttcggcgttgcccgcggcgtcgctctctccccggaggtcgaagcggcgaaaaaggcgcgggacgagttcaagaaggagcggcagaagctcgccgacaagttcttctctctcggtgaagaggaggtaaaaaagacccagaccgacaccgcgaaggtactaagacagatacacaccctgctctcgctgtttgaaaagcgtttcgacgaagaaaagcgccggcgcgggatagtcgacttcgccgacctcgaacgtctcgcgtcaaagctcctgataaaagacggacagccgaccgccgccgcgctgacgatctccgggcgctacgacgagatatacatcgacgagtatcaggacgtgaactcccttcaggacgcgattttccgttcgatatcgggaaacaaccgcttcatggtcggggacgtcaagcagtcgatatacgcgttccgcggcgctgacccttccatattcgagagttaccgttctggattttcgagaaccgcggagggcgcggagaatggacggacaatctttctctcggacaatttccgctgtgacgagccggtgatacgcttcacgaaccttgtctcatcgcgcctcttcacgaacggaacgggcgcgctcccgtactaccccgacgacgaccttgttcactcaaaaaagggcgaagaaaccggcgagccggtgaaaatagccctgataagctccgagacggaggacgaggacgaggacatctccgaaagagaagccgaatacgcggcaggcgagataaagtgtctcgtcgggagcgcgaaaaaggacgacggctcgcccataacctacagtgatatagcaatcctcatgcggagcgcgcgcgcacagtcggacgtgttctctacggttttcaaacgtcacggcataccgctcttcaacagtaccgagggcgacctgttcgagaacccggaggtactgctcgtcctgtgccttctgaacgtcatcgacaacccgtcgcgggacatctatctcgcgggactgctgaaaagcccggtcttcggatttacgcttgacgagctgatacgaatacggagacattcgtccgacgggagcctgtacgacgccctccgcgcatataccgacgacaccgggtttgacagaggcagaagttttctcgaaaagctctcgctctggcggcacaaggcggggacgcttccggtcgaccggctcgtgtggtatctttaccgcgacaccgaccttcccgcgctcgttcagactgacccgggacagacaaagctccggctcgccaacctcacgatgttctacgagtacgcgagaagctttgaaaaatcctcgtcgcacgggctttacaacttcatccggtatataaacgacataatcgacaataaggcaagactgagtgtcccgtcggcgtcgtccgcgggcactggcgcggtcaggctcatgaccatccatcagtcgaaggggctcgagttcccggtcgtcttcctctgcgggacaggcaagaagttcaacgagaacgacctgagacagagcatcgtctcggacagaggtctcggaatcgcgctgaagttatctgacagcacgggtttcgcgcggtatgacacgcctgtcaggcaggctatcgcgaaaaggctcggcgactcacagctcgaggaggagatgcgcgttctatacgtagccctgacccgcgcgagggagcgtctgtacgtcaccggcacggcgtccgaaaaggctctcgacgaggcggactccgattcggtcaggctctcgaagggcacggtcatgaagaacggcggatatctcaggtggatactcctcgccgccgcgaattatgagcgtttctcgcacccggactccctgccgtaccgcatagagatcgtctcgccgcagggggataatgttgcggaggaagccgaagatatcgttcaggacacggatacacgtacagaaaaagcgccggaaatcaccgacgcggagtatgacaggatgctgtgcgagcgcttcgattacacctacccgcacatggcggcggcaaggctcccggcgaaattgtcggtgtcggagttgtttccggagctccttgacgaggacgcagcgacgcttgacgaaggaacattttcaggcacgctgaaaccccataggggcgaccacccgtcgcccgctcctgacgattccgcgaaacccgatgctacccgcaaatctgccttcagacgcgcgccgttgttcctctcggacaaagcggcgaccgaatcaaccgctgccgaacgcggcactgctacccatctgttcatgcagttctgcgactacagccgtttcagacccggagataaccttgacaatgcgcttgacaccgtaaaggatgaatgcgcaagactgggtgagaacaggttcatcacaccgagaatagcgtcgctggtcgacacccgccgtgccgcggcgttcttcaccgggaagctcttcgcggagatatcctcctccccgatggtcaggcgcgagacgaggttcaacgtaaagctccccgccgcggatttcacggcaagcgaagagttaaaaaaggctctggagggcgagacgatactcgttcagggcgtcatggactgcttctatgagaacagggacggcagtctgaccatcgtcgactacaagaccgacttcatcccgaagggcatgagccgggaggacgccgagaagctgctcgtcgaacggcacaaattgcagctgacctactaccgctccgcgcttgagaagatatccgggaggaaggtcgggagagtggttatttattcgttcgggctggggagagaggttgaggtgaggtaatgagccggaccacgtggaccacgtgtttttcacccgccggcgggaaatattattgaaatgacaatcatacgctcacgtctatatatcggagaagggtagaatcccgtaggggcgaccattggtcgcccgctccgtacgtttacatcaatcttcattccaacgtaggtgcgatgtgtttgacgggcgaccaatggtcgcccctacaatgttagaacatagtcgtgtatttgtgcgtaatggtgaagaaatctgcaatccggaaaaaattctcccggcgggttgaaaatacgcggtccactcactcttcacttttcacttctccgatactccaccggcgaaaccccgtacctcttcctgaacgccgtcgagaagaagctctggtcgcagaaaccgagcatcgccgaaatctcgcctatcgtgtagtttgtctcggcaagataccggcaggcggcggtgaacttcgcctcggtgtggtacgctccgggcgtcgtgccatacctctccttgaacacccgtatcagatgccgcttcgacacatggaacgccttcgacgcctcgtcaagcgtgaagcgctcggttatccgcttgtctatatactcacggaaccgctccgcgagatcctgcctgccgccattaatcccgccggaatcagttatgtccgccagagtcagaaacaggtcgcagatgaaatgcgtcacccgcctctcgtcatatccggacgtcgcgaggatgctcttaagcgtcaggaatatgtcgtccggcacgttatgccgtatcacaagcgcctcgtcgttcaggtaagccttcgccatggcgtccgcgacgctcccgtcgacactgacccacagcttcgcgtacgggtcgctcgtgtccgcgccatactcgattatcgcgccctttttcatatatatgaggtcgcccggacagacagcgaaccgcttcccgtcccgcaccacatacccgtgaccggaaaccacataatcaaacagataccgcccaagccgccttgagaacgcgtaggagcggttcggtatcactctcgcgaactgcgtgatgttcgcccgcgggttcaggttcgtcaggttcacgtagatattctcgtcgtatttcattctctcaccccataatatcatatcacagaaccggccgtctgtcaatacccgattatgtcgctaaaacaaatattgttgtcacgataattcattgcaatccggataaaaaaggtgtatactgtaatcaccgcggcacgaaaactcaaaacccgcgaataacaggaggaacccgaatatgaaaaagatagtaataatcggcgccggaagctggaacttcacccgcgccatatcccgcgacctgctgaccttccccgccctttccgactcacacatagtgcttgtcgacatcccggcgggcgaagaatatatgctcgccgccgagaagatcatacagaagacgatagatcagggtcactacccggcaaaagtcgaatccacgttcgaccgccgctacgccctcgacggagccgacgccgtcctcatcaccatccgcaacgacacgacaatcgacgcgtgggctcccgacctcacgatcccgaagaaatacggcgttgacacggtcatcggcgacacccgcggacccggcggaatcttcaggttcctcagaagcgcgcccgccctcaaggctatagcggacgacattctcgagctctgcccgaaggcggttgttctcgattacacgaacccgatgtgcatggtcacgagctatctccaccacctcggcgtcgacgcaatgggtctctgccacagcgttcagggaacatcctcgatgctcgcgagatggataggcgcggacatgaaggacgtcacctacaagtgcgccggaatcaaccatcaggcgttcttcctcgagtacaaagtgaacggcgaagacgcctacccgatgatctacgaagtaataaaggatcccgagatctacaaaagcgaagccgtcagaatcgaaatgatgaagggtctcggctatttcgtcaccgagtcgagcggacacaactccgagtacaacgcgtggttcagaaagcgtcaggacctcatcgacaaatacgtcccggattcctacggcacctcgatccgcacgataaccgaccgcacgagccaccgctcgaaggatctcgacgacctccttcatcaggaaaagctcaatctgaaccgcggacaggaatacgccgcgtcgatcctcaacgcgataatgggcgacggcgagctcttcgagttcaacggcaacgtgaagaacaccggactcatcaccaacctcccgaaggacgtcatagtcgaagtcccggttctcgcgtccaaagaaggtctccgcccgatgtacataggcgacctcccgagacagtgcgccgcgctcaacaccgtcaacgcccagtgcgaagagttagcggtcgaaggatgcctcgcgggagacaaagaaatgatctaccacgcgattataaacgacccgctcaccgccgctgtttgcagtctcgatgagattcgacagatgacgaatgagatgtttgagcagaataaagataaactgccagccacttttttataaataggtcggattttcgtaccttttccccgtgtttggtggttgaaatcgcatccggattatgataaaatatttatacagatatctgatccgggtcaaaaaaaattctgacagcctgtacagccgacgggacgccgtcagctccgggcacacagtgaaaggatacgattatgaaacttccaagaaagctaacctccctcctgctcctgctcctgtccctgatcctcgccgaaacgtcagcctgcggttcagcgccctcagattcaacagacatcaccacgacagacgccataacaacaaccgcgcccgaaacccgcgaccccgcgaccgtatgcgacatccccgaagacataaaattcaacggagaaaccttcaccttcgccatctacgaaaacgccaacaccaacaaccacatgctggtcgacgaagaagacggcgacaccatgaacgacgcgatgttcaaacgccgccggatgaccgaagaacgcttcgggataactctcgaagagctcgtctatgacgacaacccatccaaattccgcaccccgatacttgcgggcgacaattccttcgacatcggaaacatacgctgtacagacgccctctccttctggcaggacggaataatcaccaccgtatccgaacttccatacgtcgatatcgataaaagctactggaaccgctccttcaatgattctcttaccctctgcggtcagcagtacatagcgataggcgacatgatgaccagcaccctcgacctcacctacaccctcaccttcaataaaaagctcgccgaaaactatgccgtcggcgacatctactctctcgtccgcgacggcaaatggaccttcgaccagatgctcaccatgatgaaaaccgcgacgcaggacgccaacggcgacaccgtgatggatgagaacgacaactatggctactgcgcaaacccgaaaaacgtcctcccgagcttctggatttccgccggtgagatgagcgtcaaaaaagacgaaaacgaccttccttacctcgcaatgggcgaagaacgcttcgtgaacgtcttccagaagatctacgacataacctacggctccggtacatatttcaagcccaaaggtgactttgatgtcaccgaagatcaaagaagactcttcaacaacgaccaactcctcttcatggactgctccttcttctacgtacagcagctccgctcaatggagaccgacttcggtatcatcccataccctaagtatgacgaaaatcaagatcgctactactcccgcgtctcctattacaacgccccgatcatccctgtaacgaacaatcgccccgaactcaccggagccgtcctcgaatacttcaactgggcttcctccgagaccgtcatccccgcatactatgacaccgtcctctacggcaaggtgatccgcgacgacgaatcccgcgaaatgctcgacatcatcttcgacgcaagagtcagatc

SEQ ID NO: 1030 - DNA, 14032 bp, Unknown
  16S sequences of unknown bacteria
ttttgatgttatacttgtcatagaaaattcacctcttatggtactttgtttttgtcgttattaacatcataccatatttgagatgaattttctttttattttgttacctatctattgtaccataacatttttcaaacggattttttaagtattgcggttatcacggttatatcgtcctcgcggttgtcgtttctccgcctgtgcgcgccctcgcacagccgctcggacagctcctgcgctgttccgccctcccatttttgaagctcgtctcttatccagtcgcagccgtcaaatgccgccccgtcggacatcattactattatatccccctcgcggcattttaccgtcgccttgtcgaaccgtacctcgcgcagtatccccgcgggcagcgaggtgctttccgccttaccggttctgccggagcggcgtatcaccgtgggggctgcgcccgccttgtaaagctcgacctgcccgttataaaggtctatgcttgaaatatccaccgtcgcaagggattcgtcggttgatttgaaaagcattgaggaattgagaattttaagcgagcagtcaaatccgaagcccgcctttaaaagcctgcacataagcccggacgccatagcgccgtccactgcggctctgccgcccgtgcccattccgtcggacagcacggtgataaaatgcccatgaccgtcgaagaaatatctataggcgtccccgcacatcatggattcggaagcacatttttgctctatcccgacatccaccctgagagccgcatgctcgcttaaggttatgaatatatctccgcccgattcgtttaccgcagggacatcgaaatccctttcgcagaccaccgatacaagcttcatgatctgcagcttattaagcacgggagcacccgcttttttaagcttcagctcaatttttatccgtccgaatttatcggtgcggctactgcattcatcaacctgtatattaagatttttaagcgccgccgcagccttttccgccgccgtattatcaaaatgcgaatctgtttctatatcccgcgccagctcgtacagcatatccgaaataccgtcaaactgatcggacaccaccgagcgcacctcgtctatccttttttccgccgctattcttgaggcgtaatctgaataccttttataaacagaatttgccacacgcgagaccctcatgcatctgccgataaattcctcgggtgcgcttttttcgggctccggctcaccgttttttaccgccttggtcatttcgagcaccgcagtgacggtatcgtcgcgcctgctttcccagcagtgaagccgcagcttgcagcccgcgcaagcgtcctgctccaccgcggatatcaccgtgccgaaatcaggagaattgatttttgaaagctcagatgccacctgctccaccgtttcggagacatcgcaaagggcgttcgccgccatatcaagcctcatttcgagtgatttttttataccgccgggtatcgccatttgcggtttaacggtaaaaagctttccgaaaaatatacccgcgcgccgcggaatcgccaaaaaaagcgccgagccgagtatcgcctcaaccgcgcataccgcgctttgcagggcgctcatatttacagccgctcccgcaagcccgaaaaataagggtacaagcatcgcggcatatttgccgaacgaggaaaatacgcccgccaaaacgcctgtgaaggcataaaacaccgccgtgtcccccggggcgccgccgaaaacgagagaaagtgccgcagcggcgccgcataccgcacccgacagcacgcctccgtatttcgctgccgtaagtataagcgccagcgccgcgatgtgacctaccgatattccgccgtatacaaacccgtgaagtcccgtaagcataattccgagaaagcaaaaaagcgaaaccgcgccgcctgttccgagccccgcgggattttcgtaatactccctaaaaaaacctgaaataaagtacgcaccgcccgcggcaaaaaaagcctcggcaaatatatccgtcacagaggaatcaaacagcctcattgtgaaaaatgaggtaagcaaacttgaaaaaaggcatattgccgccggcagcagccgattttttgatattttttctgataatgaggcaaaaagccgcagcgcaattacgccgagtacccccgctatataacgaaaattaccgctttcgagaggagaaaccagatatcccaaaaaggcaccgaccgcagctgacggagcaaatgccgcaggcattcctgccgcaaacgacagcccgaaaggaatcagcctgtccgctattaccgcatgcgacgcaacaagccctgccacggcggtcagtacatgccatcctgccgccgcagcaatatctctgttcgttccgagcgcccttacgggcgcagatcttataacatccttcaattgaaatcaccgccgtattatcataaactgtttcaagcctattataacgcctgcggtttgtttattttgtcgaagccccctgcagagttaaagctttttttggcgaaagaaagtatgctctgtatttttttgaatatttttataaaatgcgggaaatatattaacaaaaaaatataagggaagcggttaaatgaaacggttttttatatttgcaatgaccctgtcgctgctgctcgccatatgcggtataaccgcagcggcgctttcaaaaatggggtcacgctccgatgaggtcagaaaaattcaggaggcactcaagagtaagggctactatacctacaataccgacggcatattcggcacgcgcacaaaaaatgccgttatcgcctttcagcgggataacggacttgatgccgacggcattgcgggcgagaaaactcttaaggcgctcggtataaacgaatcgtcctccggcggatattcctcggctgactttgagctgcttgcgagaataatctccgccgaggcacggggcgagagctatctcggtcaggtagcggtgggcgcggtaatacttaaccgaatagagcacccttcgtttccggatacgctttcgggcgttatttaccaaaaaggcgcgttttcctgcctttacgacgggcagttctatgaaccgatagctgaaagcgcctattccgccgcccgcgacgcaatcaacgggcttgacccgagcggaggtgcgatatattattacaatccctcaaccgccacaagcaagtggatattctcccgtcccgtgataaccacgataggcgcacacagattctgcagctgattgccccgcccgatcgtcttttgccgacacaggcaaatcggaaaaccgacatctgcaccgaaactgtgcttgcatatctaatatctgccatctaaaatccaatatataaaagaggactccttgtgacgggagtcctcttcatagaataaagcttattcgattttatccgaattattcctctgcctgtccttcggtctctgccggtgctgcagcctcatcgggagtttcgtaaacggtttcatccgcttcggaaacggcaggagcagcctcttcagccttttcaggctctaaaagcgcacggatagaaaggcttacgcgcttcttttcggaatcgatggcaatgatctttgcgtcaacctcctgacccacggtcagctcatcctgcggctttgcaatgtgcttatcggcaatctgcgagatgtggataagaccgtcaatacccggaattatacgggcaaatgcgccgtatgtagtcatgctgacaacagtaaccttaacggtatcgcccacattgtagttattttcaaaaataacccacggattatcctcagccttcttgtagccgagagatatctttctcttttcggggtcgagtgccttaacataaacctcaacggtatcgcctacaagcactacctccgacgggttctttattctctgccaggaaagctcggaaatatgaaccattccgtctaccccgccgatatcaacaaaagcgccgtagcttgtaattgacttaacaacacccgtgaagcggtcgcccactgcgatggtctcccaaatcttatcctctgccgccttgcgttgctccttgagcacactgcggatagagcctaccgctctgcggcctcttccgatttcgataatgcggaaggaaacctccttacccttcagatcctcaagggattcaccgcgggaagcggttgcctgcgaagcggggatgaaaacgcgaacattattggaataagccacaacgccgcccttaataacatccttaacaaagcctgtaacgatcgctccggaatccttggcggcaactatattgtcccaaccggcaatagcatcgtaacgacgctttgaaagcattgcggttccttcctggtcattaatcttcataatgataagattaagcttatcacccgcctttacctcgtccataagctttacatcgggatcagaagaatactcgtccgctgtaacatatccggtgacacctctgccgatgtccaccgaaatttctccggggttaacagcaataaccgtaccttcgaccttctggtcgcccgttaagctgctgagcgaagcctcaaatgcttcctcatccgtcatttcctcaaagctcttttgaacagattcttttacctccgtctgttcttcaaccggttgtaaattttccgacatggttttaataacctcctttataatacctgcaggcgtggaagcgcccgcaacaactcccgccgagccgcacccatcaaacatggcgccgttaagctccgccgccgtttcgataagataagctctgccgcattccgccctgcacacatcaaacagctttgccgtgttcgatgaatgcctgccgcctattacgatcataacatcgttttcggccgctaatttttgagcctcctgctggcgcatagaagtcgcattacatattgtatcaaatattttcgcgtttgtacatactttttttgaaattttctgaatttctttccaaatttccgcgttaaaggtcgtttgagctactaaaatgacctttttttcactgaaattcgcctttttttcaagtaatttcctgaactcggctgcatctgaaacgacataattctcgcccgtgcagtgaccgacgatacctattacctcttggtgggaggcgtcccccgctatcaccgttatgtacccctcggcgcttttttcggctactattctgtgaatcttcgcaacgaacgggcatgtagcgtcggcagttttaatgcccgcctccgccgtttttcgcatgacctcggcgggaacaccgtgagaacgtatcacaagggtctcgccgggcagcgcctcggaatatgacgaaaccgttcttactcccctgttctcaagctcctttaccatttggtcattatgaattataggcccgagcgtgcagaccctttcacccttttcgagcagatcgcacaccatctgcacagcgcggtcaacgccgaagcagaagccggcggtttttgcaagcgttattttcaacttttcttaattccttccgaaattattttgatcacaagcgcaaccgattcatcgagtgaaagctccgatgtatccgcaaggcaagcgccctccgccctcttcagcggagctgccgccctgtgcgtatcgttataatcccgcttttctatatcggcgcacacctcctcaaggcttacgctttcacccttttccgtaagctcgcggaagcgcctctcggcgcgcaccttgacagaagcggtaagaaaaattttaacatcggcgttcggcagcaccaccgtgcctatgtccctgccgtccatgataacattgttttcatatgccagcctccgctgcatttcaagcaaaaacgcccttacggcgggctttgccgaaaccgccgacgccgtcattgaggcttcgggcgtgcgaataagacccgatacatcctctccgtctaaaaaaacgtgctgctcgccgcccgaaaagcgaatatccaccgctgtttccgacaacaccctttcaatctcctcatcggacgatatatccgctcccgtcttgctgaatttaagccccaccgcgcggtagagcgcgccggtatcaacatatatatatcccaatttttcggctgcacgccttgctattgtgcttttccccgcgcccgcaggcccgtctattgctacatttatcattttccctgtctcctaaacattactgcccgccgcaaagccggtcgaaaaggctatttgcaggttaaagccgccggtgtatgcgtcgacatcaattatctcgcctgcgaaataaagccctgaaataagccttgagcccattgtcttgggatctatttccttaaccgatataccgccgcgggtgattatcgcctcgtctatcgggcgcgttccggttatatgcagcgtaaattcctttaagaccctgcaaagcgcggcgcgctgctccctgcttatactgtttaccttccggtcgggttctatgcatgaaagccttacaactatcggaattaagcttttcggcagcagcttattaagcgaatttatgaaatcgcggtttttttcttcgtcaaaatcacggagaatccgtttgtcaagctgttccggagtcagacccggctttaggtctatggctgcggtgtactgctttttgcctatataccgcatatgcgccgacgcgcttaataccaaaggtcccgatattccgaaatgggtaaaaagtatttcgccgagctccgaaaacacaggttttttcctgtcctcctcaaaaaccgaaagagcgacatttttaagcgacagccccgcaagtctttcgcaaaagccctcgtgcgcattaagcgccacaagtgacggcttgatttcggtaacggtgtgaccgagcgccctcgctattttatagccgtctccggtagagcctgtaagcgggtaagacataccgcccgttgcaagtatcacgctgtcggcaggcaatgcttcgccgttttcaagcaagaccccgctcaccgcaccgttttcggtgagaattttctttgccgtgccttgaattatttcggcgccgcccctttttgcggctttcacaagcgcatctacaatatccgctgccttatccgacacagggaataccctgttgccgcgctcggttttaagcgaaacgccgagcgattcgaaaaatgtcatggtatcctgcggggcaaagcccgaaaaggcggaatataaaaatcttccgttttcggggacattcgcaatcagcgtatcaatatcgcagttattgcagacattgcagcgccccttgccggttatcataagctttcttgcggggcgctcgttcttttcaataacggttatttcagccccgccgtttctatatatataatttgctgtgcacgccgccataagccctgcagcgccgccgcctataattacaatacgtttcattttttcacccggaatattttacagcaaaatcggaaaaaagtcaacatcagacataggatatcaaacggcagatgtcagattaaatacctctgttgtttgcacaaaaggctcccccatctgcttatcggcacaaaagaaggaagccacaatgctctttcccgcactgcagggagtctgtaacaacaaccgtcgtaagattaggcaggacactacgattgcagttttttaagctcgtaaaatcttcctttctttgccataagctcctcgtatgtaccgtattcaacgcatcttccgccgtccataacggcaattttatcggcattttttatagtagataggcggtgtgctacaataaatgtggttctgtcggcggtaagattttctatagccgtttgaatttccttttcggttacggaatcaagcgcgctcgtagcctcgtcaaaaattataacgcgcggatttcttattattgcgcgggcaatggaaatccgctgccgctgaccgcccgaaagcttagcgccgtgctcgcctaccatggtgtttattccgtcgggcagcttttcaataacgctttcaagctgtgccgcttttacggcgtaatccagcatttcctcagtaacattttttctgccgtaggttatgttttcctttattgtgcccgaaaaaagtatggagttttgcggcactacagatatgaattttctgtaagagcgcatatttattttatccgcatcaattccgtctattttaaagctgccgctgtctatttggttaaagcctataacgagattgagcaccgttgatttacccgagcccgattctcccacaagcgcaacagtctcgccggggcttaccgtaagcgaaaagccgtttaatacaggcgtgcggtcgtcgtatttaaagcagacatccttaaactcatagccaccctcaaggtttttcatctttatttttcggtcgttattctcaatatcgtgcgaattgagtatctcgcctattgagtttattgcctctgcaccctttgaaataatgggcagcagccccattatgcttgaaacctgcccgataagcgcgccgaaatagctttgatagagagacacgtcgcctattgttatttgccctctgaacgccaaaaagcccgtaaagaaaaggcatatcatttgaaacattgagaacattacccagtttaccgagccgaacacggcgtatatcttatccattttatagccgctttcggctatatcggtcacgctggcggtgagctttttaatctcgtttttttcaagagcgtgagcccgcgttacgggaataagctcctccatatcaagcacatccgacgcggtgctttccattttcttgcggaaatcgtggctttgcgcccgcattttctttttaaagatattgcttaaaaataccgcaaagggcacgcaaaccaaaaacataagaaaaacatatatattcttggttattactattgcaagcgatattgccatatttgtaacaacggtaagcgtggtggtgaaaatctgccccgtaaagttttcaattgcctcaacatcccgcattaccttcgactgtattttgcccgattcggtttccttatggaaggtgaccgacagctgctgcagttttcgtatcattgcgccgcgaagccccgcctcaacgctgcgctgcgcgcgacttaaatatttcatatgcagcgtgtgggtgggaatattctgcaaaagaattacaaccgttaccgcgccgtaaattataaaccttttcacggcgtcatcaggcttttcggtcactatatttataactcccgcggttataagcggcaaaatccagcccggcgaggattttataaaaaacattaccgccgacattaaaagattgccataatttcccttgtaaaaacgaaaaagcgttgctaaaaagccctgtttttcaccggaatagcaatcaagcaacgttttttcttcttttaatattttttctctgtcgaactgtggccttgctgttgtcatagcagacaccccgcttataaatttaaatattgggtgtacacatattaccacaaataaaaactaagtcaatacttttttttaaaagcttatttatttaagcaaattcatgactcggcttaattttttaaccgtttcccaaatcggcttttaaaagctcccgggatttgccgatataagtctttttatcgcctctgcggcggcggtaagtcccgcagcgccgggaaccggtgccatactcgcagggctcaccccgcccgtgctgcgatattcgccgcaatcctgcggctttatgggcggctcgtcactccaaacggcggtaacccccgaaacgccgcgttttttaagctcatagcgcataacccgcgctaaggggcaaacgcttgtttttgatatatctgtcaccctgatgcgcgtggggtcggttttattgcccgttcccataacgcttataagggggatttttctcttatacgcctgctctgccaaaaaaagctttgctgtcacattatccaccgcatctatcataacgccgaatttttcaaaggggatttcgctttcgggagttataaattcgcaaacgggaattatattgcactcggggttaatatccctgtaccttgcggcggcaatatcggtcttgtttttaccgactgttgagttaagtgctataagctggcggtttatgttgctttttgcaaccgtatccttatcgtaaatataaagcgtgccgagccctgagcgcacaagcgcctcggcggcatacgaccccacacccccgattccgaagaccgcggcggcggagtgtgagagcttatctattccgttttctcctataagcgaggcggttcttaaaagttcttcccgcatatcacagctccaaatatttaataagatagggtatctgcgtttcaaagtccaccccgaaacgctcctctcggttatcggtaagcgctttttttatgcagcgcgcggtgaaattagccgctatctgcgcggcggattttaagctgcggtcgcgaagatacgcagctgtaagcgtgcttgtaaaaatatcccccgtgccgtggtaagccacgggaatgcgctcggcaaatacatatgaaacggtttcaccgtcaaaaacggcggcgccgatttttctttcgtcaaagctgacgcccgtcagcacaatatcggcgtgggtcttcaaataaagcccgctcagcagcgcctttatataattttcatcatacggcggctccctatattcgcacccgagcataaggcaggcttcggtaatgttaggtgttataatatccgccgcggcgcataatttcagcatataatcgggaaaatcgggctcaaagccgcggtaaagcctgccgttatccgccataacggggtcggctataagctttgtatcggggcggcttataagccgggcggattccagcgccaaataaatctgttgctttgagcacaaatagcctgtgtaaaccgcgtcggcggtaacgccctcctctttccagtggcgggctatggccaccatatcgggcgacatatccttaaatgtataatttttaaagccgcccgtgtgggttgaaagcaccgccgtgggaataacggcggtttcaattcccgctgccgaaattatgggcagcgcgaccgtgagcgagcatttcccgagacaggaaatatcacttattgcaacaactcgcttttgcaagctatttcactccctttttaggacaaaaactttcaagcggacaaatttcgcagtgtgcctttcgcgccgtgcatatatccctgccgaaaagcaccgcgcggtggcaaaacgcatttgatctttcgggcggcagcagctttcgcatttcggtttcaaccttcagcggaacggtcgtattaaccagccccaagcggttgcaaagccttataaaatgcgtgtcggtaaccacggcgggcttgccgaaaatatctccgcacacaaggtttgccgtttttctgcctattccgggcaggcgcgtcagctcatcaatagtatcgggcactttgccgccgtactgctctgtcagcattttgccgattccgcaaagatcctttgcttttgttttgtaaagcccgcaggttttaataagctcctccacccgctttatatcggcgacggcgagtgtctctggcgtggggaactcggcaaaaagcgccggagttaccatatttacccgcttatcggtgcattgcgccgaaagccgcgttgcgataagcagctgatacgcatcggtatagttaagggagcacacggcgtcggggtagagcttttcaagacccgctaccgccttttcggttatttcttttttacgcattggtaggctccagctttaagtctccctgctttataagccccagcttgcgcataccctcggcaatagcaagggttacggcggcggggagaataaagtgcataactattatttcaagtattgctactgcgggcgaaaagcctgccgcagtcatgctgtcatacgccataaactgacccacaagccccgaagagcccatacccgagcctacggggttgctcaccattttaagcactgccgaagaaacaggtccgagaattgcgcttgaaagcacgggcggcagccaaagaataggcttgcgcacaaggttcggaacctgcagcatagaggtaccgagtccctgggctataagtccgccaagcttattttcacggtagcttataaccgcaaagcctaccatattgcagcagcagcctattgtggcagcgcctgcggcaagcccggttattcccattgaaatacctattgcagcagaggaaatgggcagtgttaaaataacgcccataagcgctgagattgcaattccgcccaagaccggactgttttcgacatttatattaacaagctcaccgagccacttcatagccgtggaaatgtacggtcctacaaaataacccgcaacagctcccgccaaaatgctgcagaccggcgttacaattatatctacctttgttttgcccgaaaccagcgcgcctatttcaatagctatgtaggcggctataaaagcgccgagcggctcgccgggtgcgcctattttaaacgcttcgtttgcaaggttggggaaagcgcctatcatacccgtaacccccgcggctaccgcaaccagcggcgaggatttcagcttacaggcaacgcccacgccgatacccgcgcccgtgagcgtttttgcaacgctgcccatggcattcagatatgtaccaacaacattaccgccgacaagctttcctatctggcagataatagtacctataataagcgtggaaaaaagcccgtagctcattccggaaagtccgtctataaaaagtcggttaagatatttcttcatattttccccttctttatacatattttaataattatactaaaaaaaataaaaataaacaatagtgaataccccgaatttcagggaaaatactaatgatattatgataatattatcaagacacaaacggaggaaaaaatgaagacagttgcttttttcgacgcaaaaagctatgaccgcgaaagctttaagcgctttgaggacgaggatataagcatcagattctttgaaaacaagctgaatgccgacaccgtgagtatggctgcttgctgcgacggcgtgtgcgtttttgtaaatgacacgcttgacagaacggttattgaaagattggcagaatacggcgtgggaataattgcgctcaggtgctcgggctataacaatgtggatttaaaggcggcgtcagggcgcgtgagggtggtaagagtgcccgcatactcaccctatgccgtagcagagcatgcggcgggacttctgcttattttaaaccgcaagctgcacagggcgtatatcagaacccgcgaccataacttttcgctggaggggcttattggcttcgatatgcacggcaaaaccgtgggaattataggcacgggcaaaatcggaagatgctttgcggatctctgcagcggcttcgggatgaatattttaggctttgacccatacgaaagccccgaattcaaaggtaaatatgttgctcttgaggagctgcttaaaaaaagcgatattatttcgctgcactgcccgcttacaaaggaaaaccaccatttaataaacgaaagcacaataaatcagatgaaaaacggcgcgtatatcataaacacctcgcgcggacaattaatagacacccaaagtctgatagcggcactgaaatccggtaaaataggcgctgcggggctggatgtttatgaggaggagaccgagcttttctttgaggatttttccgaggaaataatcccagacgacacgctttccacaattatttcaatgccgaacgttattgtcacctcgcatcaggcgtttttgacccgcgaggcgctcgacggcattgccggcaccacaatggaaaatctgcgtgctttctttgcgggcgaggagcttaaaaacgaggtgctgtagccgcagcttatttaatgcctgctgaacaattcaaaagcaccttaacccgagcatgttggtgtaaacttttgaattgttcaggtgcaaggtttt

SEQ ID NO: 1031 - DNA, 7378 bp, Unknown
  16S sequences of unknown bacteria
tccgcgttccggtcaccgacggtcacaccgccgctgtatttgtcaggttcgagaacaaaccgaccaaagaggaaattctcgaggcatgggcaaactactccggccgtccgcaggagctcggtctcccgcacgcgccgaagcagttcatccactacttcgaggagccggacagacctcagacgaggctcgaccgcgaccttgagggcggcatggcgatctctctcggacgcctgagagaagacacactgttcgactacaagttcgtcggtctctcgcacaacacgctcagaggcgcggcgggcggcgcggttgagatcgccgagcttctctacagagaggggtatctcacgaaatgaaacagaacatactgatagttggcggcggaggacgcgaacacgccatcgccgactgcctcaaaaaaagccccgactgcggcaagctctggtgcgcgcccggcaacggcggtacagccgccatctgcgagaacctgccgatcaaagcgaccgacgtcgaaggtatcgtcagagccgctaaggagctgaagcccgacctcgtcttcgtcgcgcccgacgacccgctgatgctcggtatggtcgaccggctcgaggaagagggattcagagccttcggtccgagacagaacgccgccatcatcgagggcagcaaggtcttctcgaaggagctcatgaagaaatacggcatccccaccgccgcttacgaggtctttgacaggtcggaggacgcgataaactacatcaaagcccagaacaccttcccgaccgtcataaaggcggaagggctcgcgctcggaaagggcgtcatcatcgccgagaacctcgaggacgcaattgccggcgttcacgagataatggacgacaaagtcttcggcgacgccggaaaccgcgtggttatcgaggaattcctcaccggccccgaggtctccgtcctcgcgttcaccgacgggaaaactgtcaagccgatggtctccgcgcaggatcacaagcgcgcctatgaccacgacaagggaccgaacaccggcggaatgggcactttctcgccgagccgcgtctacaccgcgagcgacgatctcgcgaaaatctgcgaccggcttatcttcgagccgaccatcgacgccatgagacgcgagggcagacccttcaagggcgtcctctacttcgggctcatgatcacaaagaacgggccgaaggtcatcgagtacaactcccgcttcggcgacccggagacgcaggtcgttcttccaaggctcaggaccgatttcataaagatcatcaacgccgtcatcgacgaaaagctcgacaccatagatatcgagtgggacgacaacgcctgcgtctgcgtcgtcgccgcgtccggcgggtatccggtcaagtatgaaaagggatacgagatcaccggcctcgactggttcgacgggaaggacgacctcaaggtctaccacgccggaaccgcgctgaaggacggcaggctcgtcacgtccggcggaagagtcctcggcgtcacagctatcggcaaggacctcgacgacgcgataaagaaggcatatgacgccattgagcacgtacacttcaaagatatgcactaccgccgcgacatcggcataaaataaaggagcacagggaagagagccggaattttttccggttcctccctcgtgatttataatgaacgaacaaagaaacaccgaccttttgaagattatacaggaaaagcagaacacgttctcgaaagggcagaagcagatctcgtcattcatcctcgggcactacgacaaagccgcttacatgaccgccgcgaaactcggcgcgcttgtcggcgtctccgagtcgaccgtcgtcagattcgccaacgaactcggtttcgcgggctacccggagcttcagcactcgcttcaggaaatgatccgctcgaagctcacgaccatccagagaatcgaaatcacaaacgaccgcatcggcgagtccgacctgctcgaaaaagtcctcaactccgacatcgacaaaatcaagcacaccctcgacgagatcgaccggacgagctttgagaacgccgtcgacgacctcatcggggcgcagatgatctacatcatcggaatgcgctcgtcctcgtcgctcgcgtcgtttatgtatcactacctgaacctcgtcttcccgcacgtcaggctcgtgaggacgacaagcggctccgaaatcttcgagcagctgctcaggataaacgacaaggacgccatcgtcgggatcagcttcccgcgctactcgaagcggatcatcaacgcgctcggctacgcgaagaagcagggcgccaaggtcatctcgataacagacagcgccgcgtcgcccatcgccgcgaacgccgacgacctcctgctcgcgaagagcgacatggcgtccttcgtcgactcgctcgtcgcgccgctctcgataatcaacgcgctcatcgtcgccatcgggcgcaaaaagcaggacgaaatcgccgagaccttcggaaagctcgagagaatctgggacgaatacgacgtctacgagaagccaaacggcttcgcgccggacaaaaacggtgacggcgaatgaccgacaagggaaacatcgctataatcggcggaggagccgcggggctcgccgccgccgtcttcgccgcggaatccggcgggagaccgttcatcgtcgaaaagaacgaccgcgtcggcaaaaaactgcgcatcaccggcaagggcaggtgcaatgtgaccaataacagcgatgtcaacacgcatattgcgaacacattgacgaacccgcggttcatgtacggtccgctgtcgaacttcacgcccgcggacacgatggcgtttttcgagcgtctcggcgtgccgctcaagaccgagagagggcagagagtcttcccggtctcggacaacgcgaacgatatcgtcggcgcgctgaaaaatcacctcgaccggctcggagtcccgattgtccatgcggcggtcgacaagatacttgtgcaaaataacgataagtcaaaagctgtcggcatttcgacgaacaacagtgacttctcagccgacgccgtcatactcgcgtccggaggtctgagctatccgctcaccgggtcgaccggggacgggtacaggatggcggaagaggtcgggcacacgataattcagccgaccgcgtcgctcgttccgctcgaatgtgaggaaaaatacgtcagggagctgatggggctgtcgctgagaaacgtccggctttcggtttttgactcgaagggacgggatatttactcggagcagggggagatgctgttcacgcacttcggcgtttccggaccgcttgttctcacggcgtccgggttcatgaaggagcttccggcgaaaaagtataaactgagcgtcgatctcaagcccgcgctgtccgaggaagagttggacaggcgcgttcagggagatttttcaaaatattctaacaaagattttacaaattcgctcggcgatctcctgccgctcaagctgattccggtgataattcagctctccgggattgacccgcggaaaaaggtcaacctcatcacaaaagccgaaagaatgaagcttgtagagctcatcaggaatttcccggtgacggcggtcaggaaaaggccgatcgacgaggctataatcacctccggcggcgtttcggtcagggaaatttcgccgaaaaccatggaatcgaagaaagtttccggtctgtatttcgccggggaggtcatcgacgtcgacgcctgcaccggcgggttcaacctgcaaatcgcgttctcgaccgcttacgcggcggcgatggcggcggttgaacggtgttttgagatcggataagctatatataattcgtcataatgacgaaaggctcgtcagaaacgagcctgccattatatgtcaggaaagggtaacattatgatcagaatcgcactcgacgggccgagcggagcggggaagtccaccctcgcgaaagagatcgcgaaacggctcgggatcgtctacctcgacaccggcgcgctctaccgcacggtcggacttttcgctaaaaaatccgggctcgctctcggcgctgacgggaagcttccggagggcgacgcggaacggctcgcggggatactgggcggcgcagacaagccgtctatcgacgtgaagctcgtcggcggcgctcagcacgtgatactcgacggtatggacgtcggtgactcgatacgtacgccggagatgtcgctcttcgcgtccgcagtctcgagaatccaggcagtgcgggactttctgctcgacgttcagcgcgacttcgcgaaaaagaactcggtcattatggacggacgtgacatcggcaccgtcatcctgccggacgcggacgtcaagattttcctcaccgccagcgacgaggtcagggcgaaaaggcggctcgacgagctcaccgcgaaggggatttcgacaaccttcgaggacgtcctctccgacatgagaaagcgcgacgagaacgaccggacgcggaagatcgctcccgccgttcccgcggaggacgccgtcattttagacaattcggcgctcgatttcgccggaacggtcgatgaagctttgcgaattattgactcaaatgttaagaaaggttgacagcatgggaaataagaaaaaacagaatttctacgagtgggcgcacgagcacctctcgaagcttctcatccggatgttccggatcaccataatcggcgcggagaaccagccggacgagggcgggctcatcgccgtttcgaaccatatttcgttcctcgacgtcatcgtcatggctgtcgcgctcaaaaggcagatacggtttatggcaaagaaggaactttttggcattcctctgctcggcggactgataaaatcgctcggcgcgttcccggtcgaccggaagggaagcgtcgcggggagcatgaagaaggcgatctcgctgctcaaagagggagatatcgtcggaatgttcccgaccgggcacagattccgcgatgttccggtcgaaaaaacactggatgaagtcaagggcggcgtaggtatggcggcttaccacgcgaaggcgccgatgcttcctttgtacatttcgacgaaaaacaaccatgtgaaactgttcagaccgattactatatatgtaggaaaaccggtcgcgtatgacgagctcgggtttgtggggggcggcacgaacgagtatgagaacgccgcgaaaatcgcgttttcgaaagttatagagctctcgcgcgacgcggcgctcgggagcggaactgtcgatcagcacaaattgctttctgacaataaagcgaatactgtatacaacgaggacaaaaagaatgggtgacgtcgtcgtcgcgaagctcgccgggttctgcttcggagtcagccgcgccgtcgagagcgtcgaaaagaccatcgacgggaggtcggaaatctatactctcggaaagctcatacataatcctacgtttataaaaaagcttgaggagaagggcgtcagagtcatcgacgattccatgctcgacgaaattttcgcgtcagcggacgaaaagcacccggtgactgtctgcacacgcgcgcacggggtcactcgggatatatccgagaaattgtcaggaatggcggcgaaaaacagctttttcaaggtcgtcgactgcacctgtccttacgtcgcgaagatacacaaaatcgcgcgcgaatgcccgaagaacgcgatcttctgcgttctcggcgacccggatcacccggaagtcaaagggttcgtcagcgagaccaacgccgtcgccgtcgtcgctcccactgccgacgagctcataaaaaaggtcgaaaacctatactccgacgacatgaaaaacgggcgcagaatcgtcctcgtcgcccagactacgcaaaagctttccgagtgggagaaaattcagaaaatttgcaaaatctcttatgggaattcacaaatttatgatacaatatgtagtgtaacagaaaataggcagaatgaagtctcgaagctatcccgaaaaatggatatgatgattattataggcggtcaggacagttccaacacccagaagctgtaccggaccagtttggaaaatttgcaattgacatttttgatagaagatgcttcctccattccgctcgagtatgttaaaccccatatgaaggtgggtatcgccgcgggcgcctcgacgccgggcgaaattattcaggaggttcaaaatattatgagcgagaacattgaaaacatgaataccgccgcggaagaagatttcgcgcagatggtagaggagtccttgaagccgatccgcaacggcagccacgtgaagggtattgtcacgtccgtggcagacaacgaaatccacgttgatatcggcggcaagttcaccggcatcattacatacggcgagatcaccgacgatccgtccgtaaagctcaccgaagtctacaagcccggcgatgaaatcgaagcagtcgtcatcaaagtcaacgacgctgaaggcatcgcgcagctctccaagaagaaaatcgacgtcgacaagaactggcaggcagtcgtcgacgcgttcaacaatcaggaagtcctcgacgcaaagatcatcgacgtcgtcaagggcggcgtgatcggcctcgtcggcggcgtccgcgtcttcatccccgcttcccagtccggtctccccaaggacgctgacctcagcgaactcaagggtcagacaaagcaggtcagagtcatcgacctcaacgaacagagaaagcgcgtagtcgcgtccatccgctccgtcgaaagagagcagagaaaagctcagcgcgaagctttctggtcccagatcgaacccggtcaggtctaccacggcgaagtcaagtccttcatgccctacggcgcgttcgtcgatctcggcggcgttgacggcatggtccacatcaccgaactcagctggaagagactcagacacccgtccgacgtcctcaagatcggcgacatggtcgacgtaatcgtaaaggatgtcgacaaagacgcaaagcgcatctccctcacctgcaagaatccggaagaagatccgtggaagatcttcaccgacaagtaccaggaaggcgacatcgctcacgtcaagatcgtctccctcaccgatttcggcgctttcgccgaagtcgtccccggcgcagacggcctcatccacgtctcccagatctcccgcgaaaagatcggcaaaccctccgacgtcctcaaagtcggtgacgaagtcgacgccaagatcaccaaaatcgatcccgagacccacaagatctccctttcgatcaaggctgctcaggctgacgacgaagaataagagttaatgcgagggggagagaagaacttttgaaaaagttcttctctccccc

SEQ ID NO: 1032 - DNA, 3001 bp, Unknown
  16S sequences of unknown bacteria
cttctgcgtcggacagggccgtgacgcagtggggacaccagttgatgatgcggcttcccttgtagatcagatctttctcatacagggatacgaacacctcgcgcaccgctttggaacagccctcgtccatggtgaagcgggagcggtcccaatcgcaggaaatacccatttttttctgctgggccacgatgcgcccgccgtatttttccttccactgccacacccgctcgaggaatttcgcacggcccaagtcgtagcgggtcttgccctcgttgacgcgcagatcttcctccaccttgatttgggtggcaataccggcatgatcgcagccgggcacccacagggcgttgtagccctgcatacgcttatagcggatcagaatatcctgcagcgtacagtccagggcgtggcccatgtgcagctgtcccgtcacattggggggcggcataacaatggtaaagggcttcctgctgtcatcgggttcggagtgaaagcactttccgtccatccacatctgataaatgctgctttccacagcctgggggtcatacaccttcggcagttcttttttcatacctgtgttctcctttttttattattgatggatcatacgtcgtagtaaatcagcggaacttcgaaatgctcctgcagcagcgtgcgcagctcctgcatctgctcctcggaaaggtccgtcttcgcaataatataaccaacccgcggcgtcatcagcagcgcaaaaatacggcgggattcataaataccgcaaaaggcagaatacgcatgcgtgcagtgctccagcgcgtcatcaatcgtcatctccgccttgtcgaacgtatagcgcacctcgctgacacggccggagagccgcctgcgcattacatatttgctgaaaaagcccagataaggataataaaacacagcgcgaaacagaaaatacgcgccaaaaagcattcccaacaccgcaatggccagagtagatgctgggtttccatcgatctccccaaaaatgagcagcagcagaatcccattgcccaaacccaacaggccaaagactgtataaaaaatccgctgggccaatacgcgtccttttcgtgtggccaatgccgtcacatggtgaaaatcggtcatcagcgcctgtgtcgtttcataattggttgtaattgtcatagtttctctctttctgccgcaaaaaaacgccctgagctgtctgcccagggcgaatagtactgatccgcggtgccacctgtcttcggggaacctccccgcactctgcttccctgtaacgggagaacccgccaaagcctacttcatcccttcggctttgaagctccgaggcgacttctgcagcgccgcagacggattttcacctgccatccgctctctgaaccgcgcaaaactgcatactgctcctcatctacgccatcttttacaataaatgaacaaagaaagtatagcctcccgtcgtccgtttgtcaaggggcgtgccaataaccttcttttttacatttggactgatggaaacaaatctcgtcaatttcgctatgcgttgattaagacataaaaacatgataaagtaaagcaaaaagaaatctgaggtggcggagggtaaaatgattgaattaagacaagaaatgccatgtgattatagagaaacagaacatgtaattagagaagctttttggaatcattatacacctgcttgcaatgatcattatctcatccacattatgcgaaattgtcctgcttttgtaccggaattagatattgttgcggtgaaagatggcaggatcattggaaattcaatgtgcttgaaatcatatatttccggagatgatggaaaatattacgaagttttaagtctgggaccgataggcgtattgctggagtatcaacaccaaggtattggtgggaggttaattgcccataccaaggaaattgcaaagaaattgggttttaaaggtattcttttgtgtggagatcccgactattatactcggcaaggctttactgcagcagaaaaatataaaatccgtaatgcagaaaatatgtatgctgatgcacttcatgcttgcgagttgtgtcaaggagccttttccaaaatgggcgggcgttattacgaagatgaaatttataatgttgatgaaaagtgcgtaaaagaatttgatagacagttttcgaacaaagagattatttatggaactcctatgcagaaaaagtttgaaatgatgattgagcgagtaaaaccttatcaagaatagcagataacttccagtttattgcgtaattatcatctgtgaatatacctccctccgtcacttcgacggagggaggtatattcaaatcactccaaacggtatttgggcgtcaatgactcccttttattttttcgactgattttcagaacagaaaatcccccttcaccaagtggacaaaaaagattccttttaagtcccacaatcaatcaagcgggatcggatcactgccgacacgttcaacgatcggtaaattagccaaaaagatagcccatcagcccaaaaggtaaacgggagcccaattatggcctgttccccgcagcatccaacagccgatacagaagatacagcgcagcaacagcggcacaggcagctggcagcggcacgcgaagcagcacgatttcccccagccacagcagcgacaggcacaggcttgcacccactgccagccccagagcggtacagacagcttttacgcccttgtccttttccgcatcgaacgcgtttcgaacgatctgctccacaaccagcaccgaagcggtgagtatggcagcgcacagcaatgcatcgcccagagaaaacgcaagatatggaggcgcagccgcccggcccgtcaggaaatccggcagccacgtcaggaacgaaggcgaaaggagaatcttaatgctccccaaaacagccgctgccaaacaaacgataccgccatattccgctgcccgacggccggcagatttatgcggaagactggc

SEQ ID NO: 1033 - DNA, 2566 bp, Unknown
  16S sequences of unknown bacteria
cgcggtgacgggcttgtcgtcgtaggtgtagccgacgatgatgcgcgcgaggcgctccttgaggtcgtggatggaagtcgccaggcagaaaatcgccatgatctcggaggcgacggtgatctggaagtggtcctcgcgcggaacgccctgcttcgcgccgcccaggccgtcgaccaggtttcggagctggcggtcgttcatgtcgacgcagcgcttccacgtgatcttcttggggtcgatcccgagctcgttgccctgctggatgtggttgtcgagcatggcggcgagcaggttgtttgccgcgccgatggcatgaaagtcgccggtgaagtgcaggttgatgtcctccatcgggatgacctgcgcgtacccgcctccggcagcaccgcccttgatgccgaagaccggcccgagcgacggctcgcgaagcgccaccatgacgttcttgccaagctgggagagaccgtctgccaggccgacggtggtcgtggtcttgccctcgccggcgggcgtcgggttgattgcggtgacgaggacgagcttgccgggagtgtcctcgcccttcaggacgttgtagtcgatctttgccttgtacttgccgtactgctcgatatcgtcgagatcgatcccgaccctctcggcaatctcggtaatcggcttgggggtaactgactgggcaatctcgatatcgcttggcatgcagacttctttctctcggcacaacttgggattcttgcacgtctgaaagcatagtctgccgtgcgcggcgtgcgctgcctgacccgaggcggtatcggtgacgggcgcagttttttcgcggagctgcactgcacgcaatcgcggccagcggggcgcgggcgggcgcgggcagcaccggcgcccgccccgccggcaaccgctagtcgaggccgatgtcgatgggcgtgcggtgcgcggcgttgtcgcggcggtgcgtgtagttgctccacgcgctcgtcccgcgcagcgaccagtcgatgggcggggtgatgaacgactccatgcgctcgagctctccgtacctgttcgcgcggtgatatgccatgtaccagatgcagtagcgctcgtgcgggtagacctcgcaccagccgtcgtcgctgccgccgcatgggccgttgcgctggcttttcgggcactgcgccatcgggcagctgtgaatggtcgcctcgagcccgcagtcgccgcagtccttgcagccgtagatgaacgccttgcccgcatgctcgatgcggtggtggaagttcggaccgccgtacttcttctccttgcggtccatgttccacgccaggcatttgcccaagcgcttgtccagcgtgagcatccagtaatggaagaagcgcgagaggcggtacgacttgaagagcctgcgcccgccgatatcctcgcggacgatgtcgagctttcgttcgttgaggcccgtcggcgtgccgtctgcggcaagctcgggagcatagagatagcatccgcccgcgcggccgtagctcgattcgggaacgagggccctccaggagtcgccgatctgctcggcacggtcgaggacctcttcgagcatggcggcgtcgaggcactggcctccgatgtgcacgcccgcgcatccgagcccgcgcgcgatggcgacctgccgtgccgcgcgctcgacgcgacgcgcccgcccgccgtcttgttccgcggcgtctcgctcgatctcggccgcgagctcgtcggaaatctcgactcccgctatcgcgccgcttctcatgagctttgccgccccgcgcgtgagcacgaagacgttggcgatgacgggcacgtcgtaatggcggtcttccaggtagaacaggagctcctgcagcttgcgggcatcgtagcccacctgcacgatgacaaagcgcgcgccggcgatgagcttcttttcgagcttgaggtactgtgggatgagctcgccttcgcggtacttgaacgggttcaccacgcagccgcagaaaaagtgcgtcggctgctccaccttcgtgccgcgtggcgtcttgacggaaagcccctcgttcatctggtgcgcgagctgctggatctggaccgagtccaggtcgaagtcggggcgtggctgcccctgccagccgctcgtctggtaatcgcccgtcatgaacagcacgttgtggagccccgcacgctccagcgcatagagctgcgcggctatctggttgcgcgaacggtccttgcaggtgaagtgcgtgagagtgcacacgccgtcctcgtccagctcgcgggcgatggcgtcggcgagtatggccggcttgccacccggattgtccgtgatggatatcgcatcgacgcgccccgtcgcatagatgtcgcgcgccacctgcagggatttctccaacggggcctcgaaggccccccgccccgggaccatctcgcacgtgacggcgaactttccccgctcgagtgccgtctccagcctgttttcgaccatgcgtcccccgcgtcctagtgtgcgcccgcgtcgaacacttcggggttgatgcagtcggcgggacggcgcccgctgaccacgtcaatcgccgcctgcatg

SEQ ID NO: 1034 - DNA, 17071 bp, Unknown
  16S sequences of unknown bacteria
atgcatctcatcacggaaatattctgccatggtaagtccggtctcagcgacacgcatacgtgctccaggcggctcgttcatctgaccgaataccaaagcggtcttattcaatacaccggatgctttcatctctgaccagaggtcattaccttcacgggaacgctctcctacaccggtaaagatagaatatccaccatgctcagttgcaatatttcggatcaactcctggatcaatacggtcttacctacaccggcaccaccgaacagaccaatcttaccaccttttgcatatggagctaaaaggtcgataactttgatacctgtctccagaatttcaacgaccggactctgatcttcaaatgaaggcggatcctgatggatacaccatttttctgaatctgtaatctctcccccaccgtcaacagtctctccaagcacattgaacagacgaccaagggtcttctctcctaccggaactgtgatacctgcaccagtctgagtaacctccatgtcacggcagagaccttcactggctgaaagcataatacaacggacaatattatgacccatatgctttgcaacttccatgacgcattttttgccatggttatcaacagtcagtgcatcttttatatgagggagattgcccttctcgaataaaacatcgataacaggacctgaaacctgtatgatcttacctttttccatcacacatgtatctcctttgttttatagtaaagtttattgtttcttgttcttctgagctctggcaccgctgcatacctcagtgatctcctgtgtaatggcagcctgtctggcccggttatacatgatactcaagtcatgaagaagctcatctgcattgttggtcgcggactccattgcctgcatacgtgcattctgttcactacagaaggactcaaccagcgcactgtagataaaaccggaaatgtagtttggaacaatactgtccacaaccgtctgtgcatcgggcacagcgaagaattcctcatgatatacatccatgggaatcttcggcataggaggtctctccataggaagcatcttccgcacttcagcaacactggtcatgctgttctccatccgtgtgaaaataacctggatctcatccagctttcctgactgaaatttttccagaagtgtctctgcgatccagcgggcacggctgaaggtcgggttctgtgcggtaaactggaaattttcctgaataggcacatgctgaccagtaaaatactgtcgtcccaattctccaacaacgaacaactctgcccattggttctggtcatccagaaattcctgggcaagcttcagtacattgtggttataagcaccagccaggcccttatcaccggtaataaccagaagtcccacttttttctgatggtccagttcttccttttcttccttctcgaaatacatatggctgacatccggcagatgacgcagcagacgtgccatcatagattgaagggtgtagaaatacggctccgtattttccagatcctgcttagcctttctcatcttggtagaggagatcatgtacatggcattggtgatttttctcgtatcctggatacttttgatcctgttctggatctctcgcagtcctgccatactacttcaccacctgactcttgtattcctttactgcatcaatgatcttattgatcagagtatcacttaagctgtgcagctcttcgatctcttctccaatctgcggatgcttctgatccagatatgccagcatatctttctggaactttttcagctctttcacaggaacatccaaaaacagcttatgggttgctgcacacagcgtgatcacctgtgcatgcagggaaagcggctcgctcaatggctgttttaacaactccatcagacgttttccgtattccagctgctcttttgtgatagcatccagatcagaactgaactgggtaaatacttccatctcacgatactgggcaagatcaatacggatacttccggctgccttcttcattgccttggtctgtgctgcaccacctacacgggagacagacagaccaacattgactgccggacgcatacctgcgttaaataagtcactctccaggaaaatctgaccatccgtaatggagatgacattggtcggaatatatgcagatacatcaccagcctgtgtttcaatgatcggaagtgctgtaatggatccgcctcccttttcatcactcagacggctggaacgttccagcagacgggaatgcagatagaatacatcacctggataagcctcacgtcccggagaacgctccagcaacagagacagggatcgataggccactgcatgcttggacaggtcatcatatacgatcagtacatcctgacctctgtgcataaagaactctgccagtgcggttcctgaatatggagccagatactgaagcggagccggatcacttgctgtagaagatacgacaatcgtgtaatccatagcaccatgtttctcaaatgtatgcaccagcttggatactgtagatgctttctggccaattgccacgtaaatacagataacgttctttcctttctggttcagaatcgtatctgtagcaatagaagtcttaccagtctgacggtctccgatgatcaactcacgctgtccacgaccaatcgggaacatagagtcaattgccagaataccagtctccagcggagtatccacagatttacgatcaatgattccaggtgctggttcttctaccggacgataatccgtagtctcaatcttgccttttccatcaataggttcaccaagcgcgtctacaacacggccgatatatccatctccaaccggaataccagccatccgtcctgtgcgggctacacgggttccctcttcaatctcagtatcttttccaagaaggatacatccaatctcattttcacgcacatcctgcaccatggctttcagaccattatcaaataccaggatttctccatacattgcatgatctacaccatcaatgtaggcaataccatcaccgacacggctgacaacaccaacctcctggctggcaatatcgacgtcatccatgcttcctttcagaatactgatgattgctttctgtgctaccagcgggccatcaccggaaatatccagggactgcagtttctgctgcagagccttcttacgtccggaagcactccagtcatactcttcgttgccggcatggaggataaatccactgccaagctctttattctgtttacgggaaatgttcagcactctctctggatactgctgtcttaaaaattttataatgccttcatactgagcatcatccggttctgttacatattcaagaacacaggaaagaggagtacgttcctcatccgacagttccatgtatgctttcaagatctcatccagagatccaagggcaccatcttcaaccagaccgtagataaactgtctggactctgtcgggaaaatttcctgaatgatatcctctcgtttcatacgggaggttgccggattttccagctcagtctgaatctgcggaaccgctttcaaaatatcgactgcatgctgcagcacttccggccgcatacgcatggatgtcagtcgatccaggtaggaattaagattcttcatgagttgattcacctgcttttgtcaaaaattcatcatacagagcttcgtcattgtgttcagactgcatagacttcacagcagcctccaggatcattccacggatctcctgttctgccttattcattactttttctttctggagggcagcctctttcttagaagtatcaatgatctggcctgctttcttatgagcatcagatacaatctgatcaaactctttacgggcatcaagctgagcctgtgccattactttagccttttcgctttcaatctgattctggtactgtacactcttatctttttcagccttggcttcagcctgaagctgttttacttcatcataacgggcattgagggcttcttcccgtttggtaataatgttattgatcggcttgaacagaaatttgcggatcaatacataccagatcagaatattaagaatggtaaagaccagattaaagtctaatcttaacatggataagttccgcctttctttaagccaacataatgatgatcatcagagcaactacgaaaccatagatagcggttgcctctgccagtgcggatccaagcagaagaagcttggtgatcttaccttcagcctccggctgtcttgcaactgcctcagtagccttggatgttgcgataccgataccaataccggctcccataccagtaagtactgcaatacctgcgccaatagcgattaatgtagacataataacattctccttttccttcgttgtcttttgctttttgtctttttactccattgattccttaataaacagtcccgtaaggaatacaaatacatatgcctggatcagtccatcaaacagatcaaaataggcactgaatataaccgggagacctaccggaaggacatactcgatcagcttcataataacaaaagctccaagtacattaccaaaaagtcgcatacacaatgacagcggcttgatagccacctccatgatgttgatcggagcgaccagtgcgatcggctctgcaaaactcttcagccaccgctttactcctttttcatgaataccggcatactcaatcagtacaatactcatcaatgccagtgcggctgtcacgttcagatcctttgtgggaggcttaaatcccaggataccgatcaggttggcgattccaagatagatcaggaccgaagtcaggtaagatgcataacgctttccctcttctccaacgattccctcgctgatgccctgtatccaggtcactacaaactctaaaaaaagttgtctgcggcttggatgttccaccttcagatttctggtcagcaaaaatgctgccagcagaaataccgccatgataatccatgtgacaacaactgattcagagatcccgattccaccgattgaaaagacggtttcacaggttagctcttcagtcagtgtttcgcctaaattacccataactgcacttcctttctaaagaattctttgctttaaagtccttgcctcaaagcctgttacctattataatacgaaagaagagaaatgtataattgttttttttgaccattagtatagattttatgaatattacatctacatttttttgacgttaaaggggtaaatggaatggacatcagttttgattattataaaattttctatgaagtagccagggcgaagagtatttcccttgctgcacagcatctgtgcctgacacagccgactattacaaaatatatccagaatctggagcagaatctgcattgtcagttatttatccgttcccgtaaaggtgttacacttacttctgagggacagatgctcttccgtcagatcagccgtgctgtacagcaaatgtcgagagtcggaaatcttttgcaggattttgtaaattgtcaaagtggtaagatcaatattggagccagtgaactcaccatgagatattatctgctgccttatctggaatcattccgtcggcaatatcctaatgtgaatctgcagatccatgcgttctccacaccgctgtccttatccgcactgaatgcaggaaccattgattttgctgtgtcgatcacaccacttgacggagcagaacattttctggtgactaagacttcggattttcaggatattgtagtggctggaagtcagtacacttttttacagaacaagaccctgacactcaaggagctgactgcctatcccatcgtgtgtatggaaaaaggaaccacaacacgaaaattctgggacagcatcttcaaacatcatggtattgaacttcatcctaatattgaagtaaactccaacgatctgatcccgcctactgttctgcataaccttggcatcggatttgttccttataaatttgccagatccttcttactgaattatggactgattcaactgtctctggatattgtaattccaaaacgggagatctgtattgtacagaatccatctcatccgctgtctccggctgccaaaacactgctggatatgatgatcaccggaaatgaatataccgaggaacagtactctatggaaaatgaacattttcacggcgatgtaatctaaataagaattcaatgaacatttgtttgctttttaataaacactatgctataataaataaaactaatgttcggtcaacaaggagataaagctttatggcatatggaaagatcactcccaagcagcaggagatacttgattttattaaatctgaaatattgagcaaaggatatccgcctgcagtgcgggatatctgtgaagcggttcacctgaagtccacatcttctgtccattctcatctggagacactggagaagaacgggtatatccgcagagacccgacgaaaccaagagctatcgagatcatggatgacagttttaatctgtcccgccgtgaggtcgttaatgttcctatggtaggtactgttgcagccggtcagccgattctggcgcaggagcatattgaaggatatttcccgatcccggcagaatatatgccaaacactgattgcttcatgttgaaagtcaaaggtgaaagtatgataaatgcaggtatctttgacggcgattatatcatggttcgtcagcaaaatgtggcatctaacggtgaaatgatcgttgcacttgtggatgattctgctacggttaagactttttataaagaaaacggacactatcgtctccagccggagaacgattccatggatccgatcattgtggatgatgtacagattcttggaaaagtatgtggcgtcttccgtattttcctgtaaaacacatagtatctgataataagatcccggaattaccagtccataatgatcggacatcaattccgggatctttcttttcctgtttatttttttaactgattcaggttactctgtactccgcgaactccaacggcaattcctttttttgatacggttgcattactatccacaggggtctcttccatataaacagttccatcctcaaaatgaagtaccaaaagtgcatgataagaattcgtataatccccgaccacataccgacacgactctgcattataataccataacacacctgtttccagtgaactgtcacttacatccagagtcgcagactggtcaataccttttgatatcgtgatgtttatctcatttccgccggattctgctttgatgatttccatggcttctgcttctgctgcagtccagtcattatggatctccgcataatagatggtataatctgacgcatcgaccagaaaataataatcaaatgtattgttgtcagaaaatctgaggaaccatagattcaacagctctttcgtattctcatcattatcagaatcataagtcagactgtaatatctggcaaaacgaatatcatcctcccagtctgtgacaacatcataagaagattttcgaagcgttttgtaatcacctactcctaaccatgggagcatgccatactctgaagctatcatagcctgattgtagacattttccagaagatctgtattcagacgtgcagtatctgctttcatatcactgagcagcatcagatttgcttcgcttttcataaaagacagtgcctgaatattttctataatcccaccattgctctgctccagataagaaaagtgtgatcggtctgatacggtcaccttgttaagacggcttttatcaagtccacggcttaaatatcttgggagaaatactgctcctactgttacggtcactacgcagagcagactgatcaaaaataaaagcttttgattcaagagcttattcatcgtccgtcgcctccctttcgcagtgaaaccggattacaataaccgttcctttacctggtttgctgaatatcttccatcttacatggtgaagtgccaggattcggctgcaaagcgtcataccaagaccggcaccgccctcccttctggctctggatttatcgatcatatagaaagcttctgtgacccgttgtgattctcctgcatccataccacatccgttgtcactgatacataattcatatgtttttccataatttcgtccaagaatctggattcgaccgcctgttcggactgcttttctggaattatccaacaggttcacaaggacagataacagtaggtcccgttctccaaagatttctccttcttccagtccaagatggagagcaatcttccgttcttctctcttctctctggtaagccttacggcctcgttcaccaatcgttctacggagatcatgcggaactggtactgctgcttgtctgtcacgatcagctccagcagtttgaaggacagactttccagtctcttaccctgctgaaaaatatagttggcggcctccatagtctcttcttccgtcataggagtggaacgaagcatatctgcatatccgatgatcgaggtcagcggtgtcttcagttcatgtgcaaaggaagcggtaaaatcctcctgcttctttgcctgcgttttcagttcctccatcttttcagagattgtatctgccatatggttaaaatcactggcaagttctgcaatctcatctccgccctgttctattgccctggcatccagttctcctgaagtgaattgcctggtagcatgagacaaatgggcaatggacatggtcagaaaatgagtcactacaaaaaccagtactgtcataactgcagtcagcgatagcatcatgaccacataccagtcataattgctttcccgttcctgataaatataggaaatatcggtaatactctccaacagatagcttttcttattgatcactgagcgacaggcatacacaagccaggtcttggttcccagccggtagacttcatagctgctggtatgcttatcatccaacacattgagcaccttcatgtcctgagcacttgcattggcactttcgtagagcagcttcttttcactgttgtagatccggtaaatatttccagatccagacaggttctgggtcacattggctcccatgaccggaatcaactcatcggtctgatacataacacccagactgttcagattcatctcaaaggcaagctggaacatctggttgtcccattctccgtcatccagtgctttctggtaggaatgctcaaaagttctctggatcatccatgttccaaagatactgaatgacagcacgaacaaaattgtaaatgaaaaatagatcttccagaaaaatttcatacaatcatgtctccagtcggtatccgatcttatacacggcacagatatgtttatcccatcccagcttcttcttcagacgctgtacatgaagatctacagtccggctatcaccggtatattccttttcccacacctgctcatagattacttcccgatacagggcaatgttgggattgcgggcaaaaaacagaagcaattcatattctttcagagtcaaaagaatctgctgattatcctgcataaccgtgcgggaagataaatcaatatccacatccagtatatgcagcatacggccaatcttgttacagcggcgcaagaccgcttccactcttgccagaagttccacaatctcaaacggcttcgccagatagtcttctgctcccatcttcagaccctttaccttattttccgtggagtccatagcagtaataaagatgaccggaagctgaatgctcttagcatattccatgagctcgtaaccattgatcttcggcagcataatatccaggaggagcagatcataatgtccttcctccatccggtcagccgcttcctgtccgtcataagcgcattcgcaggcataaccagcctttttcagattcatgcggatcagattggcaatcggctcctcgtcctccgcgatcagtatttttaccatgacaccttgtactctctttcgtaattgatatctgaaaaataacaggtcagtgcatcagaattgtatcgcatgcctgtttcctaagtatatcaaagcattttcagaaatgattcaatcatttatacaaaaataatttttactggagcagatccagcagtgtttcgtatactgctggattttcctttataacaagtatcaggctctcttttgcctgattcaactgatgaaaaagttttctcacatcagattgttcgcttctttttgtctttgtagaccgcaggaatttctgctcatcataataataacgggaatccagctgtacaaccaggcaatctatcccataatcaggaatctcatcctgcggatagaaatatccctgtcgtctggcatcacacagcagattctccgcttcaatctcatcgttggcatagaatacggtaatatgcggatagtttcttgcatagcgctgctttggcagatgcatcatattctgaataaaagaggacagttccgcattggttcggatccgattggtcagatgataggtctgcatctccggcagatgtctcattgcttttaccgtactccggtcaaattcttcctgcgagattatatcttcacagtcgctggaaaagatcaccggctgctgaccacatgcctgcaatatcatctgcagattttcttctgacagcaaatgggcttcatcgatcagaactccattatactctgacagatccatattttcatagatctgctcatcagacagataatcaattctccgcagccgttcatgcaggatccgccattcttttcctgctcttccacaatggatcagacatactttctgacggccggacaatttcatggccagatcatagaggagcaatgttttacctgttcctggaaggccgataaaccagtaataccctgtatgtttctgtcggattccctttaggatctgccgctcaatatcccgttgctgaaaagtaagaaaatattcttttcgaaggaatcttccagcctccgtgatcggtgaaatcagataaagctctgcctgaaacagatcctcaacatctccattataatcagcgctctcctgctgcagatcctgacacaactgttcccagtccgcctccacgatatgatcgtgattggtcaggcgaaccagacggttctggctgctgatgtatgtataggaacggatggtcctgccaagcactgacagataataacgattctggatcaattgctttcgaatcgcctcatcagagacaatcccgcttttcagttccagattcagaatctgatcttccttgatctggagcaggtcaaattctttgccaagcttcggaatctgaaaggaatagaaaaaacgaagggcatagacttccttcatatgcccttctaactgtttcaccagccccttcatgctgttcagttcccattcctttatcttcagaaaatagtcgcgctccgataactgtcgctccagcttctgtaaatgatggatgttctgttctcttgtgagtgcatagactgatattgctttcatttagttatccttatacgtttttgatcagatctgacagcttttcaaatatctgatctgcataaaattgcttgatctcatgacgggatctgcctgtcacctctgtatttacttcataagtatatggcatattctggatacgaatgcagaaaaacatcctcccctgtacactgtctgcattatttgggtctacattccctgttgtaccggtgactccgatagaaatatctgtatgaagcttttcctgaattgtcttcgccatggcttgtgcacattctctggaatagactccatattgacggagtacctgttcatctacacccacaagcatttttgtctcattggagtaagtcacataacctccgggaaagatggctgatgcaccttccgtatctgtaatcatggatgcgatcagaccggaagtacagctctccatagtcgaaatcgtcgtctgtttttcaatcagggtctttattaccatatccgtttgtttctgttccatatgtaccttcttaaaatccaagattatcatttacaagaatcacatggattcgtcctgcatgtctggaatatcttgtaattaaaaactgacagcagattgtatccggagatttgcagtcaaagcattttcctgtttccttacatggagttttgatattaaatcgctgtgcatttattggagcagctacacttctggcgcgtttcatagctccgtccaggtcatcacagaccttgttcattcctacaatacagactacctttttgggaccctgtgcaatgcaagatacacgattggaatttccatcaatatttaccagaataccatcattggagatagcattggcactggtcaaaaagacatctgcatcataagatgccagaagagactctcttggctccatcttatcgcgatccagatagttataatttccttttttcagtgcatcgatcagcccaatctcatgtgcactcatacacccacccatggcaatggtacttccttcaggaatcagctccagagcttttttcagggcttcttccttgctttctgcgtagtatcctgtcatattgcgggaatctagtcctttgattactgtttttgcaagacattcatttcttttttttatattttcattcatgttggtatcctccatctttgttggaaaacgattttaccgtatttattttatcaaaaatatatggcttttacaatgttactttccacttgcgacctggctgagaagttcgagcagttctttttctgaacgcaccatataatcaggttctgcgcttcctgttggcctatgatttctgtgattgtaccagatggcattccatccggctcccttcgcaccttcgatatcattttcataagaatcacccacataacagaactcctggggttgaagcttcagtttttcctgcacaagctcaaagatccgtcgctccggcttggctactccgtgttctcctgatataaatacatggtctttcggaatccatctggttgcctccagagcacggattttatcccactgatgaccggaaggtccatttgtgatgattccaagcaccatcttatcggagagctctttcagaaattcctgcatggcttctgtcatatggatcatatgctgatgcttctcataaatctcctgaaaatgcagagcttcctgtgcatccatgttctttccataatcatggaatgcattctgaaaacgataaacatacatatcttccatggacatttcgccgcttaaggatttcgcatacacagaatcgctgtatctgcggctggcaagaaatgcaccttccagatcaagttcttccagcggatataattcgtggaatgcttccttaaaaggccctgataaatcatataaagtgtcatctacgtcaaatacgatcgcttttatcatctggttttcctttcagctgtcatacgtttctataatatctatcgacaacaataaccgtctttttccctgtgaatctttcttctcacaaaccagaagcagatcacctgcatcacaatggttgcaatccaggaagccggatatgagataaacaggaatcccagtgaccggtgtgtcgggaacagtccatagatccagagaatccgcatgccgacggttccgataatagacagaatcataggcactgtggaatatcccattcctctcaaagccccagggaacagatccatcagaccgcacagaaaataggtcatagttgtgtaggacagaatctccataccacaggcgatcacgtccgcctgttcgctgtagatgtgcagaagctctggtccaaagaaataagcaatgcttccaagccccagtgccacaacaacagacaggatcgcacaatcgatcaatacccgatccattcgtttcagtttttttaccccatagttctgactggtaaaactcatgcaggcctgggtgaccgagttgacggacacatacagaaatccgaaaatattgttggctgctgtatatcctgccatggaaatcgagccaaaggagttaaccgatgactgcagcatagcattggacaggttgatgacggtactctggattccagccggaataccaacttcaaagatctgtctcagataacgggatctgatattcaattttcctggtcggaactgatagctgctctccgaacaatacaggcaccgtaataccagaatgcaagaaatcaactgggagatcacagtcgcaataccaactcctgccacatccaggtgaaactgaatcaccagaaaaagattcagtatggcattgatcacaccagatatgagcaggaacagaagcggtcgcttcgtatcgccaacagctcgcaggatcgccgcaccatagttatacagcatgaaaaatggcatgccgcagaagtaaatccgcatatataaagtggactttgctattacatcatccggcgttcccatgagttccagcgcaggctttgccatcagaagtccgatcactgccatgcccacaccgcttatcagtgcaaatgcaatggctgtgtgaaccgtctctgacatttcttttgatttttccagtgcgtaatacctggctgcaagcacattagctcccagtgaaattccaataaacagatttgtaaatacattgatcagtgcagttgtggaacctactgctgccagagactggcttccgctgaaccgtccaaccacaataatatctactgcattgaacatgagctgcagaatacctgacagcatcaacggaatggcaaaggagatcagcttatccatgagcgttccattgcacatgtcaatttcatatttattctttttcatcagccctgctgaccatttgcctgacggatcatatcttccacaacaatatcgtagatctcgccgatggtgttgcagtattccaggattttccacggttcattagtgtggaaatgaatcttcaccagatcctcatcacctgccgcgattaggctgtttccttcaaaattttcagtgataaactctgcgatctcatcctcgtcaaggtccttatctcttctgtcgatcaacaactgtgtatcataacgatatgcaaactgatcgtcttctgcatcaattgaatgtactgccattttatctacctccaaaagtaaaattctgtttaatattttaacacaaagcggtcagttcttccagttccagataaggattatctcgcatttttcaccgatatcttgttcagataaatataaaaacatatattaagcatgattccaaccatcgttgaaaccggtgctgcaagtccgatcattgtaaggcttgcatctggctgaatactcataaaataagcaaagggcaatcgtaccagaagtgtctgaatcaatccctgtgtcatgacccagacggttttattatttccgttaaagtagccgatcatgctgaacagaacggctgtcacaatggtctcaagagcaaagcctttcagatattcgtaccctctttgaacaactgctgcatccgtggtgaagagtcccgtcagcagatcacctctgagcatcacaaggacaaataccacacagcctacagccagtccaactccaatacctgtgaacatagactgttttgcacgcttcagttttccggctccaacattctgagatacgaaggatgccatggattgcatcagggcacttggtaccagcatggcgaagttcacgattttgcaggcaacgccgtaaccggaggatgcttccagaccaaggcgattcacgaaagcacataatgccagaaatgagatctgtgtcagacactcctgtaatgccagcggaagtccgatctccagaaatctgctgcactgacaattaaagtgaaaatcctgttttgtaatggtaaatggcagtttctttttcatcagcaagattactgcaaacactacgcttaatgcctgtgccatgaccgttgcgattgcagctccggctgcatccatatgaagtcctgccactaagagcaaatctccaaagatattgacaatacaggcaaccaacacgaacagaagcggcgatttactgtcacccagtccacggaaaatagccgctaacagattatacgccacgataaataaaataccgcctccgcagatccttacatagctggttgtgagatccacagccactgccggtgcctgcatgagcactgagatcggtcgagcaaatccaaccatgatcacaaataaaatcacagagatgattgcaaagacaatggcagaaccgcctatgacggaaccaatctgttccgggcgtttttcgcccagatagcgggcaatcagaaccgtaatacccatggcaagctgaatgactacgaaagtcaccagattaagcacctggcttccggtggatactgcagaaagacctgatgtggagccaaatcttccaactaccagaaggtccacagcaccataagcagcctgcaggatcaatgctcccagaactggaaacatgaaggcaaccagttttttcaaaatacttccttctgtaaaatcagattgattacttgtcaaaatgactcctcctctcactcatgatctcataaaatttctcgatagttcggaccatacattcagcatcctcctcagaaatagcatccatgcacggaaggatcatgttaaatgtctcttcattgtatttctgagataactgctttcctctttccgtacttgtcacataagtgacacgtccatcatcatgagatgcaattttcttcagatatcctttggtctccatctctttgaccgtgcgggtcacacctggccgcggcagatttaatgcatcgctgatgtcagatattttcacctgaacatcctgcttctccagtgtctcaatcacatccagataatggatataggatggcataacaccctctggcagtgtgggcagcatctcccgtgtccgctttgcctgataacaagcatcaaacattttctttaacgtttcaatcctcataataaaaaatcctcatataattaccttcgttaa

SEQ ID NO: 1035 - DNA, 14840 bp, Unknown
  16S sequences of unknown bacteria
ccagacgctcccacagcaggccaatgagaatgaaacaactgccctgcagcagccggacagcacgccggaagatctccccccggcacagccccccgttcaaccgccggaaacatcctcagacaacgacgaaacagcagagccgcccagcggagggagtacagctccggaagacggcagcagctccattgtcccgggcggcggcatcagcgatacgctggttcccgccggagaaacctatcgcgccgtatataccacggatgcctctgccgccagcatccttgcccaatacagcaccgtcacgttcaccgctgtactggcggatggcgttcaggcagtatattacgtcgtcccggccgagtcggcagaaagcgtctccgctgcgctttcggaagccggcatttcctgcagcgcctacacagaagatccttctgttctcagcagtgcatcggaagcgctcctgtatatccttctggactaagcctgtatccaaaagaagcaccccggctttctttcatgaaagaaagccggggtgcttcttttcggaagggggaacgcaggatgttatttccccatcgcccgatactcttcaaaggtatccacaatctttttctccggcggcgctgtcaacagcgacaccaccaccagcacgacgcagttgagcaggaaagcaggcagcagttcataaagatcaaacgcaccgcccaaaggccgcaccaggaacttccagacaaacaccaggacgccaccggaaatcatgccgcaaagcgcgccccatttattggcccgcttccagaacagcgcaaagagcactaccggaccgaaggccgcgccgaaacccgcccaggcaaaagaaacgatcttaaagaccgagctgtcgggatcccgtgccaagaaaatcgcgatcgccgcaatgaccagcagcgtcgagcgggcgatcagcatggactgcttttccgtcatcttcaccttgaacacgccccacatcagatctttggaaacactggaggacgccgccagcagctgggaatccgccgtggacatggtagcagccagaatccctgccagcgtgacgcccgcagccagcgccagcagcacgccgtgctctgccatcaagctggagatctgcacgatcactgtttcagaagcggagccttccagcacaggcagggcgccgacattggtcatccccaagcccaccatgccaattaaaacggcgataaacatggaaatcacaacccaaaccgtggctacacggcgggaagtggtcaatttttgctcattttcaatcgccataaaccgcagaagaatatgaggcataccaaaataaccaaggccccaagccagcgtggagacaatcgtcagcggcccatatggcaccgccgcattcgaagcagcgtcataactggcgttcatggcgaggtagcccggcagcgtctgggcattctgcaccactgcgtccagcccgccagccacgttcacgccgaagcacagcaccactaccaacgcaattgtcattacgcagctttggattaggtcggtggtgctggctgccaggaatccgcccaaggcggtgtagcccacaataaccaccgcactgataatcatggccagcatataatccataccgaacagattggaaaacagtttgccgcacgcggcaaaacccgatgcagtgtacggcacgaaaaacacgatgatcaccaacgccgcaaaagcgcgcagcaaatttttgtcatcaccaaagcgcttggagaaaaactccggcgcggtaatggagtccgtcagcgcgctgtaacgccggatgcgcttggccacgataagccagttgaggtatgtacccacggccaggccgattaccgtccaacccacatcgcagatgcccgtcagataagccaggcccggcagacccatcagcagatagctggacatgtccgaggcctcagcgctcatggctgtgaccagcgggccgagttttcggccacccaaataaaagtcgtcggcgttgttgtttttctttgcaaaacgcacgccgatgtacagcatcagtaccagatagaccacaatggcaatcaaaatacagatggttgcacttgtcatagttccttttctctcccttctgcaccaaaaaacggtgcggtgcaaaaaaatctgatatagtataccataatctggcggcataatcaaatcttaagaaccaaaacaggcaaaagaaggtagattttttgcagacgctgtgatagaataggcacgacaggtttccacaccctgtccaagcgcccctccggccgcctgtacgcaggccggcaccggcgttcgttcgagccgctcctgtttcccaaaaggagcggcccgttctctaaacaaaaaatggaaggaacatcgaaaacatgaaacattactctgtccgccagctgacgctggccgccgtcatcggcgcactctatgcagtcctgaccctcaccgcttcggtctttggtatcacctacggcccggtccagtgccgggtatccgaagcgctgtgcgtgctcccattcttttttccggaagccaagtgggggctttttgttgggtgcctgatcgcaaacctgctgagtccttacggcgcgccggatatcatctgcggatccctggctacgctgctggccgcctgcatcactgcaaagctccccgcaaaatggaaatggtttgcaccgcttccgcctgtactttccaatgctttgatgattggcgctctcctggggtggtatagtgcaggtttcggccctgcattccctgcggcattcgcgttcaacgcgctgacggtggggttgggcgaactgatcgcctgctacgtattcggcggcgtactgctgatcgggctgccaaaaatccacttcttccgccaaatgcttccggcagacaaggtataaccgccgcgcagtgcgcggcctgattttaatgaacaaaggtgaggtttgaagctcatgaaagtaagaaaagccgtgatccccgccgcgggcctcggcacccgcatgctcccggtgaccaaaaccgttcccaaggagatgctgcccatggtggaccgccctgtgatgcagtacatcgtggaagaagccgtatccgccggcattgaagatatcctgattatcactaatcgcggcaaggacgtgatggaagattattttgattacgcccctgaactggaagataagctgcgccgggccggaaaagacgatctgatcgaactggttcacaagcccgctaaccttgccaacatcttttttgtgcgccagaagcagactcttggcctgggccacgctatctatcaagcccgcagattcgtgggcaacgaacctttcgccgtactgctgggcgatgatatcatccgtgccaaagaccctgtgatcggccagctgattcgggctgcggaaaaatatgaggcttccgctatcggcgtacagcaggtcagcgacgaagccatcagccgctattcctccgtagccgtgtcagagctggaagagcgggtgttttccgtgtcggatctgaatgagaagccttctccagaggaaaaattttccaattatgccattttgggccgttatgttctgacacccgaaatcttcgatattctggaaacccaggcccccggttacggcggggagatccaactgaccgacggccttgagaccctgtgccatcaggagcgcatggtcgctgtggactttgaaggccgccggtatgataccggaaacctctgcggcttcctggaagctacgctggaaattgccctggatcatcccgaaaccggcgattggctgcgccggtatatgaaagaaaaagcattgcagttttaaatgcacccgcttccgccatttcagcggaagcggggtattttacaacacggcctccaaacgataaagccgggaaagcaaatctgctttcccggctttgcgcttttctcatgattcttccgcacagtgggcacaagatgcttccttgaacagcgccggatcgtaagcgattccgtttttatcataataatcttttaccgcagccttgacagcctcctccgccagcaccgaacagtggagtttataggccggcaggccgtccagcgcctctaccacggctttattggacaactgcaacgcctcctccacgggcttacctttaatcatctccgtggcgatagaactggtggcaatggcactgccgcagccaaaggtctcaaatttgacatcacagataataccgtcgtcaattttcaaatacattttcataatatcgccgcacttggcattacctacttcgcccacgccgtctgcgttttcgatctcgcccacgttgcggggattgcgaaaatgatccataactttttcactgtataacatagtttctcgctcctttttccaattctctccacacgggagacatctttctcaaataggccaccacgtctttcacctcgcggatgatcgtatccatttcttccatggtgttttccttgcccaaactcagacgcagagatccgtgcgccacttcatgcggccggccgatagccaacagcacatgactgggatccagagagccggaagtgcaggccgatccagaggatgcgcaaatacccctgtcgtccagcaaaagaagcagcgactcaccctcaataccttcaaaacagaaattgacattgcccggcaggcgatggtcacagctgccgttcagggcactgtgaggaatttgggagatccccgcgatcagatgatcgcgcaaagtgctcatatgggccgcatcgccgtccatgtgggcgcaggactcttccagtgccgccgccatccccacaatagcaggcagattttctgtaccggcacgcttgccgcgctcctgggcgccgccttcaatcagggagcgcagcggcagcccctggcgcacatacagcgcacccacgccccgcggaccgcaaaacttgtggccagacagggacagcatgtcaatctgatccgcctgcacatctaccggaacatggcccacagcctgtacggcatccgtgtggaagatcactttcttttcccggcacagcgcgccgatctcacgaatcggctgaagggtgccgatttcattattggcatacataatggtcaccagtgctgtatcttcccgcagcgcagcggccacatccgacactttgacaatcccttcttccccaacaggcagcaacgtgatctcaaagccctcctccttcaaccgttccagcgtatggagcaccgcatggtgctcgatggccgaagagatgatgtgttttttgcccctgcgcgcgccccagtaggccgcgctgcggattgcctggttgtcggcctcactgccgccggaggtaaaatagatttcccgcacggcggcgccaatgcatccggcgatgcgttcccgggcactttgcagcagttcgttggcttcctgccccagcgtatataagctggagggattgccccagtgttcttccatgcaggcaatcatggcctcttttgccgcacggctggtctttgtggtggcagcgtgatctgcatatatcatggttctttcactcctgtaaagtcgcatgcttgtgcgcacatgtaatttaactgaaattttattacctatattttttataggaatattaccatattcaacctataaagtcaataggtttattaaattttggaaagcggggcatgccgccccgctcattgccgctccagcgcctgccttaaacctgctgcgaaccgtcctcggtctgccgcaggagctgggccagagtgataccggaaaaatagtcccggatggtgcgttccagccctttccaaatcgggagcgtcaggcactggtccgcccgggcacagtgagtacggtccgcctccagacatgccacaggggccagcgatccctccgcagcctctaaaatgtcccaaaccgtgcattccccggccggcctggccaagcggtaaccgccgccttttcctcgcagcccgatcaccaatcctgccttcaccagactttttatgatggcctccatatacttttcagaaatttcttgtttgcgcgccacatctctcagaggtaccaaatcctctccctccgccgcggccagttctgtcatgatacgcagcgcatagcgccctttggtcgagatcatcatacgccagatccctccttgcagttggtaaacctattatactttagggtttattgctttgcaagggcatcgcgtttctttctgtattcttttcttattgtgctttctttccgggtgctttatactgaaccagagacgaaagaacaggcatgccgcaccgccgacagcaaacggcgccaatcaaaccggaaaaagccgcctgtcaaccggcggttgacaaaaagacaacccccggttggtggcttttactatcccttttggctatactgaatcccgaaaggagggcgaaccacatgaccgttggagaacgcatcgcccagctgcgcaaggaacacacactttcacaggaagaactgggtgagcagctcaacgtatcccgccaggcaatctacaaatgggaacgcaatgcctccctgccggaaatcgaaaaactgattgccttgagcaaactcttcggcgtttcggtgggatatcttctgggtgtggaggaacagctcgcccagtccgatcctgcaaccgcacccggcgaattgagcgaacagcagacgaaactggcggaagaaattgcttcgcgctacattgccgccctgccccaaacagcgaaaaggaaaaaatggccctatgtcgcagccgctgcggccgccgtcgcagtgctgctggcattgagcaccctgaacgggaagttgaaccggctggatcagcagtatcagaatctgcaaaacagcatcgtcaacattcaggataccgtatccaaccagatcggcggcatttccaaccgcgtggaagaagtattgaagagccagaatactttaaccgccgactacagcaccgaattgctccgcgccgatccggcggcaggcaccgtgaccttcgccctgcgggccgtgccaaaaacctatgtggacggcatgcaggccgtattcagtgcagataccggcacaagcacctccgccgaaacgaccgataccaccccctccggccaggaattttccgcagaactgacctgccctctgaccgatgatatccgcctcaacgtcacctttctcagcggtgacaaaaaggaaacgcagcttctgatgcagtatgacagcctctacagcggttcctttccctctgtttccgtagaggactataacctgatgtatcacaaggtgagcagcgacgggctcctgacgctgcaggggcagttttttacagccgacgacagccatttagccgctccgatcataaacgaggcgcttccgccagccgagatcgtttcactccgggtggggctgtttctcaatcagcgcctgctggcctgggcagaacccggcgcccagcccgacagcttccatggcgattaccccggaaccttctactacctgcccatgctggagatcacgctgcacccgggcgacctgctctgccctgccgccgtcattgaggacagctgcggccgcacgagcgttgtgcctggttcctggttctggtgggatcaatccagcggagaactgacctgggcggattacgaagcggttaacgctgcagatcaatctgcagaaaactggcaattttaacgctcataaaaaaagcggactgcactgcagtccgcttttttctttttccttttcacagccgatctgccccaatggtatacagcagcggctcgaagtccacaccttcccgcataggcgttccctgcgggaaggtgcgctcagcgcagtcccggacaaattttgccgccagcgccgcagcctcggtcagcttccggccccgcaccagcgctccggtgagcacgctggaaaatacatccccggtgccgtggtattctccaggaatacgatctgtcagggcaaactccacctgtccggtttcccggtcaaataccgccgcgcccaaagtatctgccccgtcgctgacgccggtaagcactacgctccgcgcgccgccgccggacagggcgcggcacagttctgcatatcccgctttgtcccggggcagggtttcataatcctcccccagcaaaaaggctgcttcggtcaaattcggcgtaatcacatccgctttttccgtcaggcggcacgtggcctcgcacatttcgtcggtatacgtcacataacgtacaccgttgtcacccatcaccgggtccacaacggccagagcattatccttgcgaaaacgacggatgaaatcctccaccacgccgatctgctcagtgcagccaagaaaaccgctgtatacggcatcaaaacgcaaccccagcgtctgccagtgatccatggtctttttcatttcttccgtcagatcgaggaaggtaaaatcaggaaaggccgtatgggtggaaagataggccgtgggcagcacggcgcactgcacccccatcaccgacaggatcggcagggccacggtcagcgaacagcgcccaaagccggaaatatcatggattgcggccaccttcggcgttgccgtcatccaaaaccgcccccttttgcttcgctgcagcgaaacacaaattttcgtatagcataccacagcgcgctgcggcgcgcaaggaaagaattcccggtgccgcattgccgcagcaccacagcaccatcagcaaaaggacacgtcgcagcaccctcccgccgcacaacgtgtccctcacggttcttgatctttcacatatttcataatatcgcctacttcacaatccaaaatccggcagaacatatctatggtatgagtgctgccgctttcggggcgaaagcattcgcaaggcattggctaacagatcattttcaatcataaccattcgatccagtgcataaaatgcctgacattcgatgcacatgatgtaatcgaagcaggatggttctatatgcagacctggtgatacatctgaaaacaggatctcccgtttttgctgtcgctcctttttacgataccaatctctggctcgattttttaatactgttttgcaaaagctgtcaaacttaccctcgatccgattgatgtccgctctggaatatcgcacaatctcaccccctcccgcacgatctcatcgccggagatgggttctttcttgtttagatactaactaatgcgttccctcgaaacagcgttgccacatttacgaaaatttttaatatgcttgttgtcagtaaaatagcaggatagcttattaaccgccctgccccctgcaataacaccgaactctgctgttttatgatacagagattcgcatatcggataaagacaggctcccgtgcaatttttatcacacgggagcctctttcaaatcagatgggtattaggctatcctgctcctgttgtcaatacaggaaacttacaacttgtctatgaagcgggctgttgtacctagactaagcattttcaatttactgatactggttccagtccagattcgcggtcaattaactccaccactcatggtctccatcttcatttcgctcaaatggatagccattgcaaccttccgaacagtaaggtaataccataacccacattgtctggaatgttttcatgtcagggagcgaatcctgttcaactttccagcagtcggcctagcacagggttgatcatcgctatgtaattgtagcattggggcgaaacgtgccatccgtatagccattgacccagccccgcgcggcagcacgttcaatgaatttctctgctcaatgtccatgaatattggagaagctatcatggctttccacgttaggccgttcaaatccggcccagatcattgcaaattcagcacaagcgatagacgtattggaatcaaagccctctgtagaacgacctttgataatttccaatcttgcaattgtggaatagccatattgcaccacatggcctcgattacatcgctaaatgtgttcgtgctgctttcgttgactgtctgcacatctttgcccaacaatcaatagacaatcaattaaagcgatttctgaaaccgctgtgtcgttgtctgggtattccttatccagcatggacgccaccgcatataccgaacatatgatacaccaatccaatatctacattaaataaacaaaatttcttaacaagtttttcatacaatcaaacgatttatacagattaaaatctacgaaagaagcccacacaggacggcctggatcagcgcctattcctatgcgggcttactttttcttcttctggagcgagcattcttcgcaggtaaatcaaagaaatggattctaattcatttggaagtacttagcccaactccagccgtgtatccgtcagatgataccatcttataccgtctttttcgtaaggctggaactcgccagtgacagtgatctccgcaccaagtgcgggatagtcctccggataaacactatttgcttccagaataaactccatgccttccgcacagcaagcagtggcatctgaaacgatacaggcgtaagctaccggatcaggttgcatcacgttgtcgacaaccatctgataggctgcaaattcaccgctcatctttacggttttaccaatataatgctccggatcataatagagcatattatagagctcagagtaaaccactgtattgcttatcaccgtcaggtctacatccacatcgctgtcagtgccctgcgtcggctcgattttctccgtaggctgcgccgcgtgattcgaggcggccgcactatctgtttccgccagcccagcatcggaaatagcagcttcatcctcagcgttggtgtgagaagggattccgcaggcgcaaagggcggctgcgatccatagggacagcatccagcaaaggattttcttcatactttcccccctaaccgtaaacagccgataattgaaaagagaagaaacgccgccatatcaaccgttacaatcgttgaacctaccggtgttcccgccagcacagcagtgaagattcccaaagctgcacagcaaaccgacagcagcaccgcacagatggtgactgtgcgaaagctctgatagactctcatggcagacaatgccggaaaaattacaagcgcggaaatcaatagtgaacccaccagattcattgccaatacaatgacaacagcaatcataacagcaatcaacagattatagaatttcacctttattcccacagcttttgcaaaattctcgtcaaacgttaccgcaaaaatcttgttgtagaacaatatgaacgtgagtaaaaccaaggcagaaagcgccacgcatagtccaacctctatttctgtcaacgttaagatagaggtggagccaaacagcgtgctacacacatcgccggaaagattagaggatgtggagaacagattcatcagcagatatccgatcgccagcgcccctactgaaatcatcgcgattgcggcgtcacctttgatttttgcatgctgtcctgtgcgaagcagtagaatcgcgcaaacgacggtaatccccagtatcagcggcatatcgttgtgcaatcccagcacagcggccacagccatagccccaaacgctacatgggacagaccatccccaataaaggaaaatcgttttagtaccagtgtcacccccaaaagcgaagcacataaggcgatcaatacacctaccaccaatgcatagcgcacaaacggatacgcccagtacaaagctatcttttccgcagcagacatcactgcacctcaccttccttcctccatatcggagggaactcagcctgatacgctgcttttgttccgaaaaacgtggtctccccaatatgcagaatatggctggcatactgcaatgccgctgaaatatcatgcgagatcatcacaacagtgattccgtcccggtcattgagtttttgaacaatagaatacatttctgctgcggctgtgggatcaaggccggaaacaggctcgtctaaaagtagtattttccgtgcggcgcacaacgcgcgtgccagcagcacccgttgctgctgcccaccggaaagtgttcgatagcagcgtttcgacagcagggaaatctgcattttctccatggattccaacgcaagctgcttctctcttctggtataaaaaggccggccttcgcatcgcccctggcagccagagagcacaatttctctcacggatgccggaaaatccgtttggacggctgtctgctgcggaaggtagctgatttccttcctctgcaacccatcacccattatcacactaccgctgacaggaggctgaagtccaagaatcgttttcatcaaagtgcttttaccagaaccgtttgctccaacaatacagagataatcgcccgcagcaacctcaaaattaagatctttcaggaccgctttcccatcgtagccaacacaaagcccctcacacatgagctgtgccatgtgatcacccccttagcccaacgcttccttcagcacgccaaggttttgttccatcactgaaagataggtgatcccattttttacatcatcggcagcaatgctctgcatagaatccatagtcaaaatcatctggtcttttccatccgtattctgcaccacagtatctgcaatcttatgctgcctgccttcaatggtcaacacgcagggaagattcagctcattcacctttcccgaaagaaaggatactgtttcaaagctcgcttcgctttctgctgaacagccagaaaaggcagcataataattcagcccataatcatcgaccaggtaacggaacgggaagcgatccccaaacaaaattgtttttcgtgccgcaccatccacagccgtctgatacgcagtatccagcgcggaaagcttttctacataagccgtggtattggcagcatattcatctttgtgatcgggatccaacgcttgcagcgcgttagaaatcgcaccgcaaagcaccttggcattcttcactgacagccaaacatgttcgtccatttcttcctcatgtccatgctccatcatatgttcgcaaatttcttcgcccgttaggtcagccgggaaaaaggttggccaagaacgctccggatcaacaattgcgtcaaagctttcgttgctcattctaagatgaaaatgctctgctacggcagattcgatcatatggtcattgaactcgatatatgtcggcgccgcagactttgcatccgttttctcaaaacggtacatcgcagctttggttccacttgaccagttctggatagcatatccgacatatcggtagtcagatgcagcatttgtgccatcctcataggtaaaggtaatgtggttatcttggatcgtcacatccaccagatcagttttatagccggtttggtagtatgctttatattcctcggcagacatttcaccagagtccgccatcgcggcaaatgccttgtccagcgttccatcaagcgcgaacaggtaagccgactgccagctgcccgcccagtcggaaagacttctgtcctgtacctgattatcttcgaacgtagaaacttctttgctatggtcatgttccacttcctgcatcccctcaaccatttcttcgggcttgacaccatctccaaggatatccagcagattgatgactttcatatttttgttagtagtctctttcaacgcatcctcaacccagtcatccgattcgccgcccacatatataaaaagatcgcaatccgcaattttaagtatgtcatctgcggtgggttggtagctatgaagatcgacgccattatctagaagcatcgtcacattagcattttctgcgttgtcccccaagatctcacgtacccaatcatattcaggaaagattgttgtaacgatatttagtttgtcagcctgatcttcactgctttttgcagcattttcgcggccgcaggcagtgaatagaccaaccatcatcgtcagggcaagaaacagcctaaaatactttttcatagggtaaataaacctccgaatttcaaaaaatagatacaactgtacaaaggcggcggcgcactgccccaaacgggcagactcctcctttaatcgtgttctattcaattcgaaagcttcaccttgagcgaaaccaatgtaaaggtgcaaacaaattccgaacagagcaaaatgaccctatgcatgattctggtaaccgccaatgggatcaccgcagcagcgcttgccattccaaagcttttaagcaaatgttcacaagcagtaatatgatggcagacggcacagtccttaccagtgcaatcatggttggactgaaccgcaatataaacaaccgaggacagcataacaaatgccagcacagcggccagcactccagtcagccagcgctttttctgtatcatgccacccttacctcacttttgtatttgatcggtctctacccacatcatatctcctctgatgatccaacgttcttccgctccccatccttttcctccacatgcgccttcagcgttttccctggacggaatacgatccttctccggaacgaaccacgcagttttggtctgagataaaagcttccaaatcccgatatcttaacggataccccagaactaatctcttccatcaatatatcaaacagtgcgtttgtcaaacgctttgcctctacctgtgtaatattcatacggcgtgctaatacaaggcccagttctttcttattcatgcttctactcccctcttttatgacctattttattatttagtcatatacggaacaaaaaaataaaacgcgataacttataactactttaataatatagtaattatatctgt

SEQ ID NO: 1036 - DNA, 16761 bp, Unknown
  16S sequences of unknown bacteria
ctctcaatcggtttaatctggtgttttcaagatgtccttatgaggagtcgcccttcccggctccttttctttatgccttgttcgcagtgccggtcagcagcgccatcagcgctatgcgcccggtgacctttaccttgccgtaaatattggaaaggtgcttgctgagggtggcaggcgccaggtatagcttttcgcatatctcctcggtggaaagattgcggcataccagctcggctatctcggtctcccgcttggtcaacccatagccggccgccgcctgccgcaggcgctcggcgggcagcaccccggcggcaggctccgccagcaggtcatagaatttccgctccagcgcatccttcagcgtgtgcagaatatggaactccttggggttaaagtcagccttgtcccgctcccggaacagcgccaccagcgccagcgggcggtcgcggtactggatggtagcccccagcgcccagtaaaggcggcacggctcccagatattccggtagatatcggagtggatccagtcctcggcggcgatgagatccgactgcaaaaagacggtgctgtgcggcgccatgatgaactgcgaccagcggggaatgaccgcgcggtccaaaaaggggttcttcttcgggtcgttcggcatgcccacggtgtatggcgcggcaaccgtcccctgtccgttctgccgcccggtctggaagaccaccgcgcggtcgaagggaatgagggtgggcagctggtcctccagcagcaggcggcacagctcctcgtagctggcggtatagtggatgcgggtgatcatctgggtgaggaactgccattcatagtcgaacaaagaggaacgcatcggcgggggaactcctttccgggtattgggaagtattgctacgcaatattatgtagaaaaccgcacgaattgtagcataaccacaagaaaaatgcaagagaatgcaatagcattgattatttcctttcaaatgggcgatagctataatagcggtagtcagctgggcgctcctgtggcaaaggagcccccgctgctgacccatcggacatggaattttccctgtaacctccttgatttgggggcgctccggcggttaccgcttattgcagaggaagcggtaaaaaccgccggagccgctttgccccaagggcatttttatgtacggtgcgctatattcccatcgaaaagaagtataaagaacgcgccaagaaaatggcattttaccggcagggagggacaagatgaaacagctccgcaagctcctgtggcttacccagttggggatctccctggttaccccgccgctgctgtgcatctttttggcccacctggcccaaagcaaatggggctggggcggctggatcatggccgtcgccattgtaagcggcctggcggcctccgcgtgcagcgcggtgtccttcctgcactactgcaaaaggacggctgaaaaggaaacaaagggcgaaaagcccatcgcctataatgaccacgaatagcttttggccgggtaggggacaagcccccggcaaaggataaaaggaaggtgctgaaaatgaagctccaaaaatcagttctaagggaagtccggcatatcgccatcggtacagcggcctgtgccgcggtgcagctggcggtctttgcgctgctgggccggctggatgggacggtatggctgggcacggcggtcggcgccggctttgcggcttttaatttcgttctgctgggctttaccatgcagcgggcggccggcaatgccgaaaaggccaagcagatcgcccagttttcctactcggtgcggatgctcctcacctgcgtcgttgctattttgggcttccagctgggtgcactcaatggtgtagccacggcgctggctctgtttttcccccgcatcaccatctcggtcatgcagcttttggggttctataaaccgcagccaaaggaggcgcccgccgcatgaatgtagagatcaatggttccccgattcttaccacactgcccatcttcggcggcattccccttacggccacgctggtggtcacctggagcatcatgctgctgcttaccctgttctgcatttggctcacccatgatctgcgggtcgatcatgtcaccacccggcagaccgtcgccgagtttctggtcaataccgcccagaactttgtagatagcaatatgggcacgcgcttttcccactatgcgccgtttgtggccgctatcttttcgctttcgctgctttccagcctttccgggctgttgggggccttttctcccacggccgatctttccaccgagctggcctgggcagtactggtgtttgtgctcatcaccgccaccaagatcaagaccaatggcattggcggctacctcaagggctacacccagcccatcgcggtgctcaccccgttcaatatcatcagcgagatcgcgacccccatttcgatggcgttccgtcacttcggcaatatcgtttccggcactgtcatcagcacccttatctatgccgcgctgggagctgccagccatgcgctgttcgggctgctgcccggcgctgtgggggatctcctttcccggatcccattcctttcggtcggcattcccgccgtgttctcgctctacttcgattggttctccagctttatgcaggcgttcatcttctgcatgctcaccatgatgtatatcgcggcagccgccgaagcggactgaccggctctacataacccaaaaaccatttcagggaggaaatcactatggaaaaagcaatcattctggcaggctgcgccattggcgccggtatcgctcttatcgcgggcatcggccccggcattggtgaaggctacgccgtcggcaaatcctgcgaagccatcgcccgtcagcccgaatccaagggcgaggtcacttccaccatgctgctgggctgcgccatcgccgagaccaccggtatttacggctttgttaccggcctgctgctcatgttcgtggtgccccgcatcttcatcggacttctgtaatccatcattaagggaggagaacgaaaccatggatcatctgtctcttgtcggtatcgttccctgggaattcgttgcccagatcgccaacctgcttattcaggcggcgctgttcaaaaagtttttgtttaagcccgtacagggcatcatcgccaagcgccgcggtgaggtcaacgccatctacggcgaagccgaagccgcccgtaccgccgccgaggaggaaaaggcggaatatgaccgcctgatgcgggatgcccgcgtggaggccggccagattgtcaaggccgctgccgagaatgccgaggcccgcgcgacacagctgatccagtcggcgcagcaggaggccgctgggatcaaggaaaaggcctatgccgagatcgaccgggaaaagaaaaaaacagtcaatgagatcaaggataacatctccggcatggtcgtcgccctggcggaaaaggtcgtggaaaaggagatcaacgccggcgatcagcaggcgctcattgatcagtttataaaggaaatgggtgaatcggcatgacagcgaccggaaaaacctacggcgacgcgttgtatgacctggcggcggaggaagcactctgtgatgagctgctggagcaggtaaagctgctggcccgcctgttccgggaaaatccgcagtaccccgccctgcttaccagcccggatatcccccgggaggagcgcctgcgcctgataggggaagcactgaccgggcaggtgcacccctatcttgtcaattttctgagtcttttgtgtgaaaggggcagacttcccgcctttgccggctgcgccgcccgctacgagcagcgctggctggaagaccacaataccgtccggggccgtgtcagctccgcggtgccgcttacggagacacagcttacggcgctggccgcccgcatggaggaaacgctgggcaagcatgttctgctggaaggcaccgtctccccgccactcatcggcggcatccgggtggagatcgacggccgtgtgtgggatggctccctgcgcggccgcctggaggagctgagcggcctgctgcgcggcgccgttctgtaaacatcaagagaaagctggtggttccatggaactgagaccggaggaaataaccaaaatcatcaagtcccagatcaaaaattatgaaaaccacatcgtgcaggaagaggtcggcaccgtcctggtggtcggcgatggtatcgcccgtgcctccggcctggaaaaatgcatgatgaatgagctgctggaattccccaatggggaatacggcattgcccagaacttagaggaaaataccgtcgctgtcatcattttgggcgatgacggcggcatcaaggaaggcgataccgtccgccgcaccggccgtgttgtgtcggtcccggtgggcgaagccctcatcggccgtgtcgtcaatgccctcggtgcgcccatcgatggcaaaggcccggtggaagccgccggctatgccccggtggaaagccccgcgcccggcatcatcgagcgtcagcccgttaccgtgccgcttcagaccggtatcaaggccatcgacagcatgatccccatcggccgcggccagcgtgagctcatcatcggtgaccgccagaccggcaagacctccatcgcgctggataccatcctgaaccagaagggcaacggcgtcatctgtgtctatgtcgccatcgggcagaagcgctctaccgtggcccaggtggtggaaacccttaccgccggcggcgcgatggactataccatcgttgtttccgcctccgcttcggagctttcccccctgcagtacatcgcgccttacagcggctgcaccatgggcgaatactttatgaagcagggtaaagatgtgctggtggtctacgatgacctcaccaagcacgccgtcgcttatcgtacgctatccctgctcatccggcgcccgccgggccgtgaagcctacccaggcgatgtattctatctgcattcccgcctgctggagcgcgccgcgcgcctttccgaggaagagggcggcggttcccttaccgcgctgcccatcatcgaaacccaggccggcgatgtttccgcctacatccccaccaatgtcatctccatcaccgatggccagatcttcctggaaaccgagctgttccattccggcgttatgcccgccatcaatcccggcatttcggtttcccgtgtcggcggcgccgcgcagatcaaggccatgaagtcggtttccggtacccttaagctggtttacagccagtaccgtgagctgcaaagctttgcccagttcggctccgatctggatgccaataccaaggccaccctggcccagggcgaacgcattgtagaggtactcaagcagcacaacagctccccggtggaggtcatccatcaggtggctatcctgtatgccgtcaccaagggcttcctcaaagaagtcccggtggaaaagatcagcgagtacgaggcattcctttatgaaacactggatgcccgctatgccggtctgctggcggccatccgtaccgccggcaagctggaaaaagaaacggaacagcagcttgcttccgccatcaccgagaccgtttccgcgttcctcgcggcgctgtaaggggagggaacaccaatggctggagcctccatgaaaagcatcaagctgcggatccacagcatgcagaatacccggcagatcaccaaggccatggaaatggtggctgcctccaagatgaacaaggcgcaggaaaaagccctgcgcacccgtccttactatactaccctgcacagtaccctcagcgggatcgccgctgccacccgcgatttttcctccccctacctgcaaaagcgggaggaaaagcgggtctgctgcgtggccattgccggtgaccgcggtcttgcgggcggctacaacagcaatgtgctgcggctggccgccgaaaccctcaccggtgaggaaaactgtgtggtgcccatcggaaaaaaggcaggggaatacttccgccaccgcggcgtcgaactcctcaccgaggactggctcaccgccgagaatctttcggtgggtggctgctttacactggcgcgccatttggcggggctgtaccgctccggtcaggtggatgccatcgagttggtctttacccgctggaacagtctcctttctcaagagccgtgtgtgctgcggctgctgccgctgccccagccggaaaagcccgcggcaagtgacaagcgccctgcggatattctctacgaaccggattgcgccacggtgttcaatgccatgatcccggaatacctcggcggcgtcatctacggcgcgttgtgcgaatcgctggccagcgagctttctgcccgccgtatggcgatggattccgccacacagaacgccgatgaaatgatcgacaaattgaacctgcagtataaccgcgcacggcagggcagcatcacgcaggagctgaccgagatcgtggcaggcgcggaagaataacaaataaggagtgaagcatcatgtcctcccaacataaaggcatcgtaacgcagattatcggtccggtactggatatccgctttgcggaaggggaactgcccgaactgcgcaatgccatcaccattcagcatggggagcaggtcatcaccgccgaggttgctcagcacatcggcgataatgtggtgcgctgcatcgccatgaacagcaccgatggccttgtgcgcggcatggaagctattgataccggtgcgcccattagcgtgccggtgggcgaggaatgcctcggacgcattttcaatcttttgggcgagcccattgatcacggcgcgcctgtcaaggccgaggaacgctgggccatccaccgtcccgccccctcgtttgaggatcagcagggcgcgaccgagatcctggaaaccggcatcaaggtcgtcgatcttatctgcccctatgccaagggcggcaagatcgggctgttcggcggcgccggcgtcggcaaaaccgtcctcatcatggagctcatcaataatgtagcgacccagcacggcggcctgtcggtattcactggcgttggcgagcgcacccgtgagggcaatgacctttacaatgaaatgaaggaaagcggcgttctcaataagaccgccttggtctacggccagatgaacgaaccccccggggctcgtatgagagttggcctcaccggccttaccatggcggaatacttccgcgatgtcaagaatcaggatgttctgcttttcatcgataacattttccgctttacccaggccggcagcgaggtctcggccctgctgggccgtatgccctccgcagtaggctaccagcccaccctggccaccgagatgggcgccctgcaggagcgcatcacctccacccgcaagggctccatcacctcagtgcaggcggtctatgtccctgccgatgacctcaccgaccccgcccctgccaccaccttcacccatctggatgccaccaccgttctggatcgtgccatcgcctccctcggcatttacccggcggtcgatcccctggattccaccagccgcatcctctcgccggagatcgtcgggcaagagcactatgaggtcgcccgtgccgtccagcgcattctgcagcgctaccgggagcttcaggatatcatcgccatcatgggcatggaggaactctctgaggaggataaaaagacggtcagccgcgcccgtaagatccagcgcttcctctctcagcccttccatgtggcggagcagtacaccggcatggcgggcaagtatgtcccgctgcgggagaccatccgcggcttccgcgagatcatcgagggccgccacgatgacctgcccgagggcgcgttcctgtatgccggcaccatcgatgaggtggtggaaaaggcccaaaaaggagagtaagccatgacggaattcccgcttgatatcgtcacgccggatggcgagatcttctccggccgggctgaaagcctgcggctgcgctccatcgagggcgatctctgcatccgtgcccgccacaccgattatgtcacggcgctgggcatgggccccgccgaggtcatcaccgctgggaataagcacattgccgcctgcatgggcggtatggtctcggtgctgggcggccgcgtcaccctcaccgccaccaccttcgagtgggccgaggacatcgacaccgcccgcagccacgcctcagaggaacgggccagggaaaagctgggccacggcgatctcaccgataccgagctggccctggcggaagcccgcctcaagcgcgccctgatccgccagcaggtcagccggatgaagtaaccgtcccggctgcttttgccccaaatactgccgcccccggccattgcggtcgggggcggctttggtgtgccgggcggcgaggaggtttaccggcggccagtggggtttatgcgctcgtattcaaggcgctgctgggtgagcgaaagctccgcttcgctgagcatgtcctttaccgtgccggaaaccagtaccagatggccgctgctgtaatccgccgtaataattacgggggaatagcaatactcattccagtcactatccggttccatcaccagctctatggtaaaggtaccgtcctcattctcggtatagctcaccagcccgctccgggctatggtgatgtaatggtaaccatcctcgtagtggatatcccggtaggcatcccgttcggcgtcgtagtagcggggctccaggtacacctcccagtccaggtgctccttggtggcgccaaaaagatatccggcaaactgctgcaccgccttggcatctacccaggtgtgggtatcatcggtgtaggggtattccagccccttggcttcgcagtaatagtacatcgctttcatcactgccgaaaggctgatgccggttttttcggtaaaattgacgctgttgcggaagatcacccaggtatcaatgacctcctgcacctgctcattcggcacctcgatgaaggaatactcctcataacggtagcggggcacttccaccatggtggaggtgttggtaagcatatcggcataattgcggatcgtgtttatcaccttctccagaatgctttccttcctttccaccggggagagggcaaaggctgtggtagcggtaagggcggccgccagaaacaccaccgccactcgggtgacacccttcttcaggccgtgcagtagggtctctttggtctcctgccagcccacctgccggaaggccaccgccaccacattgctgctctcctgtgccggctgcggcgcgggggcggcttcggcctcctgctgcttcatctgcagggcctgctccttcaggtattccttcagcgcgatcttgaggaggagatcggcatactgctcctccaacgctttttcatccagcggataattgttgttactcatggttcatacctcctttctcgatataggcggcaagcacttttcggcgggcccgggtcaggatctgccgcacattgcccggcgccaggccggtcagccgggtgatctccttcgaggacagctccagcgtgtaggcgtagttcagcaggtctatctcccgctggggcagtgttttcaggcactcccgcagcagctcggcctgctcccggcggatgaggagaagttcggtatcctccgtgccgctcagactctcggcccagtcccgctcccggccctgcgcggcctgccgctcccggttggttttgtggtaaaggtcgatgctggcggtctgcacaatggtgaccaggtaaggcagcagctcctctgcggggatctgccgcacccgttccagggagcggatgacccgcagcatggcctcgtgcagggcttcctcggcccggtcggggtcattcagtatcttttgggcgcagcgcagcaggaaatcccggtggcgctggtacagcccggcaacaaattgccggtcggtgtcattttcgatagccatgataaaaagcggcagcatgatgttttctcctttgggtcgtttttccggaaaagcggggccgaagggacggagggctttttgccttacaccctatataaccgctcccgcccgacttttgtgacacggtttctgacctttttttagaaaaaacgcctgccgcgggcatttcccggcaggctgttggcctctccattgtagcaggtcggcccacccctggcaaggcggctgggggccttctcgcgcgcgttcagcgcgcgcatacgcatacacgcacgcgagggccgggggcgacttttttgcggcgggccacgcaaaaaggacttgacagcgccgccgggactgtggtaaaataatcgagcagctaaaatggacgattagctcagctggaagagcatccgcttgacgtgcggagggtcacaggttcaagtcctgtatcgtccaccaaaataagacgcctatatgggcgtctttttttcttttggcggaataggggaccctatgccttttaattggcagccgcaatccaaaacaaaaattaaatataatgtaaaatataaccgctggcattttgtcagcggttgttacttatcatcttcaatgtatgtcattacatcttcaacattgcattcgagtatcttacaaaagacttcaatggtatgtgtactaacactttcattacgctttaatcgcgtaatttgtgcaggactaatgttgtaagttttgattagggcgtattgggtgatgccccttttcttcatcgttttccatagattatcaaaagaaatcatatatcgacctcctattgacatactaaccaaattcggtatataatgacattaaccaatatcggttattaatggggaaggagtagaataccgtgggcaataaggtaatcggcattattatagattttgttaaagcacttcaatcaaaagatagggcacttataagcattgaaagtaaccgaacatataagatatccagtccaaaataccttttgggtcaaattcttcgccaatatgaattggaacaaaatcaatattattattccacctctgctaagctgctgtgggaaaagttatcaacccaagatatgtggaattactcatatagacaatatgttcactgtgaaaatgatgaaccagtgttgatctcggagtatacgggaaatgggaatgttccgcgcgaaaaaagaaaagtccaaagaggcgatggctttatttttcgtgatgtttttcatgacgaacatatgattccgattagcttgattattgatgagctggtatcgctgccaaataccaatgaagatagcgtaaaagctattttagggaatatctatatttgtaggatattaaaaagtgaggatagaacattgccaataaaatataaacgtccttttgatctgcaggaggtaatcagcatgtataatgctgcaggaatagaaataaacaggagggcataaaaagatgagttactcaaaaagttatttagcaaaaatgcgagggaaaaaggtaaggtttattatcgttaatagcggtgcagatcttaaagtccaatttgtaagcagctttggtgattataaagtaaaagtgtcaaacaacagttcatttgcaagtgaaacgattaaaataaaaattgttgattctttcgccgatgttaaattgcaaaaagtgacttcattcggagactttgaagcatattttgattaatcaagtatttctgcaacgaaaaagacgcctatgggcgtcttttttctttataaaaataacttatattctctattctattctcgcatgcgcgtagatgtgtcgtcaatgtttgcgtgaagtgcttttcccccgatatgccttctccctcatctgtaaactttccttaaaaattgtctctgcattattgacgaacatccgttcttgtggtacgatatacgatgaatcattatgggaacccatgccctaatgcgataaaaacaggacttcgggaaagggggcttacgcgtgcgtatcatgggcatcgatcccggctatgccatcgtgggcgtgggcctggtggattacgataatgtccgcttttcgctggtggaatacggcgccatcaccactcccgcggagctcccctttgagacccgcctgcggcagatctacgatgacatggtgggactcatcacccagtaccgccccgatgccgtcgccatggagcagctctttttcaccaccaatcgcaccaccgccattgccgtggcggaagcgaggggagtactgctgctggccgcggagcagcagggcgtgccggtattcaactatacgccgctgcaggtcaaatcggcggtggtgggctacggcaaggccgaaaaggagcaggtgatggaaatgacccgccgcctgttaaatctcaaatccgtgccccagcccgatgacgccgccgatgccctggccattgccatctgccatggacacaatggcggcagccgcctgcctaccgccgccctggcggagattcgcggcggcaaccgccgcggcaaacccatcacctacaaggagaagaaaacatgatttacagcatttccgggctgctgcgccaggtggcccccacctactgcgtggtggaagcctgcggcgtcggctaccagtgctccgcctctacccacaccctttccagtctgcccggccgtgggcaggaggtcaccctgctgacccacctgtgggtcaaggaggatggcatggagctgttcggcttttccaccgagcaggagcgccgctgcttccggatgctcatcggcgtttccggggtgggtccccgggtggccctggccatcctctcggattccgcccccgaccggctgatgctctccattgccgccggggatgccaaggccctcacccgcgcccagggcgtcggcgccaagctggcccagcgcatcatcctggagctgagggataaggtgagcgatgaggacatcagcatgccgtttagtgatgagatcggcaccatttccaccgtggcggaaaccatccacaataccgctaaaagcgaggccatcagtgcgctggtggcgctgggctacggccagaccgatgccgccgccgttatcgcccccatggaggattcgttggctgtggatgagttgatccgccgggccctcaaatcctttacccgcggcaagtaaacagctttgaatttgtgcagggaccgggatacggggcgcagcccgccccgccctgcgggcggggctaaagcggactgccgtccgcttcggcggtcttcggccgccgggtctgcgcccgcggcttcctgcagcaggccggttccggccgcaggcaaatcgtcctccggacgattttggcggggctgcgccccgcctacggcggctttgccgccggcctgcggccgcccggccccgcgccaaccaccaactactcccaaagagaggagatcacaccatgttcgatagaggcaaacagccggaatacgaaatggacctggaaaaccgctttgtcgccccggaagtgaccgaaaacgaccgggataatgagctttccctgcgcccgcacacgctggaggaatacatcgggcaggagcaggtcaaggaaaatctctcggtctttatgcaggcggcgcgcctgcgcggggagccgctggaccatgtgctgctttacggcccccccggcctgggcaaaaccaccctttcgcagatcatcgcggcggaaatgggggtcaatatccgcattaccagcggcccggccatcgaaaaaccgggcgatctggctgccctgctgaccaacctcaatgaaaatgatatcctcttcatcgatgagatccacaggttgaaccgcagcgtggaggaggtactgtaccccgccatggaggactacgcccttgatatcatcatcggcaaaggccccagtgcccgttctatccgcatcgatctgccccggttcactttggtgggagccaccacccgggccgggcagctttccgcccccctgcgggatcggttcggggtggtgttccgcctggagctttacaccccggaggagctttcgcagatcgtcacccggtcggccgggatcctcggcatcccctgtgaggccgagggagccatggagctggcccgccgcagccgcggcaccccccgcatcgccaaccgctttttgaagcgggtccgggactttgcccaggtgcagggcagcggggtcatcaccccggagatcgccgccgaggcgctggaacggctggaggtggattacctcggtctggaccgcatcgaccgccgcatcctctccaccatcatccagaactatgccggcggtcctgtggggctggataccctggccgccgccgtgggggaggagagcgtgacgctggaggatgtttatgagccgtacctgatgcagatcggctttttgacccggacgccccggggccgctgtgtgacccggctggcctataaccacctccatctggaggccccggacggtgtgccggacgcccagatgacgctgtcattctaaccatggaaaaacaaaaacgctgccgctggccgtggcttttggccacgctggcccttgtgcttattctgctgaggctggactattggaatcttttgccccatagaacttataccgcggagcatttcggcattgaaacgctgcaaagcccgctggacgccgacggcgacggcatcgacgattacaccgacctgatgctgggggcccggcaggatgccgaaaaccaccccacctatgaccccggctactttgccgggggttacccgccggaggacaggggcgtctgcaccgatgtggtgtggcgggcctttcaaaacgccgggtacgacctcaaggcgctcgttgatgccgatatcgccgaaaataccgggctttacccgcgggtgcagggcacgcccgatcccaacatcgatttccgccgggtccccaatttgcgggtgttttttgagagatatgccgaaagcctgaccaccgacccctacgagatcgccaaatggcagcctggggatatcgtgacctttggggggagccacatcggcatcatctccgataaacggaacagggacggcatcccgtacctcatccacaacagcggccagcccaaaagggaggaggacgccctgctgcgctgccaccgcaaccaccccatttcggggcacttccgctggaatggcggcaccgaaaccaactgagaaagcgagacgaaatgatatgggcagactgtttggaacagacggtatccgcggcattgccaaccgggatctttccatccgccgggcggaggaggtaggcatggccctggccgaggtcatccggggagagcaccccgaaaagcgccccaccgtagtcatcggccgggatacccggctttccggagagatgctgcaggcggccctggcgggcggcctgatggccggcggcgccgatgtggtgctgctgggggtggttcctaccccggcggtggcctacctgactgtgcagaaaaaggccgcggccggcgtggtcatttcggcctcccacaatccctacgagttcaacggcatcaagatctttggcccggagggctacaagctgaccgatgacgaggaggacgagatagagcggatgctgctggaccgggatatccccatgatcccggtggagccggaggagataggcacctgccgcgaggaccgtgaggcggcggtgcagtatgccgggtatctggcctccaccgtgccggaaaagctgaccggcatgaaggtactggtggattgctccaacggcgcggcggtaagaacggcggaggagttgttctctctgctgggggccgaggcgaccatcctgtgcgatgcccccgatgggaccaacatcaaccgggagtgcggcagcacccatgtggagcacctggccagcctgatggccgagggaaaatatgacctggcggtggcctttgacggggacgccgaccggtgcctggcggtggatgaaaagggccatgtggtaaacggcgaccagatgatcgctatttttgcccggcagatgaaggcggagggccgcctgcccggcgatgccgccgtggtgacggtgatgagcagcttcggctttttccggttcgcacgggagcagggcatccacgccgagaccaccaaggtgggcgaccgctatgtgctggaaaatatgcgcaaaaacggctacaacatcggcggggagcaatcggggcatatcatcttccgggagtatatgcccaccggtgatggagagctttcggccatccagctgatgcgggtgatgaagctgaccggcgagccgctgagtgtgctggccgggcggatgcccgtgaccccgcaggtgctgctgaatgtggcggccgaccgggatatgaaggaggcactgcacgaaagccccgaaatggaggcgctcatcgaggagtgcgagcaccggctgggcgataccggcaggattttgattcgggcaagcggcaccgaaccgctgatccgggtgatggtggagggcgaggacgctgccctcatccgggagctggccgagcggctggcggccgggtgtgagaagctgctgaagtaaaaacaggggcaggccgaaccacctgcggcggaatgttaaggtgataatttgcgatcacctccggtggggaaagccttttagatatcatagtttgtacgcctacccggcgggggcatccttttgtgccgacaaaaggatgcaaaaacggttcagggctgcgccctaaagacccggtcgccctgctgcgctggatacgaatttatttttaggctaccgcccaaaa

SEQ ID NO: 1037 - DNA, 8798 bp, Unknown
  16S sequences of unknown bacteria
aaacagagctccgtaaccagccttacggcttcgctccgcgcgccgatgggaacggtgtcgccgggcgattcgattccatttgatttccagctggaaaatatggaaaaagtggcgacagtagtgtttacttttgaaaaagacacggatctggagtataaagatatcgcgggaaaaagcggtttctcatctctgggcgtcaaatgggacggtaatacgggaactgcagccctgagctatctgaaagatggcgcaggcggcagtctgacgcagaaagcgctgacggacatcgccaggattcagttcgagacagaaagagacagcggcgtggtgggcattcgcctgaccggcatcgaggcggcgggatatgattccgaaggaaaggcggttcgcctgacagcgggaatcggcgacagcagcgccagcgtgacgctggcggaaaagaaaacgtatgacctgaacggcgacggcaaagtagatcttctggatatcgcttatgctcagctgtactataaggtcagcgaaggttccgatcgctgggcggacgctgaaaaatgcgatcttgacgggaatgaaaagatcgatattcaggatcttgtcattcttcttcagcatatcagcatcggataaccccgggattttatcagggatgatcttgggacagggcgcgctgtcctgacttctgtaatccgaaatttttaacagagtgaaaaacagcattgtttttcgctctgttttttgaatatataaacagggaatattttgcgcggcggggggaagaaaaagtgcttctgcggatcagagattctatctcagaatttcacggagttcttccgaatcggcccatatcagatcataaatcccgggattacggagcagatgtttccatgcagtgtgtgtcgcttttacaaagctgtcgttgagcgggatttcctcttcgatgagcgggcagaggtacggcagttcattatcattgtaaagcatctgcagttcgccgtcttccgtgagatacggcatgagcggaaatgtgcggcattgaatgggacgcttatcccggacgcagtagggaggcgttttgcattttataaaaaagaccggtccttcccaggattccggaaaaccgcattcttccgcattctgtgtactccattcgagccagtctctgccgtcctcgaagacagcttcttcaccgggcagcaggtagattcccatatcgtcactctccgacagacagcagacagcgccgcataactggccgcagtcgaaatctgcaggagatacgctgtcgagcaggcggtagattgcccggtatgtctttttttgaattatatttttatccatttataaatcacctcgatgacattataacatagcgctgcatatccggtaccgcactgaaattatccgcgtgtttgatcggataaatttggacgcagccgctgtatcgcgctttttattctgtacgttgggtttcattccgctaaaggcaggcaatgccgcgttctgttttggccctcggcgacagacgagtcgtaacggaaaaaagacgaagactgagccgtagtcgccatggtatcttagctctttctcagcgatccgccgaacgaagagagagcgggagcatagaaagactcatacctggccctcggcgacagacgagtcgtaacggaaaaagacgaagactgagccgtagtcgccatggtataattatatcacgcaacggcggcattttccgtctccgcaggcgtgcggcgggtgcggctgctgccggagttttttatcatggaaaagaaaggatgagatagagaaaatgaaccattatgatgagatacgggcccgtttaaagaccgcccatatgtttttcggagaggatgcggtaaacagaggaaatgctcttttggataaatatcttctggaaggagcgattactcaggaggaatatgaaaaactgctggaggaaaaccggacgatggaatgcgatgaggtctgggttccggaagatcactgagcaaaatcccgcgggaggattgtcttcagattcacatcagaatccggaaactgcaatatccgcagattatacttatggcacgaagaaggaacaggctgtcttgcagcctgtttttttattttcggaaactgtgaattgtatttttggaaggccggccggtttctgaaagggttgattatgtgccaaagctctcaaggagaatgaacgacggattaattcggttttataaagcagccgcggacattttcgtgaaaatcggagaaacagattcttcctgcgctgctgaaatctttcgaacagtcttgatctggagagatggataaaatctgttccgatggagaggaaaaaaacaaatatgatatacggtggtataaattgatatgtaagaaattaaaatgaatttaaagcgaattaaaactaatttaattcattaatatgatattaaatatataaaataagattaaaaataattaaaacttgcataataattaaaattgaattataattaaaaccacctaatcattgatataataattaaatttgttttgcagacgacggagatcttttgatttcgcaggacggaattctgaaatatgacacagtgaaaatgttttcccttttttatcggaggtagaattccgcttcggatttctcctgaaagacaggattctctttgaaacggagaagcaggataaacctgcgctgtgctgaaatcgttcacacgatcagatcatgcggaaatttcgctgtaccgatggaatatttctgtaaattcatgggatgaaatcgctgcaatatcttctggtctgcgcgccgagcggtgtttttcgtccgaaggcgcggcggaatggagagacgctgctgcagcaaattgaggaggaaaggaatgaatcgattatggagaagaataatgtcattgaagctgtaaaagggcttcatgaggtgattcgtcgccagcagggaatcatgtctccggattctaacgggaaggggcatggaaagctgctgagaacaatttcagaaaatgaaggaatttccggcgtcgaactggccttaaaaatggacatcgcaccgcctgtcgtttcggaaaaactttccggtttggaacgggacggtctgatttaccgggaacgggaccggaaggatcggcgcagaactcatatttatctgactccggacggagcgatagctctgaccagacgaaaattcggacaggaatgttttcagaaacgggtaaaggagtgtctgagcgaagatgagcgggcgttattctgcgagatgtgcgacaggatcgtatcggggatcaagtcgatggaaaaagatcttccggacgatgaggcggtaatcagcttttatcggaagcagaaagagaagcgcagccgaaacgacggatacggccgggaatcttcaggcgagaaatagaccggtgcagacagataggagctgcagcagatgagctatataaagggacgagcttcggagacggaggagacgttgtctcccggagaagcggcgccgctgaatatagaaagagcagataacacacgaaagtagtgatattggcgtattaacagtatcgtgtgtatctgcagtttacaaaggttttccgtattttaaaaaacctattatatcaagtataacatataatctgtaaatttacagcatttagaagctgatatacaaaaaatggaattacgggaaacagaaagaaaaagaacgcggctggattgagaaaggaggtcagtcactgcgtggcatcggtcacggacagccggagaagaaaaaatcgcagcaatgttgaaagaaaggagttttctcaatggaaaaagtgatgaggacaaaacaagtacgcgttttaagtattctgctttccctgatgctggtgtttggcaccatgtgtgcagtaccggcgtttgcgggggagagtgcggaagattttacaattggttccatagatgacctgtattatctggaaagtctggttgaagatagggcagcaggaagcgctaatgctccatcggtaggagtttataatgtcactcttatgactgatcttgatctcagcggaatggaatgggacggtatcggtataccgcagagttttatcggtttttccggtacttttgacggcaatggtcatacgatcacggtagagcttaataatagtgcgaatgtgggaccaaagggcggtttattcaacctgacttacaatgctgcggttactgatttaaccgtaacgggtactgtgtcgtctacacggtttgtaggaggtctcgtcgggcgcgtgatgggaaactttactgcttccaattgtaatattgacgggatgacgttgtcattgagcaacggtgccaacaattccgtcggcggtctgatcggtcagtgcggttcaggcggcggtggcggaaccggtggcggaacaggctcttccggcggtacacagggtacagtatcgattaacgggggaacgatcaccggaaactttgtaagcacgagcagcacaaatcctgtaggaggcgttttcgggcatatttacagcggatataatgcatctgttacaggagttacgatgaatgcggctctcaccggacagataaccggactttatgcgggaaataatgcatctaatctcacattgacgaattgcagcccatcaccttctgtagctggagctgcaggtgttaataccggtacgattacgatcaatttacagtaagaaccgtgatatatagcctctgacgagcgggggattaaaacatatccagcttgctaggtgtgttgaataaaggagtgaaatcggctctattgatcatataggctggatttttaacgtttatgaaaaagaggttgttgcaatgagccgatctccaaaaaagttaggcctaaaaatcttaacgattgagagatcggctcatgcggcagccctatagataataggagcgttgcgatgaagaaaaggtattcggtaaaaagatttttctcttctgtactcatagtatcgatggtcttttcacttaatgcggctacaggtgtttttgctgaatcagacaagatagagcaggcaaacagtgtgacaatgccgagttatataacagagactgtgattggcggtgaaaaatatcttgagtttgactctggagaagatatggcatggctgagagctcatgtgatgaataaggaggacggaggcggcgaaggaggttattattgtacgcataatatcgttctcacggatgatatcgatatgtcagaatataataacacaaatggtgaaaataacggtgcatggtcggggatcgggcacggtcagcaatggatcggttactccggcatttttgacggagccggtcatacgatttcaaatattgatgtatataatgatcagctggtgggtccaaaaggtctgcttttcaatattaccaaaaatgctacgattaaaaatatctctgtcgaaggggttgtatcatctacccgttacataggcggattagtcggccgtacgacaggggggatcacgcttgaaaatgtagtggtcgatgcgaaactctcccttagcaatggaaatgcaaatgccattggcggattgatcggacagtgcggttccggtcagacggtgggcggtgataaaattctgattaaaaattgtgccgcagtgggcagttttgaaagcagcacatctacgaatccgataggcggcctgatcggacatatttatggcggatatgatgttcagatagaaaatacttatgcggcggcagacttaagatgtgacggcggcaatgttgccggcctgatcggaagtcagggaaccagtaagctccgcatagcgaactgctattatttagatgctatggctgaaacggcattctttgtgatgagcggcagtaatgcggatgaaagtccggtaagtccttccagcagttttgtggacgtgaaagagaagaaaattgaagaaatgaaatcttcaagtttcatcgaatctctcggaagtacaaagtttcacgctgacggacagcctcctctcgctcagggatgtccgctgcctgcgacgatttccgcaaaggattatactttttcagagtttatttggagcggtgaaccggtgacggcatacaatatcggtgattcgtttgatatggggtcattaaaggtaattgcacgttataagaattcttcagatcagactttggatgtgaatgtgacgaaatatctgaaagcagataagaacattttgcagaaagaagacaataatacaaatgtgacattgactctttcatacggagatcgggctgatcaaaaagaatatcctgtcactgtaaaaaatgttgtagaacttgaaatagagaacgggccaagcactacgctttactacgaaggcgaaaaatttaatccgcagaatctgtgcttaaaagccacattcagtgacaatactacaaagacgattatgtcaaatgagtatacgtactctcctgcaggggagctgacgactgcagatacggaaataaaggtctcgtacggcggtcagaccgtgtctgtacccatcgaggttaaaacaagaaatatcgtaagtctggaggtaaccgagaagccaaacctgatttatacggcgagcgaaaattttgatcccaccggaatgaaggtgagagtaaattacgataatacggagtatggcagaaattacagagaattagaactgtcatttaatggaaagtatgctgcaggcaaatatatttattccgcagacggaaatcgagttaccgtcagctaccaggaaaaggaacagattttccaaacatcttttgatatcttctttttaagcggtgaagcgccggaaaaaatagaagatgtataccagctcagcacgcctgacgatatgatctggtttgcaaatcaggtaaatgaatttggaaagaaagacatcaacggagcggtacaaaatgatatcgacttatcctccgcagcttattatttaccgatcggtattgataataaaacattttatgcaggaacatttgatggaaagggacacactataaccgtcgcattcggttcagaaacaggttctgccgacaatacacggaaaaatatcggtttattcggagcctgcggcggcggagctcagatcgaaaatgtgattgtaaacggaacgattgacgggacgtttgaggcggcagtaaactttgccggaatcgtcgcttcgactttcactgtgaacgggagttccacggctgttcagaattgtacaaatcaagtgaagatttctgtggaaacaaaaaacgcaaatagtgtcggcggaatcataggttcagctgcttctccggttattataaattgcagcaatgaagcagatctgtcgggcaatacagttggaggaattacagtagcgtcttccaggaatgaaatagaaatcacaaattgtgcaaattccggcgacattacagcatcgactgtggcagggggaataataccgactggttatggcggcagcatcaaaggctgctggaattcaggagaggtaaaatgtttaaataaaacaaagggtgcaggaggaattatatatgaagtttcaattttatcccaatcaagtataaatatttctgactgctataataccggtcaagtgacaggaatcaagtatagcggaggaattgtaggttatatgaaaggtaagacaggtttcagcctgaatatagatcgtgtgtattcttccggaagtgtgcttcttggagaagatgcagcggcaggtaattgcggaatgattgttggctatgttgagaatagcgctgctttaaataatgcgatttatctgaataatgggctgtctgcatataatgagaaaacacaaggcatcgtaacgatggaaaatacattttctaaaacagcggaagagttaaaatctgatgaaattctgcagattctgggtgaagccttcactttcgcgcacagtgataccatcaacagcggctatccggttctcacatggcaggcggcgggagttgccgacgatgtacacgtatgggacgagggtgtagttacaaaagagccgacaacacaggagacaggtgaaaaagaatacacctgcatggtctgcggagctaagaagacggaagttctggacaagctgtcttccggcggatcaggcgggggcggttcctcggttaagcctgacgacggtaaaggtgaaacggttacaaatccggacggctctgtgaccacgacgacaaaagatgaagaaacaggttctgtaacggaaaaaacagaatacaaagacggatctgaatttacgaagactacatcttccgacggaaaggtgcagagtgaagcagtcgtatccgaggaagcggtcaaggctgcggcagacagcggacagccggtagttgttgcgatgccggaagctgaatcgaaaaaagacgctgcgaaggctccggagctcaccgtcgatctgccttgtgcagaggctgtggtcgaaattccggtagccgatatgggatcaggtgtcgtggctgtaatcgtaaatgaagatggaagcgaaaaaattgtaaagatttcagaagtgacggaacggggcatcgttctcaatatcaaagacggacagactgttaaaatcgcagacaacagcaaagctttcagcgactgtgcgaatcactgggcgtcggaggctgtgaattttgtcacttcaagagaaattttcaacggaacgggagagggcgcgttctctccgaataattctatgacacggggtatgctgatgaccgtattggctcgcctcaacggagtcgatacggacggcgga

SEQ ID NO: 1038 - DNA, 4016 bp, Unknown
  16S sequences of unknown bacteria
ccctgcggccctatcagctttctggcggacagcgaagaagaacagcacaattaccaaaatgcgggagaaggtgcaattaccttctcccgcaatgtttgcggtttaaaaagaacctgatacaaggctttccatgagcctctttttcgctgcggcagactgactttttgtatttgcagcgtgaatttccaaaaaaacggttgaaaagttgataaaaatatgccatactaaaactatacacttgcgggggaaggagttttgtaccgtttgtgccgcaaaataattgcagaaggagaacttgataacggcaatggacaagcggatgttcatgcaaaagttagacgattgcccaattataattttcgattcatcggacgattgcaattacaacggaacacaaaacaaggaatagaaaggggaatgttttatgcgaaaattgttgttaagtgtcttactctgcgctgcgttggtgatggggttactgcctactgccgcttttccgatggagttgggtaatacccctgaggcggtggaagaggctccgacttccgcattggaggaacaaaacgtcaacgaggagctgttgtccgaatatggagaacagaaaaatgcgccgaaggcagcggatccgacagcacagaatggtgctgcggagatctatgtcagcagcaccggtaacgacgaacagaataccggcacaaaagatctccccttcgccacgccggctaaggcggtcgatgctgcggctgatggtacaacaatctatgtcatgagcgatctgaccatggatcagtgtgcccgtttttacgataagagtcttaaaatcaccagtggagaaggcggtccttacactattacacgcagcgctgattttaagcagcaaagtgacacagcccgcagctggtataatcccgccatgatcgaggttcagtcttcatcggcgagttctgtcggcctgactctttccgacatcgttctgaacgatgcagggatgcacgagggtactgtattcgcacaggctgtcagcggtgacggcaacggggataatacagtttatgtgcaggacgctatcattgcctccaacgccactgtgccctgcaccgtgacgctgggtaaggatgctgtgctgcgcaactttggcggcatgtccgctgtgcgcgccaccgaccaggcaaaaatcgtcatggaaagcggcagtgtgatagaggataccctgactggttatacaagaacaaaaggctctggggcagactcagtcggtccggcaggtgcgatctggcttcagggcggtacactcgtgatggaggaaggctcgaagatccggaatatggacggtcgtggagtttatgcagacggcgggaaggttgagatcggcggcgccatcagcagcattgccgcaaacaagagtgcaatgtggcaggcgaatagcggcatcgtaattcatctgcgcaataacgcagagggaacgctgacctccaccgcgctgattgagaaaatctccagcggcagcataatctactgtgcgggtgatgccaaatccttcaaaatggaaaacggctccaaaatcacggattgccccaagctgaacggcaatgtcatctatgcaaaaaactgcaccgtcgtgattgacggtgaaatcagcaatgtgtatgccacaggcaaccatatcctgcaaaccgacggcggcacagcggtgacaattggagaaaacggaaggattctcaacaatcacgcatactatggcgcagtttatatcaatggaacggatgagcacttagacatttacgggaaaatcaacggtaatatttgtgcgaatcgtggcggcggtgtggtgctgtccaataatggcggaaaccacaatgcaaccatgtatgaaggcgctgagatctgcaacaacaaagccgagcaaacaggcggcggagccatgatatccaaaggcgtcttcacaatgaacggcggtacaatctccggcaacatttccggtacaaacagtgcaaaaggcgaagctgaccggatcggcggcggcgtatttgtccgcagaggcggccagttcattatgaatggcggcgcaatcgagaacaacgcaacaacagcctttggcggcggtgtctgctttgatgccagtgattatggcggcacggtgccgaagatcgagctgaatgccggtaccatcagaaacaatctcatgcaggtcaccgtcggtgacgaatatcagatcacaggcggcatatcaaatgatttggctgtcaccggtaaagactatggaaagtgcgatcgttacctctatatctcccgtgaggcagctgttggagataaggcagtttatttccagactggcagtaagaccgtaaccccggatgacagcagcctcgacatcaggctggggaacaccagtgctgcaaatgtgaccgctctaaccggtgcttcaaagagcatgggctggaatgatccgttgacgaccctctgggttcagcgtgatggcgcagctgaactgacgataggcggcctgacagtgaacgatctgccggtttatgtgctgtccttgccggtggatgaaaccggaaaggttctcgatgcttcggaagtgcaggtttatgaagctcagaagacggacacaggagatatagacatcacgcttccggatgtgtctggaaacggccatgctgtagccatcgttcaaccctcgcagaaccacggcacactggtcataaatggacctgaaaccatcgagagaaataaaaccggtgcagactatcccgtgacatatactgtaacgtatgatatgtctgaaagcatggaaagcattattgaacaatcgggcggtgaggctgaatatgttcttactattgatcaggatgtccgccttacaggaaatcccggcagtttcaatggggaaagcatccaggtgacatatagtctgccccactccgagttcaaggcaggagacttcctgcttgcctctgcaaagctgagaatcactgttggacagctcgactatatcattccctctaatgtgacgaaaacgcagaagatcgagacgacctatagcctgacaacacaggtgaatggtgggaatggaacgatttctgcaagcaaagcagggctggcggccggatcgcatgaaacaattgtttttactcccgatagcggctatgaaattgacactgttacggtgaatggtgttaaagcagaggttctctccaatacgctggaagttatcatggacgccgacaagaccgttattgtaacatacaagagtattccgcatacccatagctatggagcagattggaagtcagacgcagataaccattggcatgaatgcccctgcggtgacaggaaggacacggcggcgcatagcttcaagtgggtgatcgataaggaagccaccgcaaccacgagaggctccaaacacgaggaatgcaccgtctgtggctataagaaggccgctgttgaaattcccgcaacgggttctgcggcgaagccgagcgaccagcccgacaatttgggaaatactacctcgccaaaaaccggtgacagcagcaatctcgttttgtggaacgcacttctgttcatcagcggcggcgctgttatcggcacaacggttgtaagccgaaagaaaaaacacaacagataataaagcaatacagtaccatcgattggcaagggcgtgttttttctgccgcagcggcccagaaaggaaaaccgttctccacttgtaccgcaccgcagcatgttttgtccataatgataactaagcgataaacacagaaaaagaccgccccgaggcaccctccgtaaggaaggtgtcccggggcggctcttgtatctcgggttaataagttctctgaaacggtgtaacccttgtggttacgccgttttctctttgctgcgctgggtgaggtgctgccggaaggcttcttccatctcctccgggttcagctcgtggaggatgcccacgcctcctttctgattgcagatagcaatggttttacagtttggcatttcgcttttcctcc

SEQ ID NO: 1039 - DNA, 7319 bp, Unknown
  16S sequences of unknown bacteria
gaaagcgcgcggaaggcgctgataatgtgatagagcacaaattccgcagagataacgtcaacggcataatcatctttaccggcgaccagcagcccaagcagcgcgaggaaatcgactcgctttccaaaaacggaattctcacggccacaatcgtcaccgacatacccgacagcaaacgaattctgtcggtcaggtgcaacggcttttgcgaaggaaaaatggcggcggaaatgctgtcgctgcttattcccggcggcaaggcggccattttcggaagctcggaggacgtggccatctgcgccgaaaacatagaaggctttaaaagcggctgccggtcgctttctcttaaggtcggaccgatttttgaaaaccgcgacgacccgcgccttgcatacgacgccgtcgaccggcttgtaaaggaatatcccgacgtggacggcatatatatatgctcggcaaactccgattcggtttgccgacgtattgaagagctgggacttgtgggaaaatataaaatcgtatccaccgaccttttcgaaggcgtcagcctcaacatggacaagggcataattcacgccaccctttttcaaaatcttgaaaaacagggtgacgtggtggtcaagaccttttataaaatgctgtgcggcgaaaaggccgcagccaccgaagaaattcttttcattcccgaaatcataatgaaaagcaacaaggcatttgtgcttgagcgatcggcaaaggaaaatgcaattgacaaacagaacggattttgttaaaataaaagggtatgcaaagacattttattaaggagttttcacagtgaaaaaatttttatcccttttaatgtcggcggcgcttatcgtcgcggggctcacctcctgcggcggagactccggtaaaacctcgaaggacagcgcttccgatacaaaaacaacttcagaacaggagacaaaagaaatgcttacaggtaaacatcatgcggaaataaccgtcaaaggcaagggcgttatcgctctcgagcttgacgccgattcggcccccataaccgtcaccaattttgtaaagctcgcaaacgagggcttttacgacggtctcaccttccaccgtataatcaaagggttcatgattcagggcggcgaccccaagggcaacggcaccggcggttcggacgaaaccattaagggcgagttttcggcaaacggcgtggaaaacaacatcaagcacgaacgcggagttatctccatggcccgctccaccccctataacagcgcctcgtctcaatttttcatcatgcacgaaacttcttctcatcttgacggtcaatacgccgctttcggccatgtaacgagcggaatggacattgtcgacgaccttgccgaaaacaccaaggttgaagacaacaacggcaccgttctcaaggcaaatcagcccgttatcgaaagcataaaggtaatcgactgacggaaaagcaagaaaaaacaaagcctcgaaacactcactttggtgtttcggggcttttttaccgttcattttggcaaagcagggcgggaagggcggtgtagcgcagggtctttcggtcgttttcggccattcttgcaaccgactgctcggttcccacaagcacaagcagctttttcgcccttgtcacacccgtgtaaagcagattacgaaacatcagctgcggcggaattcccaccgtcggaattataacgcagttatattcgctgccctggcttttgtgtaccgtgacggcaaaggccttgtcaagatcgtcggcgtcggttgaggaataaagggcgattttatctccgaaccgaacgcagagaattcccgtcgccctgtcaatcgactgtaaaattcctatgtcgccgttaaagacgcccgaaccctgttttccgtctacggacgtccaagccacgtcataattgtttcgggtttggataaccttgtcccccacccgaaggcttgccttttcggttttatactcggccttgccgaactccgggggattgagcagctcggaaaggcgttcgttgagagcgcccgtacctgtgtcgccctttcgggacggacaaagcacctgaatatcctcaaaggggtcaaacccataggccgcaggcagccgcgaagaacaaagctcggcaacctttcgcgccgcaacaagaggcgacgcctcctttacaagaaagaaatccccttcctttttggaaaacacgggaggtttgcccgacacgataaggtgcgcgttggtgacaatgcggctttccatggcctggcgaaatattttgtcaagacaaacgacgggcagcctgccgctgtcgtaaagatccccgagcacatttcccgcaccgacggcaggcagctgattgcggtcgccgaccattatgagacggcagcccagcttcatggccttcaaaaggccctcaaaaagcagagaatccaccatggacagctcgtccactatcaccgcatcggtatcgagagggcttttttgatttttcccgaaggtcatatatccgttttcgtcccgctcggcctcgagcaggcggtggagagttttggcctcgcatcccgtcaggtcgctcatgcgctgagccgcacggccggtgggagcggcaagagcaaattccagtccctgctgctcgagtatggttattatggcgcggagagtagtggtttttcccgttccgggtccgccggtcaaaatcagaattcccttggaaagagccgaaacaatggcctgtttctgatgctcgtcataggaaattccgttggccgtttcgattgccgaaatctgactttcaagggcggtcacgggggcgggagggtagctcagcatggtgtctatccgcccggcacaatagctttcggcctcgaaaattcttgaaagagcgataaattctcttccgtccttttcaaacgtttccgcccttctttcttcgcaaagacggtcacagcccacgtcggcgcagtcctccgacacaccgagcagccttgcggcaaggctgaccaccttgtcccgcggcagacaagtgtggccgtttgaaagattgtgctttaaaatgtattcgattccgctttccaccctgaattcattgtcgttttcaagaccgagtccccttgcgaccgagtcggcgcgttcaaatgaaaatccgatttcgtcaaaacacagccgatagggattttgggttatcttttccaccgaaccgcttccgaagcgtttatatattcttatgctctcctcggtggaaattcccataccgacaaatttcagcatgacatccctcatgccgaacatttttttatattcctctccgattttttcggccttgccgaccgaaattccctttatctgcgaaaggcggcggggctcgttttccataacgtcaagggtgtttttcccgaaccgagcgacaattttagccgccgtagaagggccgattcctttgattgctcccgcagacagatattttaaaattgcctcggaggtggccggtctcacctgttcgtaggactcggcatgaaactgctgaccgtagattttatgtgtctcgaaaaagccctcaaggcgcagcatatcccccgccgacagagccgaaaactgccccaccgcggtgatttccccgtaatcgcaattaaatttgaaaaccgaatagccgtttgtttcgtttcggtatgtaatgctttccaccgttccctctatctgttcgggatctgagccttcaaaattatattccatctgtttctccgttttggattttctttattatacatcatcgggagactctttgcaaatattatcgtaaatggcctttccgcaatttcccaccttgcagaaacaaagcccctctcccctgcaatagcgctcaagcaccgccgattcggatttgcacagtccgcaatcggccaccagaatttccaccgaccttttgccgaaggagggctcgaatttaagctttgcccacattatgcggtcggtcagctgagaaaggtccgttatgggaataacggcaaaggatttttctgtttttgtgcaggtaagccacgttactatcctcatacaaaatccgcacagcccgtaaacggcaagcagcgatataacaacagtcagaatttcctcggtcataaaaaaacctcctgcaaatgtttataacattttatgcagaaggtttttgtttgtgttttttaaacgcaccgacacatcggcgcaaaaagacctttgagactatccgattatcttaagaatttcgtcaaaattttcgcaatagtagtcgcacaggggctttgtaccgctcttttcgatgtttccgccgccgataccgatggtcgggaagccggcaagctttatggaaacgacgccggcaccgctgtcctcgataccgacaacgtggtttctgtcctcaaagggaattcccagtccgactctcgccacctcggcataaagccaggggtggggcttgggagaaagctcgccgagagtgcccaccgagcccttgcgaaggggataaccggcggtaatggaggcgtcgtaaaaatcctcggccttttcgcccattttaagggtgtcgaaagccgacatgatttccggccatgccttttcgtaaaggccggaggtaacgagaccgatcttgacgcccttttctttaagagcaagcaaaaattccttgattccgggagacggcacaaaggcgccttcctttcccctgccctcaagaatttcgttcatttccctgtgggtgtgctcaaaataataatttcttgcttcctcaatggtcttgtcgggacaatatttatctatgcaatactgaagatgttcggaaacgctgtgtcccgaaacgaagggcatatcggcctcctcaagcttgaaatcgggattgccgagcaggcttgcggtggtcatttcgattatccaaatccaaaattcttccgacctgacgctggttccgtcgagatccataagaaccgcctttaagggcttttcgaatttcacctcgtgaacgggataatatgcgggataacccatggaagaggtaacataggcaatggtcttgtcctcataggaaataaactccacctttttgtcgccggtggcggttatggattttactccgtttttgcccacttcgtgaaatccgtcgctgcatttgtcaagctttataaagccgcagtcctcgtcgaaaacaccgatggagggaatgttaaaaaagctcattttctttctcctttaaacgacctcccgcgcaaaaacacgggaggtcggcagttggtttttaggccatgaatttataggtgatgatcttgtggggaccgagctctccggagagctttccgtccttaaagtcaacatccgaaacaaagtcctcgttaagcttgacttcctcaaccttggaaacggggagaatggtggaaaggtcaaatttaacggcgtcgccggtggtgttgtaaatacggacaatggtgcccttgccgtcctccgactgcttaacggccgaagtcataatgcggtcgtcggaaatggtgacaaagctgccgcttacggggagggtgccttccttaacaacgcccttaatggcgttcatcgtggtcttgaaggcataggccttatgataaacctcggcatccttccagtcgccggtgtggggatagatggcatattcaaattccatcttgccgatagagtgctgaccggtgtatttggcaagctcctcggggatcatgtcccaagcggcagtcatgtatgcacgctgggtgcgaagcagggtgagcttaatggttctctgctcgtcgtcctgaacctcatattcgcgcagacccttgttgagcagggcaaagccttccttgccgtcggaaaggtcgaggaagttctgcatgggctggaaggggaagaatttctcctggttgtcgccatcctcggtccacttaatggttctcctggcaacatcccaagcactttcggaaatcgcccaatcggtgtttactccggtggggaagtttacgcacagcttgtggtcgcggcactcgttgtcgagaacggtcttgatcttgacaatgttgctgtccttttcaagagtgatgtagtaggttatgggcagctccttcatctcggtgagacgctccttgctgtcgagagtggcagcggcgggaatcatcatggaaaggtcgattttgaaggtgcctctctggaggttggactccatcatggtgatggtggcatgggcgccgtggcttgtgaccacatagttgcgggtgggctcgcagcttacatgagccgagccggtttcgcccgaatcggtgaagtaatggagattatccatgaccttaccggtctttttgttggtaatggcaaaggtgccgttgggatgaataacaaccttgaggttttcgttttcaagcactccgcagtctctggcgataagctttctgttgtcgccgatttggggctcgtaaacaaactcggggccgcggaaacgcatggcataggtggcataaccgaaggcgggaacgtcgacggcaagaagaattcttcttctcttaatgcggaagcggttggccttggtgtccatttcacgctcgacgcccattgtgatctcgtcacaggaaagctcggtatattcaagcttgttgccgtccttgtcgaaaatgtcatagaactcgtcggccatgctctgtccggcgattccggcaaaggccttgcccttgggagtgcccttgggggtgtcgatgaccagctgaacgacctccttgcgggggaagggcatggtgttgtaaacggtaatgacgtgatcggtggcctcgaaggtcttggaggtgtcgatctgattgtaaagagccattacgctgcggttggtaacctcttcggcaacggtctgggcaaccgagaagttgtaaagcatatcgtcatgagcgcgatcgacggcggcgccgcagatagagtcatgagcgtggcatttaagcagatattcccatgcacggtcgatgttggtgcggggatattccttgccgtagaaggaggcaaaggacgcgagaggctcggcctgattgacaagatagttttcgcacttgtcgttgaggattttgagctttatgcgggaggaatgggtagcgccgtaaagggagttgaagttaccgtattccatggtggtgtaacggagctcgccgtgatgaacatacatatcctcgggcttcatgaccttgcggatggtgtccatataatcgtccatcgactcctgaacgaattcgatgtcgtcgcaaaccttgttcatatcggccatcatttcaggcaaatatctgtaaggctcgtcgttatcttccatgttgagagc

SEQ ID NO: 1040 - DNA, 3946 bp, Unknown
  16S sequences of unknown bacteria
gcgcgcggccttcgtgcgccccgcaaaaaatgccagaaatgacgtacacgccgtcatttctgatgaaagcctcgttcttccgatacctttgtcaatgctctgtttctatagaaaccactcgttctatgcccgccaggtcgcgcgcgatttcgcagcggcctggcagcgcggcgcgcaaaatttgcgccacgtcccgcgcctgccccgcgcccacctcgaaaaaggccgcccggcgcaagcgaaccggcaattcgcgggcgatgcgccggtaaaaatccagcccgtccgcgccgccgcgcagcgcgagagccggctcgtagcgcacttcccgctgcagggaaagcatatcctccgccgtgagatacggcggattgcacacgatcacgtcgaacgcgccctccaccgccgcgaataggtcgccccgcgcgaaggcgacattgagccccgcggcgttttcccgggcgacgcacagtgcctcttcgctgatgtcgcaggccacgacgcgcgcgtctggccgctgggcggcaatggttacggccagcgcgccgctgcccgtgcacaggtcgagcacgcgcggcgcggggagcgcttccaggtattggagcgcccgctcggcgaggatctcggtatctggccggggaatcagcacgcgttcatccacccgaaagcgccggcccataaaaaaggcgaagccctctacatattgcagcggctcgcccgcttcccggcggcgcacccactcggccagcgtggcttcgtcgggcgcgtcgcccagcaaccagcgcgcttccaggcgcgcgttggggatgtcagcgcggcgcaggcgcgccgcgatttcttcaagcgtcattttcgcaggcgggcgcgggggcgggctgcttttgcgcatcgaacaacgaagcctccagcgcgtccttttccagaatgccctccgccgccttgagggaatggatggccacttccaccatggaatcgtccggctgcttggtggtgatcttttgcatcatcaagccaggccacatcagcgcgcgcaccaggcggttgcgcggcaggcgcgccagggtttgcagcacctcataggacacgcccgccaccacgggcaaaagcgccaggcggctgcccacacgggcaagcacgttcgaactgtttgtgcccaagaacgtgaagatgaggatggaaatcaggaacacgatcaccagaaagctcgtgccgcagcgcggatgcagcgtggggaatttctgcgcgttttccacggtgagcggcaaattgttttcatagcaatacacggctttgtgctccgcgccgtggtactggaacacgcgccggatctccttgagttgcgaaaccgccaggatatagcccaggaacacgcaaatgcggatgaggccgcccagcaggttcaccaccaagtcttgctccggcaaggccattttgatcagcgtttccaggccgatgggcaacacaaagaacatgccgatggccaggatcaccgccagaatcaccgcgcagagcatcatcacgtcctcaggcttcatgtgcagggcggcggcgaccttcttttcgaatttgctgggttcttccggctcctcgccgagcatttccgccgagtccgtgaggattttcacgcccgtgtacaacatcacgcagaaattcacaatgccccggatgatggggtagccgagccagcggtgcttttccgaaaggcggcggtgcggcttggtgcgcatgacgattttgccgtccttttgccgcacggataccgcgatgcacttgctgccctgcatcatcacgccttccatcaccgcctggccgccgacagaggagcagcgccggtaccagtcgccggtgaaccagtcttttaaggccttccaaactttattcatactgcgatatgatcctcccaagcccttgccgccgcgcagggcgcaaaagccgaatatgaaaaacagaccgagcgcgaacgtccgatctgcattttcgtgattttgtcgcgcacagagccatgcaacgcgaatcgccttacatgccgtagcgcttcttgaaacggtccacgcgaccgccggtatcgaccagcttctgcttgccggtatagaacggatggcacttcgagcaaatatcgacgcgcagttcctttttcaccgaaccggtttcgaacgtttcaccgcaaacacaacggacaattgccttgccgtaatccggatgaatcttttccttcatgggtttcacctctcttgcgccgccgaactgtccgcgcacggtgcggcacgggcattcagcttcatcatgcattgtttattataccacgccgcggggagttttacaatagatttttatcattttacattcgccggctcgcaaacgcccaggcgcgcgtgcagcatggcggccagcgcggatagcgccgcggcgggcagcgcgcaatacgccatgcccaggagtggattctccccggaaaacaccatttgccgggccatatagcccgcgtttagttgatccacgcgcatgatgtacagcatgggcaggtaaaaatcgccccaggcgtaggcggccgtgaccagcgcgcccgccaggcaaagccaggcgcggttttgttccctggcgctaagcgccatcaccaccagcagggagaatacgcgcggttccagcggtgaaagcaggacgatgggccagggcgtattgatccagccaaatatgcgcgcgagcaagtattccgccatttcgttcccgcccagcgagagcaccagcgcggcggagatggccaaccacttgcgcgaaggcgcgcccgtgagcgcgagcatcagcacgccgcccgccagccccgccagcaacggcaggatcatgcccgtgctgttgagcggcagcgcgccttccaggccgcaggccagcgcgattgtcgcgatcaacaacacagaaagcagcgcggccacgggcagggcgccgcgcgcttccaggcgcgtgggccgcgcgggaagaatccgcgcaaacagggccgccagcggcagggcgagcagcaattgcgcgccgcttgccagcgcttgcgccgccgccgcgccggaatagtccgtttggattaggccggtgcggtaggaatagctgatcagcgcgtccgaccaggcgtaattgaggggattttgcgccagcagcagggtgggcaaatcgggggagagcaggcgcatggccaggagcagcccggcaagcgccacgcccagcagcgcgtccaccacgccgccatttcgcaaggcggcgatcatcccgcccgtgaaggccgcaaagcaggcgcacggcacgaggctgcgcaaaaaataggcgtaagcattgccggtttccggcagcagcgcggcaaagagcaccgcgggcgcgagcgcgggcacgagcagcgccgcggaaacgcccacgcgcacgcccccgtgcggaatgcacgcgatcagcatggcgagcacaccgccgcccaccagggccgccgccagttcgcaaagcttgagcagcgcgccgttgcccattagcgcgagaaacgtctgtccgcccatcagcgaagaaaagttcgcgtatcccgcccatgggctgcccgccatgccgtgcagcgcttggtaatccttgaacgccaacgtcgcgccgaacagcgccacatacaacacgcccagcagcacaaaaatcagcagggcaaaagaaaaccaaaatagcggccattgcctgcggtatccgccttccatgcgagtccctccattctgagaaagcttttgcctacattataccacaactgtgaagcgctgtacaggggctgctccgcgcgcagcgcgcgcttcgtgcgcccctcagtcggctttgctgatagcgtagtgtaacgccccctcagtcggctaacgccgacagctccccctacgcaggggagcccagagcattgacaaagtatcggaagaacgaggcttaaatcagaaatgacggcgtg

SEQ ID NO: 1041 - DNA, 32759 bp, Unknown
  16S sequences of unknown bacteria
gcatcagcttgccgccgtatttgagaattttgcgcgtaacgccgccttccagatgttccaccgccgtagcgtcacccaaaccgaatgccgaatttttctccattgcaaagaactcctttcttccatcgccgattagatttcttcgccaacggtgagcgtgcgcatgcaccgctggccgccattgtcaaagccaaaggttacggtcccgccctcgatggcaatgtccacagcgccgattttttcctcgccctccgccagcgcgaacaggttggcaaaaacgatatccgcgcaatcgtccaccctacggatgaaataggtgagcgtttcgctcgaggggttggacggcccctgcgcgtatattacagaggagggcgcggagcaagcggaatacagtgcgaacgtgccagcctgcgagcgccaccgagagacgacaaccccttccgcgcgccgcccgtgcgcctgcttgaaatagcgcgccggggtgcaatcacccagtacgactggcgtataggcccccggctcttcgctgcactcgcccaccggatgcacgatccaatcgaccgtgcgcccggccgcgccgcgcacgcgaaacgcttccaggaaaaaagcgtccgtgaacaggatggttctgcgcatcaccacgccgcgataggcggcttcatcccactggcaaatggtgaaactatccagctccgccaagggagagagccagtccgcatgcccttccaccagcgtttcctcgccgcggcgctcaaatcgcaccgttcgtccgtcacaaggcggctgattttgggcgttgatgcacaccgtgttgtgcgtgaaggtgtttttgtaatagtcataatgcatgggcgcgccataatacaccgtgctcaaatcgggcatcaccggatgcttgcccgccatataatgcaggccgagcttatcataatggtcgtgctcgccgccaaatttgccatgccggaatagcagatactgcttttgctcgctgccacgcaaaatggtcaacccggaggcgcaatcatcgtgataatcggccagcgcgagcggtggcgcgtcctcaatggacggcgcgccccatagctgcgcgtccaaaagattgcgcggtcgctgggcataggccgcgttcaacagttgggcaaacgcacggtcgccataagcgccgtagccgaattcatagtggaacgccacgttcgcttcggaaatgggcgcacccccgtcacccaagggcggaaagcaaccgtccggctgcaaagcccgtagcgggaagagcagcattttgcgatatagcccctcgctcagcaaggaatacggcgtattgcgcgccatcttttcataggcaaagaagttcagcaatccatagaaatgataatggaatgtgttttcaaaccacatgccgtcttgcagcaaaccgtgctccaactggtaacgcaagccgtatttatcctccagtgcatggcggatataatcttcgcgaccgagtgcaatgccaaccatgcccaatccggcgccgataatcacttcgtggttgtgcaactgctccgtccggttttccagcaaagcttgtgcgccgagttccagcaaatcgcgctcgatgtgctcccgctccgccgcgctgagcgaatcgccaattaagtcgtatgccattgcgaactgctggaaggtgccagcctcgtccagcgcctgggcattcatgcggccaggcttgttatagggaatgccgccgtgcagctcataatttttgtaatgatccgcatatcccagcaaaatggacgcgctcactgcttggtagggtttttcttgtgtgagcgcccacaccaaggccgcgtttgcacaggtggctgagtttgtgccgttcacgctgcgccaccacgcacccaggtaaggctcgccattgtatattctttggcacgtggggcacacaaagtcatgatccttggcgtagtcgaacgtcagcggcgtggaatcctccgggcaggcaaaataatgcccccatgtagcaatgcccgtttcgggaatgcgcgcaccatagcgcagtaccgtttcgcagcttttgcgcaagccttgcagcaggccggggttttccgccacgaccttgcgcagttggcaaagcttttcttcggtaaacagaatcatacgagcctcctcgtgcaatttgccgtcgcgttaggtgtttttgagaaccacttcgattttcgcctgcgtttcccgcagcagttccacacatttggcgataaagccgctgtccatgcgcaccaggggcgcggatacgcttatggcgtacaccgcttcgcccgcaccattgcgcaatggcacggcgacgcagctcacattggcgttgtattcctcgcgctccagcgcgtacccttgccgccgcgtttccgccagccggtcgagcagcgcgcccatatccgcgatggaatggggcgtggcgcgaatcatttctacgccagcgtacagcgcccgcacttgcgcgtcgtccatggtggaaagcagggctttgcccagcgcggtgcagtgcaggggcgcgcgccaacccacgtagctgctcatgcgaactgagcgcagggaatccattttatccacatacagcacatcggttcctgatcgcacgctcaagtgtacggtttcgttcacctggtcgcgcagagcgagcatcaggctgcgaatgtactccacgacattcatactatggatcgcacaagcgcccacttcgaacattttgagactaagtagatatttccccgtctccggcctttggtacacatagccaagttgcacaagcgattgcgctaggttgtgagccgtggaacgcggcagcgcaagctcttttgccaactcgtgcaaaaaaaggccttcggattttcggctcagcaattccagcatttccatgctcctttgctgggtgcggttggggatttctgccatagcgctcctttctttcgcatatgtgaacatcttttcttactgtggacagtataacatagtccatcgcctgtgccaagaattattttccatatccgcgcaaaatattggggcgtaaacataaaaatgcctgaagggtttattaagcgcggagcaacaaaaaatcaaaacaataaaattcttctgttgtgaagccgcacgatggacggatgcgcaaaaaatagcgcccgtccgggtgggaaactctcccagcccgggcgggcgctgtgcttggtatacaaaggcgctgcgcttacttttcttccgtttccgcctttttcttttcgccgatggacaagagcgcgttcaggataatgccaaacaccgccgcgccggcgatgcagggcacgttcatgccaaagaaggggatgttgccgccgaaggcgtagttgccgccgatgccgatgaccatgatggaggcgatgacggcgatgttcttgctggagaacatatccacctttttatcgatcataatcgccatgccctgcgcggcgatcgcgccgaacagatagatttccaggccgccgatgaccgccagcgggatgccgtaaatcacgcggatgagcggcgtgaacatggagatgatcatggcgaagatcgccgccaccgccagcacggaaaccgagaagatcttggtgatggccatggtgctgatgttttcgccatagttggtgccggccgggccgccgatcacgccggaaaccatatcgcacaggccgtcgccaatcaagttgcggcccagcaggtcgatcatgttgcggggcttgccgcccttgcggcgcgccaggtcgttcacatagatatccagctgatacatgtgcgccgtggattccggaatggtggcaatggcaatgggcataatcgccaccaccgccgcccacgaggccttggggaaggagaacgccggcagcgcgaagatggagccgtcgcccagccgccagctagaagccgccagcgcctcggcgggcatttcgcggaacaggttcagttcgccgccgctgaacaaaaccagcagcgcagccacgatgcagcccacggccgcgcccaatagcagcggaatctgccccaggaagccgcgcagataacgggagaagagaatggtggaaatgagcgtaatcagcgaaaccacccacacccagttcgaaccggttgcgcccaccgcacccacggccggagccgcgtcggaaagggcgttgccagccagcgtaaggccgatgatcatggccaccgggccggtgatggaagcgggcaggatcttttccacggcgcggcggccgcaaaagcgcacgagcaggcccgccgcgatggataccaggcccgacagcacgatgccaaactgcgcctgcgagatcagcgccgcgggcaggatgcccgtggcctcaaactgggcgatttgctccgcggtgccctcggcggccaccatgctggaaatggccgtgagatacgcgaaactggagccgtagtacagggggattttccgccccgtgatcaggatgaaaaacaacgtcgccagaccgctggcaaaaatggtggtggatacctggaagccggtgatgagcgccaccgttactgtggcagggaacatcacgatcacttgctgcaaagcgtacagaagcagttttccaaatggggggcgttcctccggcaggtagccaacggaagcgtcgagttttcgatccatcgggcaagcgccttctttctgtaatttttcgcccgtcgcgcgcgacgggcacacaaacgcgcaccgcaggcaatgaacccacggcgcacttttgtctattaaagcacattttgtggcatttgtcaaaccaatttcacacgctctccataattttacatcgctcggccgctagcgcatttcgccggcggtcgccagcagcgccgcgatgatttccacgcggccaaagggcgtgatcaaataaaatccatccacgtgcgcccggatggcgcgcatggtctcgcgcgaaagagcgatggacagcgcctgcgcctcttcgcgccccaggccctcatagcggcgcaccatttgcgcgtccaggcgcatgccgggcatttcgttgctgaggaacagcgcgtttttgtggctcacaacgggcaaaattccgcccagcagcttaacctgccggggcaggcgttcgcgcgccagcgcgaggttttccgcggcctggcgggtgtgtaccggctgggtgaacagcgcttccatgcccgcgtccaccttgcggaaggcccgctccagttcccgcgcgaaattcctggcgttcacgttcagcgcgccatacacgtgcagcgcgctgaaatcgcggatatagcgcgcgagcaccgccgaatgatagctgaacacgcccttgaggtccgcgggcgcgtccgagggcagcgggtcccccgtgacggcgagcacgccccgcacgccctccatctccagggcgagcaacagcgcgcgcgtggcgttcagattgcggtcgcggcaggtcatgtgcgcgatcgcatccgcgcccagttcgcggcgcagcttggcggccagcatgctgctgtccgcgcgcacgcgcgccgccgggcaatcggcaatggtgatggcgtccgccccggcgtgcagcagcgcctgcgcgccgcgcatgaacacgccggcctgcgcgcccagcggcggatccaattccacggccacggccagttccccgcgcgacaggcggcggaaaaacgcaccttccaccgggacggcgcgcttggcggcgcgcttttccggggcggcgttgggcgcggccgcgccgatgcgcgccaccatcgcgcggatgtgttccggcgtggtgccgcagcagccgcccacgtgcgtggcgtaggcggcgatctcctccatgcggctggcgaaatacgccgcgcccgaggggaaaatcgtgcgcccgtccaccgtttccggatagccggaattcggcatggcgcaaagcggcttgcgcaggggcgcgaggctttgaatcagcgagagcatgtggtgcggcccgcacacgcagttgagccccaccgcgtccacaaattcgcaatcgtccgccgcgcgcaacagttcccgcacgggttcgcccgtgcgggtgtagccggcgggatccgccgcgaaggacgcgatcacataggcatgcggcgcgcgctccttcaccagccgagccagcgcgagcgcggaggcgtccggaaaggtttcaaacaaaaaatgttgcgcgcccaggtcgagaaagcgctgggtgagcgcttcgcggcacgcctgcgggccgatgtcggcgaacacgagcgcgcggcccgccgccgcgcgacaggcgatttcccaggccgccggggcgatttccagcgcgtgttcgccaaaggaattggttttgagcgcggttgcgcccgcttcgatataggcgcggtgcacggcttccaccgcgccgggattttggcgacagcaaagctccgcgctcgcttctccaaagcgttcgcgcagatacgtgcccatcgcgccatcgaaaaacagccgctccatgccgcgcttatttgccttcgcgttcgatttccgcgatcatcgccaggcgcgcgttgtatttttcattgtagcgcgcggccaaataattgcggaaaatgctcttgagcacctcgatgcccaccacgcgcgcgcccacggcgatgacgttggcgtcgttgtgctcgtgggccatggtggcgctgtagggatcgttgcacacagcgcagcggatgccgtgcactttgttggccgcgatggccatgccgatgcccgtgccgcacaccagaatgccgcaatccgcctcgccattgaccacggcgttggccactttgcgcgcgtagaccggataatccgccgagccgtcgcccgcgtagccataatccaccacttcatgccccagggattttgcatattctatcagttccgcgcgcacttcgcgcgccgcgtggtcgttgccaaacgcgattttcataagccaagccctcctaaaaaaatcaaaaatggtttttctttgagtataccgaaaagcgcggatttgtcaagtatgggcggggaaattcgccgtttgcccggcgcgacaactacacgttgctaaaaagcccatattttcaatccgcagcggcggcgtgtacgccgcgaggggcgcacgaaggccgccgcctgtggcggatgcaggccgtagtaagcccagtaaggcaaggagtggcgcaagcgatgagcgcagcgacacgactatgccgcactgtggaccgcggccctagtggccgcttcctttatcattttccggccgtcaccgtaggtgacaggaaaatgatgtttttcacaaaaatgaagcattcatttttgtgacgggcgttgacaaactatagttgccaacgcccgtgagtataccgaaaagcgcggatttgtcaagtatgggcggcaaaaaagcgcgtgcgcacccggaatgcggcgcttttaaccgtgaatttcacgcgcgtacacaccgttttgatgcgcgcgtggtataataaagcaaaacttgcacgggcggcgagggcccgcgaaaggagagggaaacccatgatccggcatattgtgttgttttccatcaaaccggaatataaaaaggatattccggcgctggtggagggattctatcagatggtgggcaaaatcgacgggctgctcagcctggaggcgggagcggacattttgcacagcgagcgctcttacgacatcgccctggtgaccaccttccgggaccgcgcggcgttcgacgcgtatcaggatcatcccgtgcatcagccggtgaagcggcgcatgcacgaggtgcgctcgggctcggtggcctgcgattttgaagtgcgcgcgtaaggagggatgcggttcatggatccggtggcgtttcgcgtctttggcattgaggtaaagtggtacggcatattgatcgtgctgggcatagcgctgggcatgttgctttgcgcgcgccgcgaaaagcgcttctcgctgcccaaggacaccaccgtgaacctgatcctcatcgcgctgccgctggcgctggtgtgcgcgcgggcatactacgtgattttttcctgggattactacagcgcgcatccggatcgcatcctgagtgtgcgcgacggcgggctggccatctacggcggcctgctggggggcatgctgggcgcgtttctctacgcgcggcacgcgaagattccctttatgcaattggcggatctggccgcgccggcgctggcgctgggccagtgcattggccgctgggggaatttcgtcaaccaagaggcctatggcaacccggttaccgaccccgcctggcagtttttccctgccgcggtgtacatcgagcgcgaaggcggctatttccaggccacattcttttacgaatccgcctggtgcttcctcatcgtgttgtttttgttgctggcagaaaagcgcggctggtttcgcaagcggggcgatgagtttttggcctacgcgctgctgtacgcggtagagcgcgccgtggtggaaggcctgcgcagcgacagcctgtattggggcggcatccgcgtatcccaacttttgagcctgctgatcgcgctggcgatcgcggcctattttgcaatccgatggcttcatagcagaaagaaggcataaccatgcgcaatcttaccatgctgacggatctttaccagctcaccatgatgtatggctaccagaagtgcggcatgcgcaacaaccgcgccgtgttcgatatgttctatcgcaacacgggggacgtcacgcaatacgccatcatggctgggttggagcagctcatcgactacataaaaaacctgcgcttcgatgaggacgcgctcagctacctcacgtccctgaacctgttcgacgcgcagttcatcgcggcgctgcgcgatttccgcttcacgggcgatatttacgccgtgcccgagggcaccatcgtgttccccggcgagccgctgatccgcgtgagcgcgccgatcttcgaggcgcagctcatcgaaaccgcgctgctcaacatcatcaaccaccaaacgctcatcgccaccaaggccagccgcgtggtgcaggccgcgcagggcggcagcatcctagaattcgggctgcggcgcgcgcaggggccggacgcgggcatctatggcgcgcgcgcggccatcatcggcggctgcgacgccaccagcaacgtgctcacgggcgaaatgttcggcatccccatcaagggcacgcacgcgcatagctgggtgatgagctttcccaccgagttggacgccttccgcgcctacgcgaagttcttccccaccagttgccttttgctggtggatacctacgacacgctcaagagcggcatgcccaacgccatcaccgtgttccgcgagctgcgcgcgcagggctatgaaccggcgggcatccgcctggattccggcgatctggcctatctgagccgcgaagcccgccgcatgctcgacgaggccgggttcccggaggcgaagatctgcgcttccggcgatctggacgaaatgctcattcgcgatctcaagctgcagggcgcgtgcatcgacatctggggcgtgggcaccaagctgatcaccagcgcggactgcccggcgctgggcggcgtgtacaagctgagcgccgaattggtcgacgggcattatgtgcccaagatcaagatcagcgaaaacccggccaagatcaccaacccgggcgtgaagatgctctatcgcgtgtacgacggggatggcatggccgtcgccgacctgatcgcgctcgaccacgagcgcttcgatcccgcgcagccgctcaccctatttgaccccgtggatacctggaagaccatgacgctttcgaattacaccatgaagaagctgctggttcccgtgttcgtggatggcgagcaggtgtatcagtctccctcgctgctggagattcaggcgcattgccgcgaagatctcgccacattctgggaccagtacaagcgcctgctcaacccgcaccgctataaggtcgacctgtccgacgagctgtggatgctcaagcaatccatgctcaaacacggcgcggaatccgtgcaggcccaaaagtaatcgctctcagtggatacgcggaggccgcgaaacggcctccgcaaattgtttaaccgtttttttactgcggcgcattgacaaggcctttgtaaaccggtataatatatctgttcgcgcggcagtgctggaatcggcagacaggcacgtttgaggggcgtgtgcgcgagcgtatgggttcaagtcccatctgccgcaccaaaccaaacaatccgaacccatctctgattggagatgggttcggattgtttttgcttaaaacgcgatcacggaatccggcaattcttccatctatatgcgcctttctagcggcgaagagatggggaacattccccagcatccctgaacacggctgttgtgcggatcgcttctgcgttactcaacatcctgtagcgcgtcatagccttcttcgccagtgcgcaccttaatcgcgttttccacatcatagacgaagatttttccatcgccaatatggccggtatagagcaccttcttagcggtgtcgatgacactgcgcacaggcaccttgcttacgacgatgtccacctgcactttgggaagcagcgtcgcttcgacgggaatgccacggtagtactcaggctttcccttctgggctccacagcccatcacatgggatacagtcatgccggtgatgccgatggcagtcatggcgtttttgagcgcttccaaccgcgattctttgcagataatctccactttggtgagcttgcgcctgtcatcgctgaaagtcggcatttttttgacaggaaccgcttccgcaactggcgtatcgccctcaacagccgtcgcggctacatccgcaatcggttcaggcagcatggaaaagccagcataggcggacaaaagaccgtgctctgtgacgtctagtccggcgatctcgtcctctgcatccacgcgcagcccgatggtctttttgatgatggcaaagacgatggtgatgaccacggtcacgtaagccgccacgctgagaactcccagcaactgtgtgccaagcaggtgaaagccgccgccatagaagaggcctttttccgtggagacgccggtggcgaacaggccggtcatcacagtgcccagcgcgccgcagacgccgtgtaccgagatggcgccaacgggatcgtctatcttggcgaccttgtcgaaaaactcgacagccagtacgatcacgatgccgaacactgcccccatgattgccgcgcccaacggcgagactgcgtcacagccggcggtaacgcccaccaagccagcaagagcggcgttataggtcatagagacgtcgggcttgccgtagcgaatccatgtaaagacgagcgtcgcgcagcaggcgaccgccgcggacaagttggtattgaagaaaatgaggctagcactctcaatagcggcatctgtgtccatcgccacagtggaagcgccattgaagccaaaccagcagaaccagaggataaacacacccagcgccgcaaaggtcaggttgtgcccgagaatggcgtgcggtttgccatccttgccgtacttgccgaggcgggggccaagcatcttcgcaccgatgagagcacagatgccgccgaccatgtgtaccgccgtggaaccagcaaaatcatggaatccaagctggctcagccagcctccaccccagatccagtggcccgagatcgggtagatgaaaatggagatgcaggcagaatagatgcaataagcgctaaacttcgtgcgttcggccatcgcccctgaaacgatggtggccgaagtagcgcagaagaccgtctggaaaatggcaaaggcccacagcggcaccccgtcgggcagcaggtggctgtaatccctggcgatgccggggtctatccagccaatgagcgcgccgcccgccccgaacatgaggccaaacccgatcaaccagaaacagggcgtaccgatgcagaagtccataaggttcttcatcaaaatgttaccggtattctttgcgcgggtaaagcccgcttcacacattgagaagcctgcctgcatgaaaaacacgagcgctgaaccgaccagaacccacattgtgttgacgccagaaaacatagaattcccccctgaatgatactatctataaaaaacagaaaagacgccagaatgcgcgttagcgcgcacatccgggcgtctttgtccgtgttctcggtcgtataatggccgtcagcgttccgctacaccgagccagcgatgcacttccctggcggcggcgcggccatcggcgagggcgcgcaccaccagcgattggccggtgcgcatatcgccggcggcgaaaaggccgggggcgagcgcgtgggcagcggcggggatatcggggaggttgcgggcgttcagggagaagtggaagcgtccggccatctccgcctcgcagccgacgaagccggcggcgatgagcaaaagctggcagggtagcgtgcggcgcgtgccctcgatgggatgcaggcggccatccgccccgcgcgagacgcgcaccgtctccacggcgcagacatggccattttcaccggcaaggacgcgctctacggtggtctcgaacaggcgcggatccctgccctgcgcggcgatggcctccctctggccgtagtccgtgcgcaaaatgcgcggccattcgggccaggggttgttttttgtccgctgcgcgggcggggcgggcagcatttccagttgcgtgacggacttacagccctgccggaggcaggtgccgacgcagtcgttgccggtatcgccgccgccgaccacgagcacatccttgccccgcgcgtcgagcgcgctcgcgcggccttccaacagggcgcgggtggcttcgctgaggtagtctacggccaacgtcacgcccttggcctcttcgccgggcacgcttagccgccgggcgcgccgcgcgccgccgcagaggagcaccgcgtcgaagtccgcgcgcagcgaagcatcggcctcggtattcaggcgaaattccacgccttccgccttcatcaggccgatgcggcgggcgacgacctccttgggcagcttcatattgggaatgccgtacatgagcagtccgcctgggcggtcggcgcgctcgacgaccgtcacgcggtggccgaggcggttcaataggtctgccgccgccagtcccgccgggccgctgcccaccacggccacgcgcctgtccgtgcggcgcgcgggcacgcggggcgcgatccagccgttgcgaaagccctcttcgatgagatagagctcgttatcgcggttggtggcggcgtcatccccgagcatgcaggccttttcgcacaattgcgggcagacccggccggtgaactcgggaaacggcgcggtgacgagcagcctttgcagcgcctcccgcgtccggccctgatacaacaggtcgttccactcgggaacgcggttgtgcagcgggcagccgtagttcgactggcagaagggcacgccgcagttcatgcagcgcgcggcctgttcgcgccgcgcctgcgcgggaagcgccgcatgcagatacgcaaagtccttcagccgctccgcctccgggcggaagggctcctccacgcgggagtattccagaaaacccgtcgccttgcccatgtgttaccttcctcccatcgcgcgcttgtattctgtggggatgaccattttgaacgccggcagcgctttttcccagcgcgaaagcagggacgccgccttgggcgagccggtcaggcgcgcgtgcgcttgcagcatgcccttcagttcctccgcccacgcgccagttacagggccgatctccagcgctccggcgtggatgcgccgcgcgagggtatcgccctcgtccagcacgtaggccacgccgccggacatgcccgcggcgaagttatcgcccacggggccgaggatggccgcgcgtccgccggtcatgtactcgcagccgtggtcgcccacgccctcggccacagccgccgcgccggaattgcgcacgcagaagcgctcgcccgccgcgccggctatgtaggccgcgccgctggtcgcgccgtagagggccacgttgccaatgagcgcgtcgccgtcgctccaccgcgcgccctcgggcgggcacaccgccagcgtgccgccggagaggcccttgcccaggtagtcgttggcctcgccgcgcagcgtgatcttctgcccctgccgcaagaacgcgccaaacgcctgcccgccgcagccgtgaacttcgatatccgcctcgtcctttagcgtcgtgccaaaggcgcggtcggcggtggaaagcgcgcgctgcccgcgcttgtcggcgcgattttccaaatgcagatcgtaggcgcaacccgggcggcagcaggtgttgcgggaaaagccgagcagcgcggaaagatcgatgggcgcgccctccttcgccttgagcaggtcggcgcggcccacgagttcttccaccgtgcgcgcgcccagccgcgccatgatctcgcgcagttgtccagcgataaagagcatgaagcgctccacgtattccggcttgccaacgaagcgcttgcgcagctggggattctgcgtggcaatgccgaagggacaagtgcccagatggcaaacgcgcatcatgcggcagcccatggcgacgagcggcgcggtggcgaatccaaactcctccgcgcccagcagcagggcgacggccacgtcgtggccgctcatcagcttgccatccgtttccagcgtgacgcattggcgcaggtcgttgcggcagagcacctggtgcgcttcggccagcccgatctcccagggcaaacccgcgtggtggatgctgctcaccggcgcggccccggtgccgccctcgccgccggagatgaggatgcccttggccccagccttggccacgccgctggcgatggtgcctacgccgcccgaggagacgagcttgacggtgacgcgcgccgcctcattggcgcattgtaggtcgtagatgagttccgccaagtcttcaatggaatagatgtcgtggtgcggcggcggggagatgagggagacgcccggcgtggagcaacgcgtctttgccacgtcctccgtgaccttggccccgggcaggtgcccgccttcgccgggcttcgcgccctgcgccattttgatctggatttctttggccgagagcaggtagtcgcgcgtcacgccgaagcggcccgaggccacctgcttgatggcggagttgcgcgccgtgccgaagcgctcgggcagttcgccgccctcgccgctgttggacttgccgcccaaatggttcatggccagcgccatgcactcgtgcgcctcccgcgagatggagccgtaggacatggctccggtcttgaagcgccgcacaatgctctccgccggctcgacttcctccagcggcacggccttgcagcactcgtagcggaaagtcagaagcgagcggatggtgcgcgggccgtcttcttctaccatggcggcgtagcggtcgaagagcgcgcgatcgccgttccacaccgcctgttgcagcgtgtgaatgacctcggggctatacagatgttcctccgcgccctcgccgctgcgcaggcggtgtcggccgacgctgggcagcgccccgccgccggtcggatcaaaaaacgcgcggtcgtggtggtagcggctgtccgcctcgatgcggctcaggttcgcgccgcccaggtagtggggcgtgttggtgaaataggcgtccaccaacgccgcgtcgagccccacggcttcgaacaactgcgcgctctggtaggcctgtagcgtggagacgcccattttcgaggcgaccttgagcacgccgaaggacagcgcctggtcgtagtcggcgatggcctgcgccggggatttgtcgatgcgcccggcctcgcacagcgcctgtacgcattcgtgcgccagataggggttcaccgcccgcgcgccaaagccgatgagcatggcgagttgatgcacatcgcgcggctcgccgctttccaaaagcacggagacggcggtgcgcttcttttcgcgcaccaggtgctgttccagcgccgacaccgccagcaacgaggggatggccagatgttcctcgtccagcccccggtcggagaggatgacgatgttcccgccttcgcggcaggcgcggtcgcaggcggaaaacagcccttcgagagcactttgcaggcttcgcgcccgaggatagagcaaggagatggtgcgtacacggaagtccgggtggcgcaggccgcggatgcgttccagctcttcggcggtgaggatgggcgaatccagttcaatcacgcggcagttttccgccgcggggtccaaaaggttgccgtcgtcgccgatgtagatgctctggtcggtcttgaccttttcgcggatggcgtcgatgggtgggttcgtcacctgggcaaagcgctgcttaaaataggaaaacagcggcggatgcgccttggagagcgccgccaagggttcgtccgcgcccatggacgcggtcggctccacgccgtttgccgccatgggcaggatcatatcttcgatatcttcatgcgcgtagccaaaggctgcgcacaggcgcgcgcgctcttcctcgcccagcggggcggcgggagcgacggggccggtgacgtccttgaggcgcagtatgccccgcgtccactcgctataggggcgttgggcggcgaagcgcgccttgaccgctccgttctccagcagttcgccggtcttgacattcgccacgaggatgccgccggaggtcagccgccagcggcgcacaatatgcgcgctttcctcaaagagcgcgcccgcctcggaggagaggatgagccgcccctcgtccgtcagcgcgcagcgcaaagggcgcaggccgttgcggtccagggaggcgcagaccacgtctccgtcgctatacaagatggcggcggggccgtcccacggctccatcatcgtcgaataatagcggtagagatcgcgccagggcgttttttccgcctgcccctgccacggctccggcagcagcgccatgcccgcgagcggcaggggcatgccgctcatatagagaaattccagcgtgttgtccagcatttgcgaatccgaaccgcccggctggacgacgggcaacacgcgccgcatctcttcccccaagagcggcgaacgcatcgtctcttcgcgggcgtgcatgcggtcgaagttgccgcggatggtgttgatctcgccattgtgcaaaagcaggcgctgcgggtgcgctttcgcccagctagggaaggtgttggtggaaaagcgggagtgaaccatcgccagcggcgaggcgtagtcctcgctttgcaaatcgtcgtaaaaggcgcgcaactgcgtcaccagcatcatgcccttgtagacaatggtgcggcaggagagggagcagacataagcgtcggtctgctgcttttcgaactgccgtcggaggatgtaaaggcgccggtcgaacgcctcctcgcaggcggcatcccgcgggcgggcgagaaagcactggcggatgcggggcatgctgcgccgcgccaacgcgcccagcagttccggatggcagggcacgtcgcgccagaggagcacgcgcaagccttccgccgccgccagggcatcgaagatgcggcagatgttctccacggcgatctcgtcgtccggcaaaaagaacatgcccacggcgtattcgccttcctcgccgagggaaacgcccgcttccgccgcccagcgggcaaagagcgcgtgcggcaggcgcgtgaggatgcccacgccgtcgccggtggtgcccgtggcgtcgctgccagcgcggtgcgccagccgttcgacgatggtcagcgcgtcggatactgtgcggtgtgtggcctgagcgcgcaggtcgatcaccgcacccacgccgcaggattcgtgttccatttgcggatcgtagagcggataagcggtcgtcatggcggtttcctccaggttcatgcgttcgattgcaagatttttgcggccagatcggtcagcttcaagccccggtccatggcgttcttttgcaagtaatggtgcgcctccggctcggtcagggaaaatttgtccatgagcagggccttggctttggcaacggtctgtttttccgcctcgctgcgctggggctggcgcatgcgcataagctgcatgagcatgtccacagcgctggccagctcgccctgggaacagggaacgcgcaggcgaaagagcttcgggtgttcgcaattttccagttgcgcggccttgcccacggccacgacgatggcccgctcgcccagatcccaggcgaggtcgtccaccgtaccgtccggcaggcggcaggcggagacgagcaccccatcgccacagagggtaaaggcgcgcttgacgccgctaaagctggtgcagcgccaggagacggcgatgccgcccgcctccagcgccgccgcgcagcgcgcgcactgctcctccgtcgcaaaggcgacgatgacgttcgtcacagcccttcacctccctcttgcccagcgcgaaccgatcaataggtcaccaaatacttgccgatttcccaatcgctgacgtgggtacggtacgcgtcccactcgcgccgcttgccctcgacgtactgcgtggtgacgtgactgcccagcgtctcgcagacgagcgcgtccgcttccatggcatcgatggcttctttgagcgtgcccggcaggctctcgacgccgcgcgcggcgcgcgccgcatcgtccatggcgaagatgttttcggtgatctccgcgggcggggtcaggccattttcgatgccatccaggccggcggccaggcacacggccagcgccagataggggttgcaagtgggatccgggcagcgcagttccacgcgcgtggcctgagcgcgcgccgccgggatgcggatcagcgccgaacggttgctggccgaccaggccaggtagcagggggcctcgtagccgggcaccaggcgcttgtagctgttcaccagcgggttggtgatcgccgccatgccgcgcacatgcttgagaagtccggcgatgaaggcgtaggcctcgcggctcaggccgcgcgcgtcagcggggtcggcgaagatgttcttgccgtccttaaagaggctcatgttggtgtgcatgccgctgccgttgatgccaaacaccggcttgggcatgaaggtggcgtgcaggccgttcttctgcgccagcgtcttgacggcgagcttaaatgtcataatattgtcggcggtgctgagggcgtcggcatatttgaagtcgatctcgtgctggccggcggccacctcgtggtgggaagcttcgatctcaaagcccatctgctccagcgtcatgcagatctcgcggcgggtgctctcgccgtggtcgagcggccccaggtcgaaatagccggcctcgtcagaggtcttcgtggtaggtgcgcccttctcgtccgtctggaagaggaagaactcgcactcggggccgacgttgaaggaataccccatgtccgccgcgcgctttagcacttttttcagcacgccgcgcgggtcgcccacaaagggcgtgccgtccgggttgtacacgtcgcagatgaggcgagccaccttgccgtgctgcggccgccagggcaggatggtgaaggaatccaggtcgggacgcaggtactggtcgctctcctggatgcgggtgaagccctcgatggagctaccgtcgatcatcacctgattgttcacggccttctcgatctggctgacggtgatcgccacgttcttcagttggccgaagatgtcggtaaactgcatgcggatgaactctacgtctccctcccgcgccatgcggatgatgtcttccttgctgtacttgctcatggctgagacctcccggaaaaaataaagagagcaaaggcgctctatgcatcacacctttgctctgcgcgtttatcatagcacgccgcgcggtcgctgtcaagaaaagattggaacaacaaaatgtaaaaaattcaatatgccatgtatatttgcatattctccccgaaaaatgacattttgaatattgcatcttgcagatttgcgttatttgcacccgcatccccttgacagcggccgcgggagatgctacaattcgcccataatttcacacgcaaagcgatgcggaagaggagtaggccggaagcgctgcattccagagagcgggcgttggtggaagtcccgcatgggcccccggctgaagaacacttccaagcccaaacccaacgcggcaaggccgccagtaggggcggcgtggagacggcacgttacaagcgtcggggcctgttggggcccgcagagaagcaaatcgggtggcaccacggagagcggccttcgtcctgaaatcttgggatgagcgccgcgaaaaatggaggtgccttttatgtgttcgattttgggtgtgttggggaaaacggtggccccggaggccttgcaggcgtgctttgcgcgcacgacatcgcgcgggccggacatgagccgcttcgtagagatcccctgcggctatctgggctttcagcgcctttccatcatggggctggacgagcgcggcatgcagccgtttcgcctggacggcgactatgtggtgtgcaacggcgaactgtacgggttccgccccctgcgcgagcggctgaaggagaagtacgcgttcgccagcgagtccgactgcgagatcctgctgcccctctaccgcgaatacggtctggagatgttccgcgcgctggacgcggagtttgcgctggtgctttacgacgcgcggaaaaaccgccttatcgccgcccgcgatcccatcggcatccgcccgctctattacggggcgatcgagggcggcggcatggcctttgccagcgagccgaaggacctcgtggggctgtgcgaaacgatcctgcccttcccgcccggctgctattgggcggacggccgcttcgtccgctacgccgacgccgcgcacgtggatcagttcgccatggtggacgaagataccgcctgcgcccggttgcatgacctgctaatcgagggcgtgaaaaagcgcctcgacgcggacgcgcccatcgggtttctgctttccggcggactggattcctcgctggtgtgcgccatcgcccggcgcgaactgggcaggcccatccgcacgttcgccattggcatggacgtggacgccatcgacttaaagtacgcccggcaggtggccgagtatatccaaagcgagcacacggaggtcatcatcaccaaagaggacgtgctccgggcgctgcccacggtggtggagctgctcgccacctacgacatcaccaccatccgcgccagcgtgggcatgtacctggtgtgcaagtacatccacgagcacacggacgtgcgcgtgctgctcaccggcgaggtctccgacgagttgtttggctacaaatacacggatttcgcccccgacgccgccgccttccagcgcgaggcggaaaaacgcgtgcgcgaattgcacatgtacgacgtgttgcgcgccgaccgctgcatctcggtcaactccctggaagcgcgcgtgcccttcggcgacctggccttcgtgcgctgcgccatggccatcgacccggcgctgaagatgaaccgccacggcatgggcaaatacctgctgcgcaaggcgttcgcgcgggacaaacttctgccggagaacatcctctggcggcagaaggcggctttttcggatgccgtgggtcactcgctggtggacgatctaaagcaattcgcggaagcggcctataccgacgcggaggcggcggaaaagtgcgcccgctatgcccacgcccgcccattcacgaaagagagcctgctctaccgggagctgttcgagcgcttctatcccggccagagccgcatggtggcggatttctggatgcccaaccgttcttggcccggctgcgacgtggacgatccctccgcgcgcgtgctcgggaactacggggcaagcggcgtgtaacgcgcggtttgtcaacgatcgcgatcatcagaccatgattttttcagggagcgtgaacacatggatactcgatatatctttgtaaccggcggcgtgacttcatcgctggggaagggcatcaccgccgcctcgctgggccggcttttgaaggcgcgcggctatacggtggccatccaaaaattcgacccctatctcaacatcgaccccggcaccatgaacccctatcagcacggcgaagtcttcgtcaccgaggatggcgcggaaaccgatctcgacctgggccactacgagcgctttgtcgatgaaaacctcacccgctattcctccgtcacctccgggcaggtgtttttcagcgtcctgaagcgcgagcgcgagggcggctaccacggcggcacggtgcaggtcatcccccacatcaccgatgagatcaaggaaaagatccaccgcgtcggtgaaaaggccgacgtcgtcatcaccgagatcggcggaacggtcggcgatatcgagggacagcccttcatcgaggccatccgccaatttcaatgggaagtgcccccggagcgcacgctctttatccacgtcacgctcatcccgtatctgaaaacgtcgcaggaactcaaaaccaagcccacgcagcactctgtcaaggaattgcagggcatgggcatccatcccggcatgctcgtctgccgcagcgattatcccatcccgccggaaatgcgcgaaaagctctcgctgttttgcaacgtccccgccaaattcatcatccagaacctcgacgccgaatcgctctatcaggtgccgctgatgctggaacgggaaaaatttgccgacaaggtctgcgaggccctgcaactgcccatccgcgtacccaaattgcaggactgggaggagctggtagaccgtttccagcacccggaacgcgaagtgaccatcgcgctggtgggcaaatacatacagctccacgacgcctatctctccgtggtcgaggccctgcaacacggcggcatcgcccaccgcgcccgcgtgcgcatccgttgggtacaggcggacgacctcaccggcccggaggcggacgtggacgccgtttttgaaggcgtgcagggcattctcgtgcccggcggctttggaaatcgcggcatcgaaggcaagctggccgccgcccgctacgcccgcgagcacggcatcccctatctgggcatctgcctgggcatgcagatcgcggtgatggagttcgcccgccacgtctgcggcctggagggcgcgtcctccaccgagtttaacccggatacgccctatcccgtcatcgacatcatggaggaacagaagggcctggaacagactggcggcaccatgcgcctgggcgcgtaccgctgccgcttggcgccggacagccgcttgcataagctctacggcgcagacgaagtttgcgagcgccaccgccaccgctatgagttcaacaacgcctatatcgagacgttcgccgcccacggcctgcgcgtcgccggcgtcaatccggagcgcaatctggtggaggcggtggagctagtggatcacccctggttcgtgggcgtgcagttccatccggagttcaagtcccgtcccaaccgcccgcatcccctgttcaccggcctggtgggcgcggcattgcaaaacgcttagcgcagggataagagcgctttgcccgcgaatctggcgagagttgcgactcatcgtgcgcggcggttaaggggttgccttgcgtgcagcaagcgttgtcgctgcggacttactatgcaggaagcaaaatccattcctgcatttttttgatttgcagccggactcgccgacgcccagcggttgcgcaaaggcgcggcctgtgctacaatgaaaaaaacgcgcggggaggatgaatatgcgtcccaacattttgcacatttttgtggaccagcagcgcttcgataccatcggcgcgctgggcaatcccatcatcaaaacgccccatctggatcgcctggcgcggcagggcgtggcctttaccagcgcgtatacggcttgcccggtgtgcatcgcggcgcgctgttccatgatttacgggcagtatcccctgcacaccggctgctatgaaaacgcgcccatgcccgaggatggccggccctcctttatggacgcgctcgtgcgcgcgggctacagcgcgcacggcattggcaaatgccacttccatcccgatccgcacgcgctgcggggctttctttcccgcgaggaacaggaggaagtggcaggggaaggcgcggcggattcgccttattaccagatgctgcgggaagaaggctacgattatgtgctggagcccaacggcagccggagtgaaatgtattacattccgcaaatctcccagctgcccgaacggctgcaccccagcgcctggatcgcagaccgcgccatcgcccacctgcgcgcgcaaaaagaaagcgggcggccctggtatctgtttgccagctttatccacccgcatccgccgttttcgccgcccaatccctggcacaagctgtatcgcgcggcccagatgcccctgccgctgctgccgccggagggcgacgcgctcttgacctttgtcaaccgcatccaaaaccgctacaaataccgcgacggcgggctggatttccatttgctgcgcacgatgaaggcgtattattatgcctgcatttcctttgtcgattgccaggtgggccgcattctggacgccttggagcaaaccggccaggcggaaaacaccctcgttctgttcacggcggaccacggcgagcacttgggcgattacggctgctttggcaagcgcacctttcacgataccgccgcccgcgtgccgctgctggcgtggcaaaagggccggtttgaaggcgggcgcgtttgcgatacgccggtgagtctggtggacctggcgcccaccattttggccgcggcgggcgttaaggcgcgggatatggcgctggatggcgaggatctggccgccattctcagcgggcaatcgccccggcgcatggtgtttggccagcacagctacgcgcagggcaatcccttgcaggatccgcggcagcggccgccccgcacgccggaagaggccgccctattgcgcgcctctctttccagctatatggcggtttcgcccgaatggaaatatttctatagcgcgcccgacggccaggaatacctcttcgaccgcaaggccgatccacgggaaacccgcaaccgggctggcgcgcccttttgccaggcggccttgacggaaatgcgcgctgcgctcatcgcgcacttgcgcgcgggcggggaaaccgcgggcctggatggcgagcacttccgcgccttccctccctttgccctgccccgcaaccccgatgccgggctgctcgtgcaggacgggtatgtgccctgggcgcgtagggcggacgatctaaaggcgtaccgcgattagcgcgcgatctgcgccatggcttcagcaaagcggcgtttcgcggcggcgtcccgccccacgtggttgctgctttccagcttttgatacagttgcgcgtaatgggccggactgaagggaaaacccgtttcgctcaggcaggtgggcgcgcccatcgcgcgcaggaaggcgcggaacggttccacctgggccgcttccccgttgtaatagagctgcggcagaaggcccagccccacgatcgctccgtgcagcgcgcccatggtttcccgcgggaatagcgtgcgcagttgataatagagttcgtgcgcgagggcggattggcccacgccgcgcgagagcgcgctcacgatgcccgtcaggggaatgttgaggaaaatcatctcttccagcgcttgcgaagcgcgtcccgcggccaggtccgccagggcggaatcgatttgcccgcgcagtccctcaaaggtaaattgcgccagccaatagccggccatctgtgccagcggccggctgcccttgtttagcgcggggctgccattgcggatttccagccacttggccatggcgtccagcgcgccggcgatgacgtagcgggcgggctgggccgccatgatgtccaggtccaccaaaatggcggcgttttccagagggtagcaataattgcccgggatggcccgcccgtccggcgtgtagagcaggctgaagggcgtgtaggcggcgcaggtggaaatggaggtgggcaggcagagcacgcgcgttcccagctcgcccgccaccagcttgccaaagtccatcgcccggccgccgcccacggccaccaccatatcgcaacggctttcccgggcttcctgggccttctgccgggcagcttcgtggcacacctgccccgcgtgcacgccgaatacgccttccattcccgcctttgccagccccgcttgcaggcgcggccgcgcgagggccagggccgtggggccgccgacgaaataagggctttccccataataccgcagttcgccgccgatttcttccagcaggccgcgtcgcatcacaaagcggcccgcgccaaatttataggaatcatccgccaatccgttcataagcgctgtatctccttatgcgttatcggtatacacccatagtatagcacaaactgcccaggcaaaacatgcccaattgcgcccaaaacctgcccagatttttcgcacgccatatgcgggaaaaacgccaaagctgcctatttttgcgtttatctgtccaaaaacaaaccaacatattgaaaaatccccctatcaggctataataaaaaaacaaggggtatgctttgcgcgccttgccgcgcgacaaaaaggggatgcatatgcttcggtatcgagaaattaaggcccagctgatggaactgatcgcgggcatgcaaaatggcgaccgcctgccttcgcgcaccacgctgagcaagcggctggattcctcccgcgccaccgtcgataaggccatccgggagctcacggaagaaggcatgctggaatcgcgctttggcagcggcacgttcgtggcgcgcaagctggaaggcgtggtttcaaacgcggaaaactggtgcctcatcgtgccagacatttccgaaggcatttacgcgggcctggccagcggcgtggaaagcggcgcgagcctccgcggggcgaacgtgatcctgtgcaattccgagagcaacgcggaaaagcaggcggagtacatcgagcggctgattctggcgggcatcgatgggttcatcatcgtgcccgtggtggcgcgcaacgtgctggagaacatcggtctgtaccgcagcctgtgccgttcgcaaattccctttgtgttttgcaatcgggatgtggagggcatttgcgcgcccatcgtgaaatccaacgactattatggcggctacattgccacggggcatttgctgcagcgggggtatcagcacatcgcctttatcgcgcgccagcgctaccgcaccagcatcgaccgctgccagggctatatcagcgcccttttgcaatggaacgttcccatcgaccgccagaaaatcctgctgatggaggatagccccattccacaaacctgccaagccttgctcgagcgcatggacgcgggcatggcggtggacgccgtgttctgcttcaacgattaccacgcgctggaactgctgcgccagttgcgcgcgcggggaatgcgcgtgccggaggacatcgccatcgtgggctacgacaacatcgacctgtgcgccgcggccactccgccgctgacttcggtggtctacaaaacctatgatgtgggcaaaatggcggcccgggtgctggggaaattgctggacggcaaaccctcggacggctttgcctattatctgatgcagccggaaatcgtggagcgggcgagcaccgcggggcaggatgaaaaacgcctgcgggaaaacgacaaaggagaagccgtatgaacaccaatttgcgcacagaaacggaacaggtcatctttcaaagcggcgcggggggataccgcgaataccgcattccgggcattttgcccctggcggacggcgcgctgctgctggcgtgcgaatcgcgcgcggaaaacaagggcgattggggcgacatcgatatcgccatatggcgcagggaaaaagacggcgcgctggcgcgggtgctgcgcatcggccaatcgcacctgccgcccgatggttctatgcgcacgtacaacaaccccgtgctggtgccggacgggcagaatgtgcatttgctgtaccatttgaattacgagcgggcgttcatccgctccagcgaggatggcgggcgcacctggggcgaagcgcgggaaatcaccacggcttaccgggagttccccttcgcctggaacgtgtgcgccacgggccccggccacggcatcgccatgcgcgatgggcggctggtggccgccatttggctggcaaacggggaagtggccgccgatggactcacgcgcaagcactggccatccgtggcgggctgcgtctatagcgacgaccacggaaaaacctggcgcgcgggcgcgctagccgaaggcatgaccaatgggaacgaaaccacggtggcccaactgccggatggccggttgctgttttgctaccggaacatgaacgaggcgcggcgccggatgctgggtctttcggccaatggcgaaacgctggacgcgctgtggtcctgtgaggctttgccggatcccatgtgctttggcagcctggcggcgggggaaaagggcgtgctctttggcaattgcgcctcgcaaaccgcgcgcgtgaacgccaccgtccgctactccacggacgcgggcgcgcactggaatacgctctggcaggtggacgaggtggccgggtacatcgatatcgcctacgcgaaccgccgcgtttatgcgctgtacgagcgctattttccagaaaaacgccttgtgggagaaattgtgctgaaaatcagcgaagaaatcgccctgtagggcggaaagaaggaagcggcatgaaaaagttcgaggggatttgcgcggcgctgctcacgccatatgacgagagcggcaaggtgaattgcgccatgctgaaaaagcaggtgcgctggctgatcgggcaaggaatcgatgggttttacgtttgcggcagcacgggcgaggcgtttttgctctcgcctcaggagcgcatggcgattttggacgccgtgtgcgaggaaaacaacggcgaaaagctggtgattgcgcacattggccaaattgccacggagcacgccctggaactgggccgccacgcgaaagccgccggggcggacgccatttcctccatcagcccgttttactacaaattttccagcgcggaaattcagcaatactatctggatctgatgaacgcgctggagatgcccttcttcatttacaatttcccggcgttttcgggcttttcgctcacgccggaattgctggatgaaatgtgcgcgtgcccctatgtggcgggcgtgaaattcacctcttcggatttcttccagctggagcgcatgaagcgcgcgcatccggatctcaccatctggaacggctacgatgaaatgctcctttccggcctgagcgccggcgcggacggcggcattggcagcacctacaacgtgctgtgccccacgatccgcaagatttacgacgcccatcgcgcgggcgattgcgccgccgcccaacaggcgcagcacctggccaacgatatgatcagcctgatttgcaaatttggcgtgttcccctccatcaaggcgatcctcggctttgagggcatggatttcggcgcttgccgcaagccgttcggcgcgctctcggaagagggccgcgcgcagctcaaggcgggctacgaagcctattgcaaggcgcggggttgagcgttgacaaaggcggtattttagcgggcttgttgtgtcttagcgccgcaaagaaaaaatgcaggaagcaaaattcgttcctgcatttttttctttgcggccaggtttgtcaatgtcccatgcgccgaattccctattccgcgcccgccaattcccatagatttttttcgaattgcacgcccatgcgcggctcgctgcccacggcgtttgtgatttccatcgcatggtagatatagtccgccgcgcggcgcacagcggcttccaagccttgcccgcgcagcagcgcgccggtcaatacgctggcgaacaaatcgcccgtgcccggatagtggatgggcagggggtggaagcgcatttcgccgtgcgactggtcgcccgcccgcatccaggcgttcgccatggagccatcttccatgggcacgctggtgagcacgacgctacgcgcgcccaggccgagcagacgcttgagcagggcttccacttcgccgcccgtgcgcggcgcggcgcaaaacggctcgtccaaaagcagcgcggcctccgtgagattgggcgtgatcacatccgccgcggcgcacagccgccgcatttccccagggatttcgcgcggcagggcgctgtacatctcgccctcgtcgcccatcacgggatccaccacgcttaagcacttttgccagcgcatcagcgagagcacatgctccgcctgcgcgcaattggccagatagccggaatacacggcgtcgaatttcatgttcagccgccgccagtgcgccagataggggcccatcaaatccgtcaaatctatgctggcaatgccgtcgaacccgcccgtgtgcgtggagagcaccgcggtgggcacgggacaagcctgcacgcccatcgccgagagcacaggcaacaccaccgtgagcgcgcagcggcccacgccgctcaaatcgtgcacgaccgccgccgtcttcaccggttgcatggcaacaccttcttccttctgatcgttgacaaacctttggtttgtgggcgaggattacccggtcgcttgtcttcgcactgttcctcaattcagcatggtcgtcccactgcgctcacaagctcgcttgtggcactccctgcttcattggggtcttcgtaccggcctgcgcttcgctggcccggtattccggggctgcggagcgcttcgcgctgtcctcgccccttcaccccttcggggcttcgacggcaacggcctgtttcgcgcacagcgcgcggcctccgtgcgccccgccgtaggcggcccagtgttccggcgctgcgcactgcgtgtgctcgcgcctccagccgcttcgcggcctccaacggccagcggtcggggcgggaatgcatttttacccacagttcgcaatcgtcgatccacatcgcacgcaaagcgtgcttgtggctcttgttgctcactgggcttacttcggcctgtttccgccacaggcggcggcctccgtgcgccctgcaaaaaatgccagaaatgacgtacacgccgtcatttctgatttaagcctcgttcttccgatactttgtcaatgctctgttccttctgggcgattataccgtatttgcgccaaaacgtcaattcgatttgcgttatttgcgcgcaaaaatgcgggcggcttagggccacgagggcatcacgccgtccgctgcatatagataaatacaaatggagggttttgttgttttatatcggaaatcgccatgcgaacgcgtcctgcccgggccttcggtcacaagaggggaagcatctcacaaagcgcgccctggcgaaagaaatgggttatgcggcttcgccagccgcggcgggttcggtttccgccccatccagcggcgcgggcacaccgctctcgatggttcgatcgccgttggcgtgcaaggcgccgtccagcgcgccggaaacaacatacgttccttcctccgcgatggcgatggtggagccttccaccatcgcgccatcgccatctatgaaaacgccgtcgccggaaagctggatgtacacggcggatgccgcatcgtacgtcccatcccggtcccggtcggaaatttcccagtccgtcgccctttcttccgccgcgttcagcaggcatttcttctcataacgttcaaacgtatattggttcatgttctcacccctttttcgtttgctgggataagtataatggcccaggctaaaaccaggttaaaaggggcgtggcagttttctctcgaaactatgaacaaacgaaaaacccgcccgggaaaattttccccgggcgggtcaggcgctatattctttttatcccaaaatggtcagcggcacgaggatgggcgtgggacggcccgggcagacgatttccaccacaaggcggttcatggcctccacatgctcgcccgcggtgatcacaaacgcggccttggcgtgctgcatgtgcttggagtggggcgcgggggtgaacaggttcttggcgcactccacgctccagccctcgggcgcgaggaagcgcaggcgatagtgcttctgctccggcagggtgtgctggcggagggaaatgctgcccgaaagcgtgccctgcgcgcggatcacgggcttttcatcgaattccaccagcgcgtcggcatagatgccttccacagtgtaggaatagggcttgcgcgcggcgaagctttccacaaattcgcgccccgcgaagcgctccaccgaagcttcggaaacgtccgtctcctcggccagcgccacctcgggcttgccgaacagcaacttcatattgctcggacgcagcgtggtgggcagcaggttgaggatgcactccgtaagctgcgtgcaatcctgcgggaacgggccgtggccgttggtgaggcagatgctcttgatgccgtcgccgatgtaggcgcgccaatcctcgggaatgcccgccatgccgttcatgatgcccaggagcgcgccca

SEQ ID NO: 1042 - DNA, 32759 bp, Unknown
  16S sequences of unknown bacteria
gtctcgcggcggctcaaaggtagtgctcatcggcgaccgtcctgtcctcggaggaaacgcgtcgtctgagattcgtatgtgggtctgcggcgcggacggcgaaaataaccgcgaaacgggcattatcgaggaaatctctctgaaatctctgtaccgaaaccccgacaagctctatccgatatgggacggcattctttacgaaacggtaaaaaacgagacgaatattacgctgcttctcaactgctccgtctgtcggtgcgaaatggacggggagcatatcgtgagcgtaaccggatggcagaccacgacgcagcagtggcatacagtctacgccccctacttctccgattgctccggcgacagtattcttgcaccgctgacgggagctgatttccgtgtgggaagagaagcggcgtccgaattcggtgaggagacctcgcaggtaacggaagaccggcagacgatgggcatgagctgcctcattcagatgcgaaagacgtcccgcgcaactaaattcatcccgccggagcacattgtgaagatgacgccggaggtcataaagctgcgccgcccgaacatgcaggagaccggggagaacttctggtatctggagcttggcggcaaccgcgactctatcgccgacaccgaagaagtgcgcgatgagcttgtggcgctggcttacggaatggtcgactacatcaaaaacagcggagatgtacccgatggggattactggacgctcgattttctcggatttctccccggaaagcgcgaatcaaggcgtatgatgggcgagtacatcatgacacagacggacgtgctctccggtggcaatttccccgataccgtggcttacggaggatggccgcttgacgatcaccacccgaacggattctaccacgcgggcaacccgaacatctggggacacactcccgcgccgtatggaattccgtaccgctgtctgtactcgcgcaatattgacaatctctactttgcgggacgtaatatctcgatgacgcacgccgcgatgagctccgcccgtgttatggcgacttgtgcattgctcggtgaggctgtaggctgcgcggcaaacatcgcgagagaattttcactcacaccgcacgaggtatatgaagaaaagctcggacttttgcaggagcggctgatggaagagggatgttttctgccgaatttccgccgaacaatgtccgatataacaaaaaaagccgagcttgtgacggacggcgccgaaaaccccgaaaatctccgcaacggcatagaccgcaacaaccacacctacggagagggcgagaacggagcatatctcccgctcggaagtcctgtaacatatgtgtttgaggacgcggcggagataaaaaatatacacctcgcgcttgactctgacctcgacagaaagacaatccccggcgactggtgcgaaaaacggcatacaatgcgagcgaatatcgtacccgaaagtccgactatgaccatgccgcagacacttctccgcgcataccgtattgagggagagacggagcagggtgtaaaagtgatattagcggacgaggggtgcaacctgcgtcagtgcgtcaacgtaaaggtaagcggcaggttcaggaaaatcacgctgataccgctttcaacctgggcggagagggagaacggtgcggcgcatgtgttctcgtttgacgtgaggtagtttatccaaaattccatttttaacgaaaggatttataaaatcatgagtatgatgtcaacaatgaacacctactgcacgacagagggaaagaaacggctttctcccgaggcagtgcagacggaaaaggggctgtacaggtatattcttgccgatgtgcttcccttagccggagaaaacgaagacgcgtggacgaaaattcaaattgtaagaggttttcccgaagagatacggcggcagctgaaaaatctgggcgcatcagagcgggagcttgacacggaggacgcgtttgcagtttgcggaaagggcgacgccatcacagtctgctccgagggtgagcgcggcttgctctacggcgtatatgaggtgcttcagcaggcgcaggctgacgacggctttgttccgggcggaatccgttttgcggtgccgcagtgtccgttccgcggtttgaaggtatatatgccgggagagaaacagcttgaccagttctacaaaattgtagatatgctgatgtactatcgctacaacaccatcataattgaggtcggcggcgcaatggagtacaaaaggcatccggaaatcaacgaaagctgggtagaatactgcaaggagatgagccgatatccgcagagagccgatgaagtgcagaatatgttcggctgggcaaagaattccatccactttgaaaacggagacggtaatttcctgccgcaggacaccgttcgcgagatggtagcatattgccgtgagcgcggtatggaggtaattcccgaggtgccgtgcctgagccatgcggactatctcttaaacgcccatcaggaattgtccgagcgaccctacgacccgttccccgatacctactgcccgtcaaatcccgatatatataagctcctgttcgacgtcatggacgaggttatcgacgtgttccgtccgaaggtcatgcagataggtcacgatgaattttacacctacggactttgcgaacggtgcaaagaacgctccgctccggaaattctggcaggagacatcaaccgcattcatgaatacctcgccgcgcacggaatccgtcttatgttctgggcggaaaaaatgctgaatcacatcacaagctatggcgagggcttggcaggagcagaacgccattgcagatgctcccgaaacactgtgcatgatatgcccgcaacctatcccgcgatagatatgatagataaggactgcattgcgcacaactggtactggggtcttagcgaaaagcacgacgagacgttcctctcacacggctttaccatgacctacggcaactgggacccacgcggaatcatcaactggcagcagcgcgtggaagccggagcaaagggtgcagctccatctcactggacgacgcttgaagaggtaacaatgcagcgaaacggcgtactgctcagccttgttttcggtgcgtacctcttatggaagacggattacaccgacgagaaatacgacgcgctgataaaggcaagcatggaggagctgtacctctaccgcaaccgcaaaaccatcgcaaaggcgcatctggaaatagagcatatgacgacgatacgccgcgagcacgtctatatcaccagcgcgccgatgctgcttgagagggacacggtcggcaagtatatcgtcacataccgcagcggcagaacgcttgacatcccgataatctacggcgtaaacataatgaacggcgcgtgcaactgggagcgttcccgcaacgaggagtatgactgctacaatgttgactgctccctttccgaggtgacgtttactaccctcccgcagctgtgctcagacggcacgacttccttccgctatgtcgtagaaaatccgtatcccgatgaccctatagtcggggtgcaggtcgttaagacagcagatgacgacggggatattttcctgctcggctttgccgcccgtcagtcatttgcggaaaacgaggacatacgcgccggacttgccgatgtgaataagctgcgttcgcccgtgatttgaacgacttccgcaaggactcaaacctcatcagagtatcctaaggagtgcgcacaaaatgtcggaaatagactacgaaaaactctacaaaaaatggcactatcagatattgcagtaccccggagacgccgcgatgtcggtcattcccgcaggctttaccggattctgccgcgataacaaaacaaactccacgcatatccacaagtgctacgagctgtgcttttcgcttgaggggaatgcggagtacatttgcggcggcaggaagtacaatatcaagccgtacactatatttatagccgacccggacgtcacgcacgagataagactgccgctcggcgaggaaaacggacttttcacaaaatactactacctcgtcagcttcggggagatgtcggactttacaagaacgtcgagcttagttcgtgagggtgcgaaaaatacaggtacagtctccgacgcgaatattattgcaaattttatgctctcgcacgagaacgcagtgtacggaatgaaggattttatcatgggacacctgcgcagactgtcggaattcggggagagcgacgcggactacatcgacatataccacgagacgtactccttcatcatgggcgcgctgtaccgtcttgcttcgtcggagaataaggcgcaaaactgcatctttgagacgggtcttgaggtggagccgggcagaaacagccgcgttacctacgaaacctcgctcagatatattgcaacaatggtgtatgaacgtgtgaccgtcgcggatatcgcggaaaaagtgcatacatccgtgcgcaacctcgaatacctcttcaagcggtacatgaacatgacggtgaaggactacatgatctccgtcaaaatatcgtccgccgccgctcttctcagaatgaacgcaaaggtgtcggaaacggcggacaagctgtgcttcgaggatgtttccacattcacgagactgttcaaaaagcacatgggagtcacgccgaagcagtatcagcagcagtgtaattccgacgaaaacgtattcgggacggtctaccgcgaaacaattcccccgaaaaagagcgaggagaaagaataaatacagcgttttcgcattttgttaatttaatttcgcattatactattttgtcggattgctttatcctttataattgttttagtgaaatttgaacgaaaaatacaaaacaaaggagaaaggcaattcgtatgaaaaaatcctacaaaaaatcgcttggcttaattcttgcgcttgttatgcttgcttcgactgcgatgtcgtgcggcaacagaccggaggacgaagctaagccggacaataacgttcagtcaactggcgcgggagacaaagacagcaccgctactgcggagagcgaaacggaagaccccgacgcgtatctgtatgaagctcttccgaagacagatctttcgggacgcagcttcaacgttctcattcccactcatcttgagagcgaatacatcgcggagcttacgggaaacgtgcttgaagactcgatatacgagcgaaatcttacggttgaggacgctctcggagtgaagctgaactttatacccatcgcgggactttgggacgacagaacaaacttcatgaccgcgataacaagctccgtcatggcaaaggacgacgcgtaccagctcgtcagcggatatgcggcatacatcacctcgatggcttccgacggagtgcttgcaaactggaacgatatatcggacgttgacttcactaagccgtggtggaacagcaacatcgccgacgagatgaacattgcgggaaagctgtacttcgtgacgggagacctgtcgcttacctcgacagaatacctcttctgccagttcttcaacaagggacttgcgaaaaatctcggacgtgaggatctctacacaatagtaaaagagggcagatggacgctcgacgcgctgaagcagtacactaccgacgtagcatacgacgtggacggcaacggaaagatggataaggacgacagatacggatacatctccgacgactccaactacatttcgggattccaggcagcctttgacgcagacgtaacgcgaaaggacgagaacggaataccccagcttgcagtaacggacgagtcgttcatcaataagttcatgtcgctctacaccttcctccgcgaaactccgagcacgtacctcgattatatgtcaacgagctttgcgggtgaaaacgagactacggcaggtatgttcaaggcgggaaacgcgctcatcatggcggatatgctcggaaacgcgtctactctccgtgactccgacgtggatttcggtattgtaccctacccgaagtacgacgaagcacagcagaattaccacacgacggcatgggacgcatacgcactgttctgcattccgataacctccgacctcaaaacaacgggagtagtggcggaaaatctcgcggcatattcgtataagaccgtagttccggcgttctatgacgttgcgctcaagacaaaatacgctcgcgacgtcgaaagctccgatatgatagacataataagagagggcgcgaccttcaacttcggcacggtaaactccatccactgcgcgaactgcggacatatataccgtaatctggttcaaggctcaaacccgaacattgcgtcatatgttgcctcgaacaccaagataatgaaaaaaagcctggagagattcgtaacggaatcctacctcggataagaaacagcataaaaaaagctgcctgcaagagattacgggcagtttttttgtgttatgtgggtgcggagacttatccttcatatatccatattatcggatgctccgccatttcgggttgcataataatttttcggttaacattatccatttcattataaatttctaaagttgttatgaaaacattgtatatgccaacattttccggattattgacgtcaataggaaatgtatgaaaaaacattacgtaggcatttcctccatattcaaattcagtcattgcccatatttcagactgtttatattctccgtactctacatcgccacttgctgacatcccagaatatttccacgatgttattttgccgccaaagcgttccataaaatcatcaatttgttcgtcggcatctccacagtcggctaaagccttttgagaaaacaatgctttaaatgctcccttgtcgctattttctattgcagtgaatataacctctgtttgagcctttgctactcttccttcgtcataccttttactttgcctattgattctgatggtctgtaatattgcaagcatattttccgccgcgtaattcttcgctttcgacatacaggagttaaatacgaacaggtttaatatcatgagcgtaataatagaaatgcttgttgcggctataataagtccggtatgctttttcttcatgcttccgcccccattcacagcagcacacgcgatatcacattacctgacatatcggtcacggtctttgttccgcgggcgcaggtgaatattttcctttcgttaatataagcctcgcacatcctgccgtttttcagcgtgtagcggtcgtcgccgaaatactgcgtgtattcgctttccgtgccgtcgtcgaccgagctccattttagcttgtcccgctcgagcttcacgccgtacatacggttcgtgtattcgaggaaggcaagtatcgcaggtccgtatgttccgtcgccgtattcggagggctgcattgtgtaggtgtcgtactgctgagtgaagcgcaggtcatgtccgacttcacccacagcgcggcacagctttcgaccgaggacggggatgagactgtcaaagccgtagttttcaagcgcgcgtatggctctctgatatgtaagaccctgcggctgaccgctccagttgttgttcggggaggagaggtacagcttgtcgtttgcggcaatggacggcagcggcatgggagtccaaaactcgtcgggattcagaagatgctctccgacaaagcgcgacgccatgtatctgtcaaatccgccgtggtacatcacgcgaagattgttgtggatgagcacatccatcacgcggttgtcgcagtccctgtcgtagcacgcgccgcgtttgtcctgccacagatacgaccgcagctttccgcgaacctcatccgcacgcttttgccacatgtccgagagggaagtctccgggaacagtatcgcggcgatctccgagagagtttgacgcccgtccaccgaatacgccatcacgtccattgattcgtaggggagtcgagcctgaccgtagggtgccgtttctcccgcccacgcttccggaccaccgagaaatctcgtgcagttgtcctctcccgtgtcccatacgcaccatgactcaaggcagccgtccccgtcggagtcgcggtgcttccagagatatgcgtcgaaccgctcgagcacgtcgtacagcatttcgagatactctcggtcgtgtccgttcagaaagtacatattcagcgcgtgatacgggaagcagtacccctgaaaatgcgagaacatgaggtcaagcgggtgtttttcgtcgccggtgaagcgtatgaccgaggggattcttccgtccgcgcgtatgttttccatgaagaagagctggttgttcatcgcggcttccatgtttcgcatagcgtacatctccccgcccatcggctgagtttcgagccatattccgttgtagccaccgccctcgataagcaccggacgtgagcagaaggcgtgtacgttgagctgagccttttcctccgccgcgtcgtagaccttctgccatatcgggtctgatatattgaattttacgtctgtataaaccatatattcctcaaaattaataagagttaaatttttgaagcggaaagagaggaaaaatcagtctgcgtatttttcgactacctttttcagactcttgttaaacaccgtctgcattgacttataagtagaggcgaaatcgggattgttgcttacaacgagatcgcggaataaatacgagagctgcggtattgtatcattgtgaagaattgatatgtcatagtgtctgcctgccataatgagatcaagcatatccacagaacgttcgtcgcgcgtatattttgaagtcagcgcaatatcgtagtacgccggaataacggtacgttagttttcgcagctcatcgcttcaagcatagcgcctgttattgccgtatcggagccgttcgcgggaataacaaatacggaatagttgtcaacacagttaccgtaatactttgtttgattttcatcatacttcgggtaaggtatgacaccgaaatcaacgtccatatcgcgcagctcgttgtagagtgtgattagtcttgcggcaataaagagcgatttgttagctttgaacatatcgtacttttcccagtagtacaccttgtacgagccttcattattataatacagattaagtatcttttcaagtccgcttaccattttttcggaattcgcgaccacttcaagctcgccggaatcgtttgctgcgatgagcggaatatcaaacgccgcaggccatacgtcaagtccggttacttcatcgcctacaaatccgtatgtatcgtccatgtcgcgcgttccgttgccgtttgcatctacatagacagcagctgccttttctgcaagataatcaatcgtccatctgccttcgtcaacgacagtgtaaagatcttcaatgtcgtaattttccgcaagctgcttgttgaaaagaattccgtatgcgagctgcaatgttgttaccgagaggtctgtgactgccgcgtactgtctgccgtttacggtgaaagcttcgttcgcttccttaggccaccatacattgtcgcggtttatatactgtacatcgttccagctgcgcagataatcgcccataatcagaccgcctgttttccataccattacggcagccatatcaaattcatcatcgccggacatgattgaagttttcattatccgaaacaggctgtaccgaggtattgttttcggtatcgtccgttttatcctcttcagtcccgcatcccgttaaccagaacgcaccgcagatcatcgcgcaggcaagcatagcggaaataatccgttttttcataattcttctcctttaataaatttataatatccggcccgccgagaaaaaacatatgttaactccgagcttagtataacacaagttaatatgaggcgcaatgaagtatatttctgattttattgacttatattaacaaaaatgatatactaaatatacgttatcgtgcattgctcggttaatttaattcagtctggttcagcggaggtacaaaatgaacaaagaagaactgcaccgcgcactgacggcttatctgcctgaggaggtcgaatggaaaaagaaatatctcaaaagccttgccgacggagagctgcctgcctgtatggtaaacgatccgatgaagattctgtccgatgattccgacgaacgcgacaccagtctggattacggcacgcattattttgaaggtctcaggaacatcgctctgcatcgtcattggcgatattttacggtatcatatcacgctcatcagtatgttgaggttatgtatatgtatgacggaagcggaacgaattacgttgaaggcgtaggctgccgcatgaaaaaaggcgacttctgcgtgatttcaccgaaagtctaccacatattcgaaaatgacggcgacagcgtactcgttaatataatcattaaaacagactatattgagcatttattcaccgacagctttttgctttcacatccgtttaccgattttatgcggcagatttcgggcggaacggaatatccgaaatatctgtatgtcgaaccgtgtggtgacgggaaaattaccgatgcggcagacgagcttctctgtgcgtattttgaaaaatcagcgtgcgtgaactgggagattgaagcactgctcacgcttttattctcccgtattatcacatcggaaaaatgcaccatcaccaaatctgagttacagtatcgtaataattcggtggctgtcgcgatactgtcgtatatcggaagccatcttgcggaaacaaatcttgcggacacagcggagtatttcaactattcgaagccgtatatatgccgactcatcaaggaaagcaccggaatgactttttcggaatacgccgcgaaactgcgcataaaccgagcttgtgaattgctgcgccactcgcagatgcattcgtcagacgtcgcgttcaccgtcggataccgcagtgtcgaatatttcaatcgctcattcaggcgtgaaacaggaatgagtccgaacgagtacagaaaaagtcaaaaaacgtaaaaggataacttttcgtctttccggtatctcctccgccgcgtcgcaggccttctgccatatctggtcggatatagtgaattttacgtttgtgtatttcaggctggtggggatagtatagcacattatggagtggcaagatgagtttgcatcaccgactgagcgcatatgaacaaaattaaaatttttagtctcccgctaactttttgttgacattccgaatttttataagtataatataatacggctcttaggcgagggctgtattttttaacatcgagttagctatggctaaccaacttttgataaaggaagttatatgagttcatccgaattgagatatcttatcgccgcaaatgagcttgccggagaaaccgaaaacgtgaagcagaccgacgttgcgaataggcttcgtgtgactaaggtaagcacgtacaatgcaattgagcggctgcgcgagaaagggcttatcgaaaagaccgaaagaaaaatcattctgacggagcgcggcaaggagatactgagcgaatatatgattattatacggttcatatcggcgcatttgtctcttcactgcggaacgtcaaaggaacaggcatatgaagacgcgctcaacgcaacctgtgctttttccgacgagacgcgcaacggtgtggcaaactatataaaatccgaaatggaaggagcgagacatgagccgagaatataagcactggaatacggaaaaaaagctgattcccgtaatgataagaatgtactgccgcggcaatcacaaggcggagagaaaagcggaaggcgtaaagggaaaggagctgtgttccgagtgcatgaagctcgcagaatacgcggcgttcagactggaaaaatgccctttcaagagagacaaaggcttctgctcatactgcaaaatacattgctacaagccggagtatcgcgcggagatgaaaaaagtgatgaagtattccggtccgagaatgctgctgccgcatccgatattcgcgatgtcgcatgtaacggcaatgataaagcataaaaaacagagcggagaaaaagacaaggagcaggcaaatgattgataaagagctgtttaagctgataggcgggaataaaaaatacatattcacagcggtgctgactcaggtgatagggcttgtggcaaacgtcgctgtcacgggaagcgtctgctatgccgtttaccttttaacagtatccgccgcgtattcggagttcgtttatccgctaatcggcgctgttttgggtatcgcaataagatatatctgttcgcgattgacaggggagataaaggacaagctcggaaggcaggtcaaaaaagacctcagagagagggtgtacgacaaaatagtaaagctcggcgtgagaactaccgacggaatgagcatggcaggcttgacgcaggttgcggttgaaggcgtggagcagctcgacctttactactcctcctacctgccgcagttcttctttgccatgatagcgccggttgtgctgtttttgatttgcgtgcggatagactggagaacatctctcgtgctcatagcctgtgtgccgctcatcccggtgtcaattgtggcggtaagcagatacgcaaagaagattttcgcaaaatactggggaaaatacacctccatgggagacaaattcctcgacagcgtgcagggactcaaagagctgaagatattcatggcggatgaaaaacagcaccggaagataaacgaaagcgcggaagaattcagggttatcacaatgaaggtcctcgtcatgcagcttgcaagcaccacgataatggatttggtggcatacggcggcgcgggtgcgggaatagctctggcaatctgcggaactgcgttttggggactgaatccgatagcggcgcttttcctttgccttgtcgcggttgagtttttccttcctcttcgtgcgttcggctcggctttccatgtggcgatgaacggtgcgagcgcgggcaagaagattatatctctgctgaatgctcccgatccggaatggggtgagaaaagcgtcggcggaaaagagataaaactcacggacgttacgttctcatacgacggaaagcgagatgttctgaaaaacgtaagcatgactttcccggaaaagggcatgacggctatcgtaggagagagcggatgcggaaagtcaaccgtcgtgaatatgcttgtaggcgcgttccgtcctcaaagtggtgaggtgactgtaggcggcaagcagcttgagaaactgtcgcgtgagaactggtattcgcacctttccgcggtaagctacaatacgtacatattcaacgaaagcgtgagagacaacttcaagctggcgaaggaaagcgtgaccgacgatgagatttactccgctctcgaaaaagtgaatctgaaggagttcatctcggaaaacggcggacttgacaaggtaatcacagaggacgcaaacaatatctccggcggacagaagcagcgtcttgcattggcggttgctctcttgtcagacaaagacatatacgttttcgacgaagctacgagcaacattgacatcgacagcgaaggcattatcatgaagaatatcaaagcaatatccgaaaacaagagcgtcatcgtgatttcccaccgccttgcaaacgtcgttacatccgacaacatctactacatggaggacggagaggttcgtgaacgcggttctcacgagagcttaatgagcgcaaaacaaggctatgcacgtctctataacgctcaaaaaacgcttgaaatgtcctatgcggaggtggcaaaatgagcaaaaaatcactcagaagaagcggagcgaagataatggcaagtctcattctcctgctcggcagcttggcttacataatggtattggcagtgctgaacggcagtctcggctttgtctccgcaatgggggtgacggttttcggtgcggcaggcgtagcaaaagcactcggagaagagatatcgctgtcttacggatggataatcggacttacgataggctgcggcgtgcttcgcggagttctgcgttatttcgagcagtattccaaccactacatagctttccgtcttttggcggtgttgagggataaaatcttcggcaagctgcgcgttctctgccccgcaaaactcgagagcaagcaaaagggaagcataattgcaatgataacctcggacatcgaaacgcttgaggttttctacgcacataccatctcccccatatgcatagcggtgcttgtttcggcggcggtgttcctttttgtgggattcgtttcaagctggtatcttgcgcttgtcgctctcacaggctatgcgttcatcgggattgtcgttccgctaatctcctccggcaggcttaaagaaagcggagtaaaataccgtgcggaatttgcgtcattctcggcgtattttctcgacagcataaagggcatcaaggacatcgtgctgaacaacgcgggagaagagcggaaaaaggaagtaaacacccgctcggacgaacttttgagagagacaaaaaagatgaagcatgatatcacccgcgccgcatccgcaatagagcttacggtgtcggtattcgtgcttatcacgcttgccgtcggaattgtgctcgtgaaaaacgatatgctgtcgctcggaagaatgattatcggcatggtaacggtgttctcgtcgttcggacccgtcatagcggtggcttctcttcccggcaaccttacgcagacctttgcgagcggcgacagagtgcttgacctccttgcagaaaagcccgcggttgaggaagtgacaaacggcagagatttcagctacgataagcttgacgtaaaggatctctctttcagctacgacggagcaaaagaagtgctgaaggacataaaaatgcacgcggaaaagggtgagataatcggcatcataggcgaaagcggctgcggaaaatctacattcttaaagctcctgctgaggttctgggagagaagcggcggcgagataaactacaacggcacagacattgacaaaatcaatacaagctcgcttctgaaaaacgtaaccatggtttcacagagcacgtacctatttgaagaaacgattgaagacaaccttcgtatcgcaaagcccgacgcgtcgcaggaagagattgaaaacgcctgcaagatggcatcggttcacgactttattatgaccttgcccgacggctacaaaacgaaggtaggcgcgcttggggacaacctttcagcgggtgagaagcagcgtataggtctggcgagagcgttcctgagaggcagtgagcttatccttttggacgagccgacgagcaatgttgacagcattaacgaaggcattattctgaaagcgctcagggagcaaaagagcaaaaagagcattattctcgtatcccacagagaatcaacaatggcgatcgccgacagggtatacaaagtcaacggcggcgtaatgacggaggcaatataatatggatgaaaaaaagaaaatcagcgatatagaagaagcggcgtccgcacttatagcaaacgcagaagaaatatccgccgataagccgaaaaccgaaccgaaagcagtaaaagtcgagagcaaggagacattcggaaagtacaaaattaaagacatagtgtttctggctgtaattacggcgtgtacgctgattacgggagctgtaatgccgcttctcgtaaatgtaccgctgttcggcataatacagctcggattgggactgcaattttcggttttccccgtaatcggtatgatgaaggtaagaaaaccgggcgcgcttcttcttcaggcaatattcatctcggtatttctggtgtttatgttcccgccgatggtgttcatcattctgtgtgcgctggtagccgaagccgtgacgctgcttgtttttcacggatatgaaaacgattggtcgtgcgtgcttgcgggaacactttatatgccgctcactcttccgctgatgtatctgtattacaacgcgttctataccgtcacgggagaagagaaggcggcgacaagtatgtttttgggcggtgcaaatcccggcgtggttgtcggcatctcgattgcggtcgttgcgctttgctttgtcggctctgtagtgggaatgcttgtctcaagagaactgaaaaaagccggagttcttaaaaaatgagtttcttctctttcaaacataagatatatcccatttttgtgtttttggcgagcctgtttttgatagtgttcgggctttgcatggcgagagacgtgaaatgctcatgcttcttggcgttgtgctttgtgtggctgactgtgttcggatgcggaaaaagctgtattcgcgtgctgccggtacttgccgtggtcggaggagcgttttcggctgtcgcgtactttgcttacggaaacgatattaatacagccgtcgctatgtttaaccgttttgcttcggtgtttcttgccgcagcactgggaatgagcgtagagcctgcggatatgacgagaagtctttctgctttgaaagtgccgcgcggagtcacactcggtatgcttatcgccttatcttttcctccggttctcggtgcggagataaaaagagtcagagaagcgatgaaaacacgcggcgcgggaagcatacttaatccgaaaatcctgtacagagcgtttctcgtgccttttgtgatgagacttgtgaatatctctgacacactgtctctctctgtggaaacgcgcggattctcgcttgaaaaaactccgtacacggtatacaaaaaagaaatcgtttgcttgtcggacgtgctgtttattttaggacttgccgcgggtgcggtacttacggtggtgttatgaacgcgatagagctgaaaaatgttagcttttcctacgacggggaaaatcaaataattgacagtgtgaatgccgcgatgtcctacggggaagtgaaccttataacgggacattccggagagggaaagagcacactcttatatataataagcggcattatcccgaatattacatacggaaagctgagcggggaagtgcttgtcggcggcgaggatataaagggaaaacgcctcggcgagatatgccgcaaagtcggtgtcgtactccaaaacgcggacgagcagataattcagaaaaccgtagaggatgaaatcgcgttcggatgtgaaaatctcgcgttttctgtcgaaaaaatcagaggtcagatagataccgtgtgccggctgatgaagtttggtaaatcatggcagagccgaaaactctccggcgggcaaaagcaaagacttattaccgcgtccacacttgcaatgggacagaaaatcgtgatacttgacgagcctcttgcaaatctcgacacagccggtgcggaaatgctgatgtccacgctgaaaacgctcgcaaagtcgggatattgcattgtcgttatcgaacacaggcttgatatggttctgccgtttgtggacaaggtttttcatgtagggaataaaaaggtcgttgggataacggatatagaaagctacctcaaagaacagtccgcgcccatttcggatgtctgccatgagttttgcggaaaactgcccgtgttttctctctccgacgtttcgttttcggtaaaagagagggatatcttaaaaggcgtgacttttgacataccgaaaagttcgcgcacggttcttttaggtgaaaacggatgcggaaagacaacactgctcaggcttatatcccgtcttgaaaaagcgaaaagcggggcgatagtgcagaatattgatgaaaaattcgcgaaaaacggcaggcaaagcaaggagtggtacaaaaaggtcggcgtggtttatcaaaatcccgactatcagctttttatgcctaccgtggaaaaggaaataaaattcggggcgaaattcgaagaatacgctgacagaacggcggaaaaattcggtgtaaagcacctgtactcacggcacccgcagtcgctttcggaaggtcagaagagaagagtttcaattgccgcagtcgcagcctcggagccggaagttcttatattggacgagccgacggtggggcaggactacaaaggcttgtgcgagatggtggatgtgctgaaccgtattcatgaagagacgcataatacgatgattaccgttacgcatgacaaacgctgtgccgccgcattgtgcgatatatccgtgtggataaaagacggaaaaacctgcaaaatcggcggaaaagagcttattgatgagttttttcgcggaatacaaagctgatttataattcgcggtacgtataaataaaaaaatctgtccgacacacctcacgcaggcgttgtcagacagatttttatctataactcacgcatcccacaaataccgcttcaggtcaacatgacacgcatccttcagctcgacaccctcacgccacagaagctccgcctgctcatcccaaccgggaactaacctgcctgcgtgattcacaacgcgatgacacggatatctcccataatagtccgcacggctgagcactgttcccacaagtcgcgcgttccgttctcttccgataagccgagcgatttgaccgtatgtagccacacgcccctcgggtatttcctctacaaccgagagaatttcataaatcagccgctcatccgataattttcccatggtttcactcctgtcatataaattcaaaacccctcattttgcgtacattgtcaactcttccacaaccgagagaaaacgcatgtctctgcgaaggcagtcgtagcgcgggtgctgcattctgtcaagcatatagtagcactgcgtgtgctcggtgaactcatgaaaatcctcgcttttttcggggtaaatctgcgtgtcgactaagatggacgaaaaatacctgccgtggtcgttttgatatgacagatcgcaggcaacggaatgaccgcacatttcctcgagagagctaagagcgtcttccgttttgccgagcgcgatttggtaagtggaaataagccagtgattgaatgccaaacgtccgtggtgatacataaggtcatctccgtaaatcatggaatacagctgatttgacgtccgaagcatttcgattttgtcctcccatgttgacggatcgttcggaaggtcgtcgttcagcgcaaggttacgaatggcgataccgagagcgtccgtgagcttgtctatctcatcctgaatgtagaacttggtttttccgtctccgattccgcaggacagcgtgtgctcccgacagtatttcatgggagtgagcagctttaccaattctgttattttgtccttctgcccgctctcgctgtataagctgacaagggtgtttatggcgtcgtatcttgtgttctcgtttgcgcattcgttcacaacggtccgcagaagattctctatctctccgataagcgactcattatggctctcctgccacacaaaatacaggcacaccgcaagattatccctgatttcatagtcgttcgggtagcgcgtgaaggcgtttcgtgcataagagaccctttcctcgactgagccgacctcggagagccgctccagttcttttttgatatcggcaagctccttttctctctcggaaagcctgtatccgataagctcgtccacgctgaccgagaaaaagtccgccaaagccggtagaagctcgatatcgggatatccgccctctgattcccagcgtgaaactgcctgaggtgttacgcctatggctgtggcgagcgcgtcctgcgtgatgttgttttccgtgcggagctttttgatgtttgcgcctattttaatgttcatgtcatacctccgaaaggtttgtcaccggtgcagtcttattatagcatgggagcatacgggaaagcaattatcaattcattgttgatgatgtaaacggatgcttgatattttcttatgatttgctttgtgaaaatggaaaaagaaaaactcccgtaagattctacgagagcttcgattgcggggaagggatttgaaccacatgacctccgggttatgagcccgacgagctaccagactgctctaccccgcgatattcaattcattatcgaaaacagatgccggagaccgggcttaactctcgttatacgggattttaagtcccgggcgtctgccaattccgccactccggcacatttcccacgagaggttttctttaatgctctgttattataccacaccttccgcgccttgtcaagagctttttgaaaaatatttttattcttctctgaaaagcagaaaaatcccccgccatacagttttacagcatagcaggggagtgtaatcagtctttgaattcgtcagggtcggtcgtcattacattgtcgatttttacgctgacatttttcgatttgtcggtgtattccgtgtcggacgccgtgtagattacgttgttcgttatcataaccgcgctgtttttctgtctggaggtgacggagatgggcgttgcggtggagtaaatagtgtttccggtgatgcccactgccttgccgcccgatacggataccgcgggaatgtcgcagtcccatctgtgtatgatggagcagccggttatcgttacggtcttgccgccttcgatgttaagcgttctctcgccgtttgacttcatctcacagccggataccgccacaaaagcctcgctgttcttcattatgttgagtcccatgtgatgagtccaccatgtaccgccgactattgtgacgtgatggtctccctcgcctaccttgaatccgatgcttgtgtagtcgaccgagcagtttgtgaagcttccccagcagctgccggtcttgctcttttcaatggagaatcctacgttggcattgaacgcgaagaggtttacgcatctgatgtcgtcgttgtgcgcgaacttgaacgctatcgggcaggtttcctcggggttccatacctcgacattgttcacgcacggcacgtcatatgttcccgcgacataaacgccgatttccttcgcttcgactatgaatatgttctcgatgaagcagcgtccggggtttgaggtgtcgtcggtcgcgattccgatgtacggcgtgtgtattctcatgttggagactcttccgcccgttccagttatctgtatcgtaggcttcattgtactgtcgcccgattttccgtgggactggatgttgagtccggctacgcttccgcttcttacgtcaaagaggggcgcgttcatgttagcctgttctatctttggcagtccgcagtcgtcggcagtccatgcgcccgattcatagccgtagagagttacggatttcagcgtaatcgtgtcggagattatataagttccggcggggacataaactggaagtccgtccttttccgcttccgaaacagcttttttgaaggcttcggtgtcgtcggttttgttgtctcccaccgcgccgtagtcttttacgttgtgcagtaccatattaactacctcctcgggttcgttttgcggtacatcatgcgcagccgttgattcttcgggatatgtctcctcagattcgttttgcggctcgtcgagtgtgttctccgtcacttcttcgggatataccacctctgtgtcgtctttctggcatgagacggcggagagcatgagcagggagagaactaagcagagtaatttctttgttttcatatgtacaccttgggttgctattttttagtatgttaccatattcacgcggactttgcaatagttatcacaaaaataacgtgaaaatttaatcaacctgtgacaaatgtgaaaagtttattgaattttaacatcggtgtcatcactgcgctcgttgagatagagtaccgtcgcttcaccgtcgaatttcagtgcgtctccgcgggattttttcggaacggagtggtattcctcgccgaacgccctgttgaagctgcggattgagccgaacccgctcttgtacgcaatctccgtcacaggcaggtcggtggtggtcagcagctcccgtgcgtattcaagcctaagctcatttacgaagcggcggaagtttatccccacagcctccgagaacacgcgtgagagatagtgcgcactgtacccgcatacgtcctcgaggtcggtgagtgtgataggctcgcggaaatgctccgatacatatgcgaatatcgcgccgattatgcttttgttcttccccgtatcgcacggcacgagcttcacctgcgacgagtacgcttcaagcatgaggtaaaggcatcccttgagcgtgtacttgccgtagtcctgccgcctgacgagagcgtccgcgtaaaactccgatacttccttcggaggggtaaaagaagcgcgctcgccctcgaatccgcgtatctttttgaagaatgagcctgcgttgtccgcggagaaaacatgaaccacggctttggaatattccggagtttcgtatgagtgaattttgtccggaaggataagcgcgcagtctccggcggacagagcttcacgacccttgtcggtggaaatatacagctttccctcgatgactgaaacaagctccgcgtcgcgatggagatgacttacgaagtttatgcttgtgtacagccgtatgtcgtggtgattttctatgccgaagttttcctgctggtagagcattgtttcgccgcctttccgcttatcattacgctgctttcaagattattataatatcgcgggggcgtgccgtcaaggtcttgggtgatttttgtccgatttccgctgaataataactgttatttttctcttttataaactatactgaaaaaagaaaattccccgaaaggaaggacaaaaatgaagaagattcacattcacggcgacgacgtgatatcgaagattgacagaaatatctacggtcactttgccgaacacatcggcggcgtatattacgacggtatctgggtaggagaagactccaaagtgccgaacgtaaacggtctcagacttgagataatcgaaaaaatgaagaagataaacgcgcctgttgtacgttggccgggcggctgctttgccgagacctacgactggagagacggcataggaccgagagaaaaccgtcccacaagaatcaactggtggcgcaacgacgacggaagatacgagccgaataccgtaggtacgcacgaattcatggagttctgccgtctttgcggagctgaagcgtactttgccgcgaacatcacctcactcacaccacttgacattcgcgactggatggactactgcaactcccccgcaggcacgacaagctacgcaaagctccgtgaacagaacggctcacgcgaacctctcggcgtaaaatactggggagtcggcaacgaaacatggggcggcggcggtaacatgactgctgaaatgtacgctcacgaatacagaaagtacgctgtaatcatgcagaacaccgacccgaagaccgagcttatcctctccggcgcgaacggggacgactggagatgggtgcgcgacgtcctcgacgttaccgaaagctccgcaagattaatggctggtatgtccctccactactactgcggctcagccggaaacccgctcagcttcactgaagaagaatggtaccgtcagctcaagcaggcgctctacatttcaagaataatcgaccgcaactggggctttgtcgtaggctacggaatggaaaaccacgcgcgtctcgttatagatgagtggggctgctggcatccgggcggatcgggtccctcctctcacatgaaggaatacggcatcacacccgctccgaacaacccgaacggcgtgcagaacctcttcgagcagcagtcaactatgcgcgacgctatggtaactgcgctaaacctcaacatattcaacaacaacgccgagaagattaagatggcaaacgttgcacagctcgtgaacaacctccactgtctcttcctcgccggtggagagcactgcatcacgactccgacctaccacattttcgacatgatgaagtggcaccagggagctgacgcgctcagagtatccggcgactgcggcagaatggaaattcccgaaaacggcagaagctacactctccccgaagtttcggtttccgcaagcatgaaagacggatatctcaccgcgactgttgcaaacctttcgctgaacaccgccgaggacgtgcttcttgacgctgtaggactggaatacacaggcgaggccgaggtttacacgctgacctccgccgacccgcacgactgcaacacatacgaagagccggagaaggtaaagctcgccgagaagtccgcagatgactttgacggaaagcttaccgttcctgcgttctctaccgtaacggtaagagcaaagataaaataagtttcgataaaacaaaaaataaggcaaggagcttttatccctgccttttttgttttattttttgtctatggtttcaagcgcgtgttctatttcttcttcggtgtaaccgtcgttctcgaggtattttgttatgagctcttttccgtagttatcgtagccgagcttgtttttggctatgatgttcgcctcatcctttgagtatcccgcgtcgaggagcaaatcgagataaagatccttcacggctttccagtagtcggcatagtattgagcactgatttccgcgcgtgtcgaccagtcgaatctgaggttttctacggcataattcgcgtcttcttcggaatatccgaggtaggaaagacggctctttatggcgtttcttgaaatgtttccgccgagcttgatgaagaattccgcgtcttcgagtgccttttgagagcttgtttcggcgccgtctgctgtgttttcttctgtttcggctgtttcagtctcgggttctgcaacggttgccattttcttttcggcgtcgtagcctacttcgagtccgtaagcctctgcaagcgcgcggagaggtgcgtaggttgtgccttcgtaggagaatgtcataacttcgtttccgtttgcgtcggttggtttgaattcttctccgtttacaagaattttaatgctcgggtcgacgtttatcggaatgagctgacctgcggcgatggctgaaactccgagaacggcggcaagtcctgcggctgtgatgacttttgtgagttttttcatgattgcggctccatttcgtttttttatttcaactataccactttattccgtgattgtcaaccaaaaacggacataattatttaataattttgccgcaatttcctttatctcactcgatgttatcgagagcataaagtatgttttccgatgtgtatccgtcgtctgcgagaattgccgcgatttcgtctgcggaatatcccattctcatgtagcttcgagccgcggagagtgcgctttcgttccagtcagctccgcagttctgtacggcaaattcagcttcgtcgcctgtgtagccgtagtttgagagaagcatttccttcactgccatcgcggagtaattgcttccgtcacttaccatttcttccgctttgaggagtgcctgctcgttccagtccgctccgcagttgtctacagcatagtccgcttcggctgaggtgaatccctcgatttgcagctgtccggagagcgcgtgacgggagaagtgcattattttaagatactttatcgcagtgttgagcgcgtcgttcatcctgtccgttatctcgccgtcgtaggagctttccccgtatgtgtcctcggcgtaatatcccacagtcgccatcttgcgatcggagtcgtagcctacctccagtccgtatgcctcggcaagtgcgcggagaggtgcgtaggttgtaccatcgtaggtgaaggtcattacttcgttgccgtttacgtccgtgggtctgaattcttcgccgtttacaagaatctttatgctcgggtcgacgtttattgacacaagagttcccgccgaaaatgcagttgtgcagagaacgaccgccgctcctgccgccgagagaattttagttatctttttcatgacagtgtccttttcttaatttttcttcagattaaataaatacgcgcgcatttctgcaccgggctcaattatcacgccgacgtattttgttccgtccatgaacacaagctcgagtgccggatcaagtcccatcgtcagcgtgtagtcgtagaatgtaaaatcgccgcgcatggagtattttttccgtatgtcctcgcgggtaagtctgccgtctccgccttttctgtatacgtcggtcacaaagacaagatccgagagcgagagcagacactcgattgccgcaagacgggagcctgacgctttcattacacaaaagtcaagcatctccggcggaaaacgaagaatgtccccatccacggcgtatgctttctcaagtccctcttcctctccgccggctgtgtcgtccttcagcctgattatataagtgaacgaggtcatcctgtaccgtatcataacgaacacggcggctacaaccgagataagagtgagagcggtgaagggcaggggcgttatcgctatctcatttgcctcgcagactatgggaacggcataggtgattccgccgaagatgagcagagcggcgaagatccacgtcacgcgagggttgttttgcgtaggtgaatatttcattttatcctcacaataatgaaaaatccgtgttaccttcggttttccctggatagcacggatgtatcataaaaactgattattcttcgtctttcttaacgatctgtttgccgtcgtagtagccgcaagccttgcaaacgcggtgagcaacattgtattcgccgcagtgagagcactttacgagtccgggcatttcgagcttccatacgttggaacgtctcttgtcacgtcttgctttagaagtttttctcttcggtactgccatgtttgtatcctccttaatccttgttatcgtcgagaagctgtttaagcacagccatcttcgggttgatgaatttttcctctttgcatccgcagtctccgtcactgagctttgctccgcacttggggcagagtccgggacagtcttcgctgcacagtgtgaacggggggagattcaaagcaagctcctccatgatatccgcgtcgggaatgattttcgcgtcgtttacgtaaatcgtgtcgtcaacaacaccgtcccattctccgtcgtccgacatatggtcgcttcccttggttctgtccgcgtcggtgagtacaactctgtccacatcgaattccacggttgcttcaatgtcatcaaggcatctcgcgcacatcgtcccgtatcttacggtaacatgagattcaaacatcatgcagccgagtgaatttttcacccttccgacaacgctgattccgccgcttggtatgacaatatcctccggaagagcagcgcattcaacgtcggtatgctccgggtcgaaggtgtagctgaactctgcttcttccagacgatgattcattatctgcgatacatcaatcttcaaaaaaagcgtcctcctgagaattatttacggcaggcaaaagcccacagtacattacattatacaatattttattccgcctgtcaagtgtaaaagaatatattttatcggtcaagtgacactattctttagtccgacagcgtaactttttctacaatatgccgagagaaaaaggagagctcgttcttgacacggcataattaatatggtataatacataagataaaaggttaaatctttaagtgcggtgctgtgacgccggcaagattgttcagacccctctgtcttgttgcgcccgcattcgtatgtgaagcggttttttgtactataggagaggtaaaatgataataaaaaacgcgatggtgttcagaaataacgtttttaaaacggaagactattttttaaacgttcccgataccgcccgtgtttcttttgataattcaagcgataatatttacgttttcccggctttttgtgatgtacatgtgcatttcagagaaccgggattttcttataaggaaacgatttactcaggctcaaggtcggcggctcgcggaggatattccgatgtatgcaccatgccgaacctcgaccctgttcccgactgctatgagtccatcatggagcagaggaagataatagaacgcgacgccgcagtgaatgttcatccgtacgcctcggtcacggtgggagaaaagggcgagaaactgtcggactttgacgcactctctcccctgtgcatagcgttctccgacgacgggcgcggtgtgcagagcgaggacatgatgcgtgcggctatgattaaggcaaaatccatgggcaagataatagcggctcactgcgaggacaactcactgcttaacggcggatatatccacgacggagagtacgcgagactgcacggacaccgcgtaatatgctccgagagcgagtggagaccgattgagcgggacatacgccttgcgaaggagacgggatgcgcttaccatgtgtgccatatctcctgccgcgagagtgtggagctgataagacgcgcaaaagccgacggagtggatatcacctgcgaaacagcgccgcattaccttgtgatgaacgacatgatgctcgaagaggacggaagattcaagatgaacccgccgataagaagcgaggacgacagacttgcgctcatcgagggaataaaagacggcacgatagacatgatagcgacggaccacgcgccccattcggcagaggaaaaatcccgcggactcgagaagagcctgatgggagtggtcggactggagacggcgttcccggtgctgtacacgtaccttgtaaaagagggaataatctcacttgaaaagctgattgagctgatgtcggtgaatccgagaaagagatttcacataaaagacagcggcatatgcgtgtatgacctcggaaaagagtacgcgatagacccgaacgaatttgaaacaaaaggaagaagcactccgttttcgggaagaaaagtttacggagagaacataatgacagtgatcggaggtaagatagcatggcggaaatgaagaagagaaagctcgtacttgaagacggcgcggaatactacggagagggcttcggaagtgagcgcgacgcggtgtgcgagatagtgttcaacacatcaatggtcggttaccaggagataatctccgacccgtcctacacatatcaggcagtcgttatgacctacccgctcatcggcaactacggcatagcggacgaggactttgagacaaaggcgccctccatcggcggacttatagtaagggaatacaacgacctcccgtcaaacttccgctacacaaagacgctctccgaggttatggaggaatacaagataccgggtctgtcgggcgttgacacaagagcgctcacgagaagcataagagacttcggaagccgccgcggaatcatcacggacgccgacacaccgaaggaaaaagctctcgagacaatagcgaaaactccagtgccgcacgacgccgtggaaaaggtaagctgcaagaagcgctggtactccagaaccgcaaacgcaagatacaacgtcgtcgcgatagactgcggaataaagctcaatataatccgctcgctcaatcagagaggctgcaacgtcaccgtaatgccctacaatacctccgccgctgaagtggaaaagatgaagccggacggagtgttcctctcaaacggaccgggcgaccccgaagacgttatcccggtaatcgagcttgtaaagaagctgcgcggtgaatatcccatcttcggtatctgtctcggacaccagatgataagccttgcctgcggtgcggagacatacaagctcaaattcggacaccgcggaggaaaccaccccgtaaagaatctcgaaaccggaagaatagagataacctcgcagaaccacagctacgccgtaagagaggaaagcctcgcgaatacaggtcttgaagtaacccacgtgaacatcctcgacggcacggtggaaggactgagagacacgaaatccgatatgttcagcgtgcagtaccatcccgaaagcgcacccggaccgcaggacagcgcatacttattcgacaaattcattaagatgatggagggagagaaaaatgcctaagagaaccgatttaaagaagatacttgttataggctcgggtcctatcgtaataggtcaggcggcggaattcgactatgccggaacacaggcttgtcttgcgctcaaggaagagggctatgaggtagttctctgcaactccaaccccgccaccattatgacggacaccacaatagcggacaaggtctacatggagccgctcacactcgaatacctcgcaaaggtaataagatacgaacgccccgacgcaatagttcccggaatcggcggtcagacaggacttaacctcgccatacagcttgaaaagaagggagtactccgtgaatgcaacgccgagcttctcggaacaagcagcagaagcatcgagagagcggaggacagagagcttttcaaggagctttgtgaagaaatcggcgagcctgtcgtaagctcaagaataacggaatcccttgaagacggactgaaggcggcggaagagataggatatcccgtagtgcttcgacccgcgttcactctcggcggaacgggcggcggatttgcggacgaccccgaggaatgtgctgaaatactccgcggcgcgcttgaactctcccccgtgcatcaggttctcgtggaaaagagcatcaagggctacaaggaaatcgaatacgaggtaatgcgcgacgcgaacgacaccgccatcaccatatgcaacatggaaaacgttgaccccgtaggcatacacacgggagactccattgttgtctgcccctcccagactcttaccaacaaggaataccatatgctccgcgacagtgcgctgaaaataatccgtgcgctgaagatagaaggcggctgcaacgtacagttcgcgctcgaccctctttcgttcaactattatgtaatcgaagtaaacccgcgcgtgtcccgttcttccgctctcgcaagcaaagccagcggatatcccatcgccagagtcagcgcaaagatagcggtcggaatgcaccttgacgagataatgctcgcaaacactccagcttcctttgagccggctcttgactatgtcgtaacaaaaatgccgcgcttcccgtttgataagttctcctcggcaaacaacaagctttccacacagatgaaggcgacgggcgaggtcatgagcgtgggcagaaccattgaagaaagcctgctcaaagccgcgcgttcactggaaatcggcgtaaatcacctctacatgaagaagttcgacgtatttgcggatgaggagcttctcgactacattaaggacggcacggacgacagaatatacgccatagccgagcttatgagacgtcaggcagacctcggcatgatatacgacgcgacaaagatagatatgctcttccttgaaaaggtgaagaacatcatcctcatggaaagagagctgtccgagcacataggcgacgcgggagtcctcttcaaggcgaagaaaatgggcttctccgacgcgtttatcggaaagctctggggcaagagcgacgaggagatatacaaaatacgcgagaagagatatattttccccgtatacaaaatgatagacacctgcgcgtcagagtttgagagctacatcccctacttctactcgacctacgaagacgaaaacgagtccgttgtgtccgacaaaaagaagattatcgttctcggctccggtcctatcagaatcggtcagggcgttgagttcgactactccaccgttcacgcggtaacgaccatcaaaaagtccggctacgaggcgataatcataaacaacaaccccgagaccgtgtccacagactacacctgctccgacaagctctactttgaacccctctgcgtagaggacgtcatgaacataatccaccttgaaaatcccgtcggagttatcgcttctctcggaggacagaccgccataaacctctccgatgagcttcaccgccgcggagtaaagataatcggaacggactgcgacgcgatagaccgtgcggaaaaccgcgacctctttgaaaaagtcctccacgagctgaacataccccagcctaagggaaaagctgttacaaatatagaggacggcgtaaaggctgcggctgagataggatatcccgtgcttgtaagaccgtcattcgttctcggcggacgcgcaatgcagatagtcgcggatgaagaacagctcagagtgtacctcagaaccgcggttgagatagacgaagacaagccggttctcgtcgacaagtacatcgagggcaaggaagtcgaggttgacgcgatctgcgacggtaaggacgtgttcgttcccggaatcatggagcttgtcgagcgtacgggcatccacagcggcgactccatcagcgtttacccctcgttcagcataagcgaaaagacaaaggaaacaattctcgactacacaaagagactgggactgggcatcggcatcgtaggactttacaacatccagttcattgtggacaagagcgagaacgtatatataattgaagtaaacccgcgctcgtcaagaacagttccgttcctctcgaaggctacgggctacagccttgccgacatcgcgacacttgtaatactcggaaagagcctccgcgagcagggatttgacaagatttaccccgccgaaaagaagcgttggtacgtta

SEQ ID NO: 1043 - DNA, 2040 bp, Unknown
  16S sequences of unknown bacteria
agccgtgcggcggcgcggtggaaggcctggcggcggaaaacctccaggcgcgcgtgcgcacggtgtatctgatgacgctttccaacgcgcatggctggctgctgctcaacaccggcaacaagtcggaggcggcgatggggttttccacgctctacggcgatacggcgggggcgtatgcgcccatcggtgacatctacaagacggatgtctacgcgctcgcacagtggcgtatcgcgcaggggccctcgattccgcaggcctgcgtcgacaaggcgccgagcgcggagctctacccgggcgcgaccgaccaggaccgcctgccaccatacgctcagctcgacgacctgctctgcgaccatatcgagggcaacatggatgcggccgagctcgtggcgagcgggcacgaccgcgcaatggtcgaaagcgtgctgcgcgccgtgcgcgtcaacgagttcaagcgccggctcgagcccatggcccccaagattcaaggctgctcgctttccgatgatcgcgcgtggccggtcaccaatggttggcgagatgcttctgccgatgtgagataatgcggcacaacggcaaatccaataccaatacggaaaggaatttagatgcctaagattacccgtgaggacgtgcgcgttcctgccgacgtcatgccggagatgcgcgaggaatacatcgacaactatatggcggcgacccgtgggacggggcgcctgatgctctttgcatgcgaccagaagatcgagcatctcaacaaggacttctacggcgagggcatcgacatctcggatggcgaccccgagcacctgttccagatcggcagccagggcacaatcggcgtcctggcgggccagcgcggcctgattgcccagtacgccaacgactacccggagatcaactacctggtcaagatgaactccaagaccaacttggtgaagacggcccagaaagacccgtattcgccgcagctctacgatatcgaggccgtgctcgccatgcgcgaagcgggtgtcaacatcgtcggcctgggctacaccatctacctcggctccgagtacgaggacaagatgatgcaggaagctggcgagctcatcgccgaggcgcatagcgagggcctgctcgtcgtgctgtggatctacccgcgcggcgctgccgtcaaggaggagaaggcaggcgacctcatcgcgggcgctgcgggcgtcgcgttgtgcctgggcgccgacttcgtcaaggtcaacccgccgaaggcgaccgacgagatgacgagcgcgcagcagctggccatcgcgagccgcgccgcgggtcgtacggggctcgtctgtgccggcgggtccaaggcagacgccaaggagttcctgagcaacctctacgaccagattcacatcggcggtgcctggcaacgccacggggcgcaacatccacatgcgcagcctggacgaggcggtgcgcctgaccaatgccatcagcgcaatcacgcttggcgattacgacgtcgaagaggccatggacgtcttcgagggcaaagagaacttcaagatcgactaactcgattcgatttgatcgaacttccgacgacccgggtgctgagcccgggtcgtttgcataggagagggcaagcgggagacaagatgttcggagttgcgaagataaagagcacggaccctctggaaaagcgctttcacgggctgtgcgcgtttgtgcgcctgcatttgatgaaggccgcggagggcgatgtcgaggcgggctttgccgcagcgcgcgggcgtggcatgatcggagagcaagacgagcggttcttgcgctcgtgccttgccgacgacgataggctcgcacagggcgagtcgcttgacggcacagtgacgcccgagctgctcgaaacggttcaggcgatggtcaacaagctcaatatgggggattctgcctgactacaagtgcgtgcaggcgggcgttgttccagctagctgagctcgtcttcgtcggggagcagcaggtctgccgctgcctcggcgtcggtgttggtacgctggtagacga

SEQ ID NO: 1044 - DNA, 32759 bp, Unknown
  16S sequences of unknown bacteria
cgggagaaacaggacctacgggagaaacagggcccacgggcgcaataggtccgacaggacccacgggagaaacaggacctacgggagaaacagggcccacgggcgcaataggtccgataggtccaacaggttcgacaggacctacgggagcaacaggtccgacgggtccaacaggttcgacaggacctacgggagaaacagggcccacaggtccgacaggcccgacaggacctacgggtgaaacaggagcaacgggacctacaggcacagtacctgacgatgtgtttgcatctttttacaactatcagtatcctttgacgcaaaatacattgatatccgtatttcccgacgtgactgaccccacgggaaacataactttcaacgggtccgaccgcattacgcttgctccgggatattatcttatatcttataaagtttcggcggtgttaaggtcgcctaattatatacaggttacgcctttttataacggaacttcgcatcttgaaacgggtatttattttgcaaccagcgcaaacggctcaagcgcgtgcggagcttcgtttataattttaagggcaccgtctcaaacggattttactttaagctacaacggctcgagcaatgcagtggaaggagaagtcaacattaccatattgaaattgagaagagatttatagagtaatcggatttttctttttatctcatataaattttttcggtggccatataaagcggcagaacctttagaaaaattttagtttttatattttagctaaaaaaaattcaaaagcacggcttaaatcataagcggtgctttttttatgggcaaattataaaaaattacgaatcagagtttagtgtctttttcttttttgctattaaaatcgttaagaaaaatcatatattcttcaaatcggtattcgcggacgggcatgggcttttcgtcgtaaaagaaaaaaacgagagcaggtgaaattccgttccattcttttcggaattcataagaaaccagctttccgtcgagtatcagtttttttattttggcgtggtagttgaagtacattttgattagtatttatcttaaaaacgagttttatgggttttaccaacaatttacaaacattttaccgtaacgggatagcaatgaattttattaacggctataatttcggtgtagtaaaaaaaaggagacagaaaaaatgaaaaagttagtaatgtttatgcttgcattggttatggcagtcacggcgtgcgttgcgcttaccggttgcggcgcggaaaaggacatacttgtcgtatgcagggaagcgtccagcggcacgagagaggcttttgacaaatacgtcggacttgaagccgccgacataacctcttcggcggaggaatacagcagcacgggcaacgtccgcgaaaaagtggcaaatacggcaaccgcaatcggatatatttcgcttgcttccgttgacgacagcgttaaggcacttaaaatagaaggggtggaggcaactgccgacaatgttcgtgcaggcacctacaagatacagcgtcctttccttcttcttaccaaagcgggactttcgcttcagcccgcggctcaggatttcttcaattattgcatgagcaagactgcggaagcggccatcagcgcggaaaaaggaataagcacttcggacttttcttcccgccccgaatataccgtacctgaaaccgcactcagcggcaacataacgcttaagggctccacttccatggaagatattatcaaaaagcttgtcgccgaataccaggcgaaaggcggagataaggtttccagcataacgtttacttttgatttccccggttccggcggcggcagaacggcggttaaagaagatacgacgggtaacgtcataggtcttgcaagttcttcaagccccgacgccgcttataccgagcacactttgtgccttgacgccgttgcggtaatcgtcaacaaggataacgacaagattgacgacatcaacgcggctcagcttaaagacgtatacaccggcaccgttaagaagttcagtgaaatcaagtaataaatgagaaacgtaaaagcaaaagaaaacgctgtaaaatgcgtgtttatggccacggcaattatctgtataattgccgttgttgccattttcatctttctcatcgcggaaagcattcccgcgtttcgcaaaataggttttttcagatttttgttcggcgacacctggaaccccgttgcgtccgataaatacgacgcgcctttaagcggaacctacggtgtattcaaaatgatagtggggacgcttgcggcgacttgcgggtcggtggtgttcggcggaactttaggctttttcaccgcgatattcattgccaaattctgcccgaagaaaatcaagcggctgttttccacggtaatacatttgctggcgggcataccttcagtcatattcggctttttcggaatgaaagttctgcttcccgttctcggagtattttcctcaaacggcagcggcagcggtttgcttgccgtatcgcttgttttaggaaccatgattctgcctactgtcgtttcgctttccaaaacaagcatagacgccgtacccgaaagctattacgaaggtgcgcgcgcactgggagcaactcacgaacaggcagtattcaaaacggttgttcccgccgctaaatcgggtatagtagcctcgattatattgggtataggcaggtctgtaggcgaaaccatggccgtaattatggttgcgggcaacaaggtcaattatcccggcggatttttccaaagcttccgcgtgcttacggcaaacatagtcatggaaatgggctacgcgggagaggttcagctgggtgctcttatcgcaacgggcgtagtgcttctgattttcatccttatcgtcaacgtgcttttaggacttgttttgtcccgcggtaaaaaagagaaaaaaggtaaaaagaactcgggcagattcgcgggagcgtttatgtataaaataaaatccgaccgcatcggaaaagtcgcaagttacgtctgcgctttcgtaacggtcatcgctcttttttccataatagctttcgtggtggtgtcgggattaccccatctcagttttcagctcttgttcggggagtacgtcgttgcgggcgcgataagcattctgcccagcatagcggcaactttcatgacgatagttataagccttttgctagctatacccataggcgtcgcgacggcggtatatctcaacgagtacactaaaaagggcagccgcgcggtaaaaatcatacgcggcgcaatagacatactcagcggcattccgtcaatagtttacgcgctgttcggtatggtgacgttcgtagtgtggttcggcggcagaatgtctattcttgcaggaagctttacgatagcggttatgttgcttcccacggtggtgcgttccaccgaagaaagtcttaaggccgtgccggacagtctgagagaaggcagtcttgcgttgggcgcgggtaaagtgcgcacgctttttaaggtcgttttgccctccgcattgccgggaataatgtccgcgataattttaagtatgggacgagtggtttccgaatccgctcctttcatgtacactatgggcagtactataatgcccatgcccgaaagttttctcagcagcggaactacgcttgcggttgcgctttacaaactcgcgggcgagggacggcacacggacgaagcttatgcaaccgctttcgtgcttttggtaatagtgcttgcccttaaccttctggcgtcgttcatcgagaaaaaactaaataaaaaattacaaggagatactaatgctgttcgctcggttaaaagaaaaaatatcggtcgcaaaaaaagagaaagttaaatccgtaactgaagcaaccccgttcgggcgcaacatatcagtggaaaaagccaacctatggtacggcgattttcacgcgctgaaaaatatcgacatcgaaattcccgaaaacaaaatcaccgctttcatagggccttcgggttgcggaaaatccacttttctcaagtgctttaaccgcatgaacgaccttgtggaggggtgcagaatagaaggcgtttttcgtttgggagaggtggatatttacggcaaaacggacgtcaacgagctcaggcgcaacgtcggcatggtatttcagaaacccaatccttttcccatgagcgtttacgacaacatcgcttacggtccccgtactttcggcgtacataaacgcgctcttcttgacgagattgtggagaggtcgttaagacaagccgcaatgtgggaggaacttaaagacagactcaataagtccgcattggggctttcgggcggtcagcagcagcgtttgtgcattgcccgagcgttggcggctcagcctaaaattctgcttatggacgagcctacaagcgcgcttgaccccatatccaccggtaaaatagaggacttgtgctacgaccttaaaaacgacgtaacgatagtgatagtaacgcacaatatgcaacaggctacgcgtatttcggataaaacgggatttttcctcttgggagaacttgtcgagtacggcgatacgatggaaatgttttcagatccgaaaaaagaaaaaaccaaaaactacattaccggccgattcggttgatttaatcgggctttaatagtataatggaggtataacaatatgtccaacaggatagccttcgaggaagaactgtccgagcttaaggtggaactcgtgcgtatgtgccgcattaccgaggagatgatattcgactcgataaacgcgcttttaagcaaggataaggagcttgccttgtccgtcccgccgcgcgaccgcaaagtcgacgaattcgaactggatatagagcgcaagtgtatgaggattctgttgcgccgtcagccggttgcggacgacttcagggaggtttccaccgcgcttaagttgattacggatatagagcgtatcggggaccaggcaagcgacattgcggaaatcgtgctgtctttcggtaacgagccttatataaaggagcttgttcaccttaaaaaaatgggcgaattgggcgtaaggatggtgcgttcttcggtggattcgtttataaggggcgacgaaaagcttgccgacgagataatttccgccgacgacgaaatggattcgctgtttgtgaccgtaaaggacgagcttatcgagcttataaaaaaagactcgtcaaacgcggaccaggcaatagcttttatgatgattgccaaatatctggagcgcataggcgaccacgccgtcaacgtgtgcgagtggacgaaatattttgaaacgggagttcacgtaaaatactgatggatgacaaaatcaaaaacactatttatgcggtagaggacgacgaaggaattcaggagctgtatcagggtgcgcttgaagagaattattttataaggatattccccgacgcccaaagttttctgcgtgctttcgaggataaaaaacccgatctcgtccttcttgacataatgctgcccgatatggacggttattcagtgctggtcagaatccgcgaaacagacgaccgcattcccgtaatagtggtaagcgccaaaagcgacgaactcagccttgtcaaagggcttaacaagggtgcggacgattacatcaccaagcctttttccattctggaacttcttgccagaatcaagacatcgttacgtcgcaccaattccgcggtaaaacgcgtttcgggcttcgatatagactccaatacctatacggtaagatacaacggcaaggaactgggatttacgcttaaagaatacaatcttttcaaaatgcttgtttcctatgcaggcgtcactttaagccgcgaaaaactgcttaatgaaatctggggcgtggattacgaaggggaaacacgcacgcttgatatgcacatagcttcggtacgcgataaaattcacaaagcgggtggcggagattgcatcgtcaccgtacgcggagtgggttacaggctggatttatgattaactcgggattattggccgcgtcgacggcggcgtggatatccgcgattgcggttgccgtccttgttacggcggcggtcgttgcgcttatcgctgcgggaatttatgccaaagaaacaaaaaagcgcgccgaagatataaaaaacagccttaaaagcataactcagggacattaccgccccgtaaagtcggacagcagaaatcccgaaatgtatgcgatttacaacgaaatcaacgagatagccgacggctttctatgcgcaatgcgcgcgtctgacgcggaaagaaaaaaactcaatttcgttcttaacaacgtttcgcaatgtattctggcggtggatgaaaacaacgtcgtaaaaatcatgaacgcgcccgcaaaaaaactgttttcacgcgacgacagttttgtgggcagagatttgtattttgccgtaagcgacgcaaagcttttatccaaacttgccaccgcgcttaaagacggaccttattccttcgaataccgtatggaagacaagtatttacttgtggatatatgccgtaccgaaggagggattcacgacgaaattaccgatatcatcattatttccgacgtctcggcggaaaaacttgccgcaaagcaacgttcggactttttctccaatgcggggcatgaacttaaaactccgcttacctccattcagggactgaccgaattattgcttgtaaaaacagaccccgagtctttggcattcaaatacgcccagcgtattcataacgaggcggaacggttgggtgcgcttgtgctggatatgctcaagttaagcaatatagaaaatctgcagtcgcttaaggcggtcgaggagtcggctacggaggtggagctgtccgacattgccgccgaggtaatcgccgcgcttgaggtggaagcggaaaagaaaaatcttaccgttacgcttgagggcaaaggcgtcgtcgttgcagaccccagaaaaatttacgaaattataaacaacctttattccaatgccgtaaattacaacgttttaaacggcagtataaaagtcgttatcggaaaaaccgactgcggcacggtgcttaccgttgccgacacggggataggtatagacaaaaaacacattccccgcctttgcgaaagattttaccgcgtggacaaaagccgttccaaaaaaacgggcggcacgggtctggggcttgcgatagtcaagcacgtctgcgcgctttacggagcggagcttaatatttcttccgaagaaggcgtgggcactaccgtgaccgttacatttaaaaaataattgcgacagtttacgtaagcgtaaaagatttgctttttcgggcaaatctttttttatgctaaaacttgtaaataccgttaaattgtttatacttcttgacgtaatcaaatcgttatgttatactttaaacgtaaaatttacatgagataaaacttttcgacatttataaaatttaacttttggctataaaaatacatatttatgtaaaaagcggtgatgataaggcaataatctttgcgtctgtttaagggcatcacgttattgacagcgggaaagggtattaatgagcatagaaatcgacgttttcaaacttatcgacgcattgggcgacaggattcagaacaattctcctttagataaaaacctgaaggagcgtatcgagtgcgcaaccgacatcgtgtacgacgagtccgatcctgcaacctgcgtttacgacacataccatattcccagggaagagggcaaatatcccgtaatgctttacattcacggcggaggatttgtcgccggcgacaaaaagttcaggcgcggggtttcaaaatggtacgctcaaacggggttatacgttttcaacgtaaattacggactttgccccgcgtatatgtatccgcagccgcttgttcatatcgtaaaagcctttaaccgtatatgcgaaaaagccgaagagcttaacctcgacttaaataagtttatcgttgcgggcgacagtgcgggcgcgtattatgccgccatgcttattgccgcgtgtaattacaaaagggtgcaaaaaaaattaggggttactccgttgtcctcggtaaaggcggcaatattcaactgcggactttacgatatcgattcaattatgaaatgcaaaatgatgtttgacttaaacgcaagaattttccgcagatttaccggctcggacgatgtttgttttgagaattatgtccataaaaaactgtgtatgcccgcgtcttacgttaactcggcatatccgccttgtttcattgtttactccaaaaaagattttttcgtgggcggacaggccgaatcgtttattgataagcttgcggaaaaaggagtgtatttcgaaagctatttttcagacgttgttttttccaatcattgttttcctctcaactggaagggtaaatatgcagttaccgcaaatagcatgacggaaaatttcgtcaaaagatttctggagggaaagctgcccgtacactccaaaaaggtcaaaaaacctaaagaggtcgaagacgttgacgcaaggcaggcgtgaagcatttaaaaccgaataaagcttttaaaagtaaaaattctttcagtaggaatctgccgcgaaagaattttttgttttaaataattttatattaatccgtaaatgcccgtaaaacaacgcacataaaaagtcaaccgaagtattcgtataatgcggtaaagcagctttcgccgtttttactgcccgaaaaaacgtaaaggttgtcgttttgtttttctacggaaacgtccacgatttcgtttagttttgtttcggcaaggaaattgacgattacttttttaagcggacgcgcaggcaggtcgaaagagttaaaggcgatgtcggcatacttgatgttgttggtgtggccgttgtggtcaagttccgaccgttgaatagtatgagaatatacgggcgcggatttaaggggtaaaatacgttctatacgcttattttcgtatgcgtatttgtccgtgaattgtccgtcgaagtcaactgaaggtttaacgattttacgttccttaaagtcgatgtgcacccattggctcgtacctttggcggcaagcgttccgttttcatcgtaaaggtaaaagtcgcgggtgtagtccacgattcccttgggatgaggataggtttcagccgtaatcgtcattcccgggtaaagcttaacaaaacagtcgaatttgattttcgtgactacccatgcgatgtttttctgtttcatctcctcgaaacccattccaagcattgttgcgtgttttgcggcaacggtctggaatatgtcaaggtaagcgcttgcccgcatattgtcgttaaagtcgaaatcagactcttttaacttgtaattctctttataaaaaatcattttgagtcactgccttcagttataaagttcacgacgaaattatatcatcgttataaattttttgcaacgaaaaattcttatttgttcttaataaattattgacttaaccaaactaatgttctataatttcattgatttgttaaagtttaaaaaaccaaaagcatcaaaagggaaaatgaaggcgtaaaggagattttttatgattgaaaaatttaccgtttcgcgcgacgataacgtgtatcaagcatggccggacgtaacgattaataatgacgggtgtttggtgtgcgtttttaccgaatgtgctcatcatgcggacagaagcggctcgcgacttatgacgaccgtcagtcgcgacggcggcgaaacctggagcgaaaaacgtcctctgacggaaaaatcagactcttcgtttttttggaacaacgcgcgcatttctcttcttaacgacggaaatctttatatagtttgcgataaagccacccgcagcgaaaacgaaaactccaaaatttacttgtttataagcaaagacggcggtgaaacctggtctgaagcaaaagaattgccttgtttcggcatagttccttcaaagcttacggaactgaagtacggcgattacgcaggaagacgaataattatggctcattcccgcgacgaaaacgatatttacacggtaagaagctggtacagcgacgacaggggcaaaagctggtcgggacccgttacggtcgtaagccggaaagaatacaaactgtgcgaggccgctccgattgaattaaaaaacggtgttctgactgtcttattaagagagaattcttcaaaaggattagatgctttcaaaactttttcgtatgacggaggtgacagctttaacggactttatactgcaccgttacccggttgccatcgacctgttgccgactatgtggacgatgaaaccgtattgataacctatagatttatgcagggcggaaaaggttggctggggcattggacccaaaacgtttttgccgcgtttatgtctgataaggatttgtccgaaaagcttagagaaaatcagtcctcgcgcataatgcctttggattatgaccgttccgcggtttcggaccttggctatacgggatttgcaaaattaaaggacggacgcgtctatgttgttaattacatagtggacgacgcacccaaagcgcatattcgcggatacagattcggcaaaaaagacgttattttataaataattttttattataaataaggagaattatggcaatgaaaaaggaaaaattcgtgataatttccaacgacgcgatggtgtatgacgaccttgagtatttaagtcacaagtttgcttttaaaagacttatgggcgaaggttccgtagtaaagactctgcgttctatatatcctaccgttacgtatgccgttcatacttcgatgattaccggatgttatcccgacagaacgggagtctataataacgaaaacgatgagttgtgcgttaaaagcagcgactggcattggttccgcccgtcaaacaaatgtaaaactcttctcgacgccgcaaaggaaaaggggcttactacggcaaacgtgttctggccggttacgggttctgataacagcatcgattacaatatcgccgaatattggacgcagacaaaggaagaaacaattttcgacgcattcagaagggcaggctcgtccgagcgagtgattgacgaaataatccgtccttgctctcactatcttataggcaaggaacgccgtcatccttacgccgacgactttgtttttgcctgcggagaggcgatgataaaaaaatacagacccgacattatcgtaatgcatcctgcgggaatagacggattaagacattccacgggcgtgttttccgaccgcgtaaacgatatgctcgaccataccgcgctttggactcaaagaattatcgaagcggtcgaggaaatcggggaagcggaaaacactaacttcatcatcacaagcgaccacggtcagatagatgtgtcgcgctgggcaatgcccaacgtagagctcaggcgtcggggctttatacgtacggacgcaaacgacgtcattaccgattacgacgcgtttataaagggagtaggttgctgtgcgttggtgtatctgaaagacgaaagcgacaaaaagacttacaaggcggtttacgacgcgcttaaagaaatgcgcgacagcggtctttacggatttaccgaagtttttacccgcgaggaaatcgcggcgaaggagcatttgtcgggtcctttttcttttgttcttgaaacggacggttacacttccttcggcagcgaatggacgggcagcataattcatcaaagagatattaccgactatcgcggcggagcggcgtcgcacggctatcttcccgacaaaggcgctcaacctacgcttatagcatgcggaccttcgtttaaaaagggagttacggttgaccgtcgtcccatagtagaccttgcgcctacgatagccaaagccatgggtgttgatttagccgacgcggacggaaaacccatcgacgaaattttgctttaagaagtcgtttttctaaagcataaccttaaaaacaatctgttgataaaaaaataaagtgcggttttagtaccgacaaaagtatttatccgtaaaacggggcataatatgtcacgtagcgattaattgaaaggagggcatattttgcgaataaccatagttacgggcgcatcttcgggaatgggcagagaatacgccaaacagctggacgcgcttaaggaaagtgatgaaatatgggttgttgcaagacgtgaagaacgccttaacgagcttaaatcgcagctgaagaccgcgtgccgtgtttttccgttggaccttataaaacaggaggatatcgacgtacttaccgatgcgcttgccgcgtcgggaggagaggtaaagtatcttgtaaattcggcgggattcggcaagttcggcgactggtcggaagtcagccgtgaaaacgttaacggcatgatagatctcaacgtcaaagctttggttaacataaccgccgcagttttaccgtatatgaaacgcggctcacacattatcgaaatgtgttcggtttcggcatatttgcctcttgaaaatttttcagtctatgcggcgagcaaggcttttgttctcagttactcttacgctttacgcgcggaagtgaaacgtaaaggcgttaccgtaacggcggtttgtcccggctgggtggaaaccgagtttgcggtttgcgcgcataacggagataaggttaacggacccaagcggcttaaacccatgacaagcgcggaaaaagtggtgaaaaaggcaatacgcgacgcttgccgcaacaagcccgtttccgtttacggcattacctggaaagcaatgcacgtcatgagcaaatttatgccgcgaagagttatgatgcttttgtggcacggcatgcagaaaagaaattaaaaattaattaaaaaattacgataaaagcgataatccatgctttaggcttgcaaacagcggtaaaatttgttatactttttataaagaaaaattaccgctttaactgaggaacatggtttttttcaaaccgcttggtttttgcgaataaggattaaaaataaacttaatataagttttaaaattttttttgaggattaaatatgtcgcttcttaaatcgcaaatcaaaaaatttttgattatttcgcttgtcgcttcagtttgtctgcctgtcggaattgtcagtatcgtgatgggggcaactcagtccattaccgttttgcttgttttcggcatcgttgcaaccgtgttcggtttttacggcacaccgatgctgtggataaaattctcatcgcttatcggcatgaaaaagctggttgtcgcggtcgaacaggacaatctctatacggtaagagaactcagttccttgcttaacctcagagagggggaaacaaggaaaagactgagagacgcgctttcccaaaggtatcttaccggatacatattcgaaaacgataaacttgtcgttaattttaacgtaaaacaggcaaaaacaaaattcagcattaaatgtaccgaatgcggcgcgcccgtcaccatagacccggacagcgcgataaataaatgcgagtactgcggaaaaatttacagcaacgtaaagcgtcccgaagacatctgattttttattaaacttataagaacgtcgccgtcttgtcatgacagcggcgttttttgctttatatgcaatgatttttgttaaaataaatgatttttgcaattttttttatgtttccggtgtgttatactttgtaaaaatcaatcggtgaaaaaaaggaaaaagatgagaaaaattttgaaaagagcaatttttgcggcggctttgtccgggtttgtttgcgcgcttatcttgtcgatgtcgttttcgttttttgcaaaggcggaaactgctgttaaaaccatcgatatgtatcttatcgcagggcaatccaacgccgcaggcgaatcctatgcaacaaacgtttcgggtactttcgacaacgtattgtatgcgggagaaaccaactgttcgatgtcaagcggttcggcaagcagccgttatatgacatatccgtatatttccgtcaaaaaaggtctgggtactaacgcaaactgcatcggacccgaattcggtatggcgaaatatttaaacgggatttataccgcggacaataaagcgcttatttttaaatctgccgccggcggcgtaagcctgtgtaacgaaacgccttcggacgcggacgccaatcgcggaaattggtatcccgacaggacgggaaatacttttaagggtgggcagtaccgcaggtttatacaaaatttcttcaccgtggtaaacgatcttaagacacacggatatgagcccgtagtaaaagctttcgtctggatgcagggcgaggccgatatttggggaaccaacgcaacgagatatacatcggtttttaccgaattctgccgtagcatgcgtgaggatttgggaaatattcttaccaagacgtatgaagaaatgctggatatgccttttatagtcggcgaaatttctcctaccggcggttacggacggtcggggtacaacagggcgactaacgaagcgtttatagaaatacagcgcggatttcccgatgtgattcccaatgtgaaagtggtgaaatcttcggctttcgatacggacatagcaaacgataacgtctggcattggtcgggcgaagatatggtaaccataggcgaaatgttcgcgcgcgccgcagttggcgatgaaacttacgacattgtttctttcgataaaatgaaaaacggaaacgttgccgccgcctttaacgcggataaaaccgcaatagaatttacaattacgcctaaccgcggatacaaattgggctcgctggaggttaacggcacggacgttacctcagcagttaaggattttaagtattcggtgccttaccgtaccggcgacgagttcacggtggaacttaattgcgttgctcttcccagatacgacgtgaactattattatcaaaaaaaccttgcgtctgtggatggccccgattatgtttacgagggggaaattttaagcgtaaaaataactttaaggacggacgctactgtttcttcggtcactttaaacggaaccgaaatgagctacaacgcgcaaacgcaggcttatgaagccgccgcaaccgaagattgtgaggtcagaattactttcaataaggccgaagaaagcggaaatcaatcagaatcatccgaaaacgaaactcaagacggtgacggtggcagtaaaggttgttcaaagtcggacgcagtattgattgcttcgattctgggtacgcttgccgcgtcggtttttcttctcagaaagtaaataaaaattaattgcaaaaggcgtcgatattttgtttcggcgccttttattttaaaagatttaaatataagatactgctttatattattgcattttatcgtaaaatattgtataattataccgttcttttttgtgagtgttgcggctgaagtaaacaggatttgattttattctgtcgttgtgtcataaaatctttataataaatgaaggggagaaataaggagttatggaaaagattaaaaggctttatgctgtttttgtcgttgttttatttttgtcggcgtgcgttatgtttaccgttccgacttattcacaggcggacgctcttgcggaaagcatatcgggggcaagcctttttaacgaagcaaacgtcaagggtcagaccatagatatgtatcttatcgccgggcaaagcaacgcctccggaaattccaaaaacattctcaacggaataactatcaacgaggtcatgtacataggcgaaagagaagaaaacatcggttcttcggctatgttctgtaaaaacaacattaccacgggattaggaataaacagcgcttacatgggtcccgaatacggtatggcttttaaattaagagaacattatacaaacacaaaccccgcctgcatattcaagacagccgagggcggaacaaatcttctcgacgttactacgggcacgcttccctcaaggttcggaaactggtatccgcgctctttatggcagtcgcccgagcacgacggcgcaagccatacgggctatctttactaccgttttatcgaaaactttaaagccgcttataatcttcttgtaagcaaaggttatactcccgttgtaaaagctttttgctggatgcagggcgagtccgacaggggcgaaatttacgaatacgaaaaactgattaaagtttttattcgcgatatgcgcgaagatataggcaaaattacgggcacagatcaaagcggactgctttttataatgggggagatttccacgactttcggtagttactctcagcagggcggcaatcagatgtttatagatatgcaaagggatgttgcagcttgcggcgatcccgttaaggtggcaacggttgatacgtccgatttgcccattaacggtccaaacggcgtgataggcagcgatcagtatcattggaacggcactcagatgaaaactctcggcgagcgttttgccgagtgcgctttggaaaacgcggataaaaactatatttcattgccgcaaaattccaaatgcaaggtcactgccgacaagcttatgtttaacgacggggaagaagttagggttacttttacgccgctgtccgattatttttacgacaaagtttacgttaacggtcaggatgtcacttccatgattcaaggcaacgtttataccattccttccgcttcgggtaattataccgtgaccgtggacgtgcgcgagcgtacctatttcaacattacttattcttacgataaggagcgcggaggttacgaccgcaggaagtcgacggcatataagatttatgaaggcgaagatcttgtcgtagttcccgaacccaaagagggattttatgtcggctccgttacgttcaacggcactgctctttccgagggcgtaaacggacggtatattttagagggcggagtaaaagaagacggcgaaatcaaaatatatttttaccgtgacggcgaggtgcccgaggacgaaaactccgacggcggaagcggatgcggcaaaagtgcggatgcggcaaaagtactgtccgttgccgcggcgcttgtaatggcggcatttgtgcttaaaaaattctgacgttttgtaaataaacttgaaacgtaatcagtttaattaattgcataatcgcaaaagcgtgcgggaataaaaacttttccgcgcgctttttgttttccgcggaaaaaatttttgtgattaataatttctctcaaaaagcgctcgcattcgattcccgtaaggcaagaaaaagaaaaaaccgactgaattgtaatcaattcaatcggctctgattatggtaccactaaggggaatcgaacccctgttttcggcgtgagaggccaacgtcctaaccgctagactatagtggcataagctatttgcaacgaaagctttattataatactatatttgcgacatatttgcaagtgtttttatgcttgatttaaaagtttttcttgcatagattgcgcttaagggtaaaaaaacttgactaattcggcttgaaaagttacaatatattggaaagttaattaataaggagaaggtcatgaacaagaaaaccgtcaaagacgtagacgtcaaaggtaaaaaggtgcttgtccgttgtgattttaacgttcctttggacgaaaacggacgcatcacggacgaaaacagaataatgggcgcgcttcctaccataaagtatcttatggagcatggcgcaaaagtaatactttgctctcacatgggcaaaccgcacaacattttcactgaaggattcgggcttaccaagaaagaaaagaaggcggttgaggcgttgcctgttgaagaacaggctgcggcaaaagccgagtatatcgaaaaggcaaagaaaaaagaccccaaaaagtttacccttaaacccgttgccgaccgccttaacgagcttttggacggtaaagtgacgttcgcttccgacattgtaggcgacgacgcgcacaaaaaggttgcagcccttaaggaaggcgaatgcgtgcttttggagaatacccgtttcgacgcaggcgaggaaaagaacagcgaggagctttgcaaaaagctggccgatttctgcgacgtgtatgtaaacgacgctttcggtacggctcaccgcgcacacgctaccactgcgggaatagtgcagtacggtttcgcgcccgttgcggtaagcggcttccttattgaaaaggagcttaagttcctcggcggagctgtggaaaatcccgttcgtccctttgttgccattctgggcggcgcaaaagtcagcgacaaaatagaggttatcaaaagccttatcgataaatgcgattgcctgattatcggcggcggaatggcttatactttccgcaaagctctcggcttcaaagtgggcaattcgcttttggaagaagataaaatcgagcttgccaaagagcttatggcaaaggcaaaagacaagggcatcaaactgcttctgcctgtagacaacgtcatcgcggacgcattttccaatgacgcaaacactcaggtggttgagggcgacattcccgacggatgggaaggtcttgacatcggtcccaaaaccgttgcgctttattccgatgaaatcaaaaaggcaaaaaccgttgtctggaacggacctatgggcgttttcgagatggaaaaatttgccgtgggtacaaaagctatcgctcaggcgcttgcggacaataaggatgcagtcaccattatcggcggcggagattccgcggcggcagtaactcagctcggatttgcggataaagtaactcacatttccacgggcggcggcgcttctttggagtatctcgaaggtaaagttctgcccggcattgcctgccttaacgataaagactaagtcttaaaattttaataataacattacagacctcgggttaacgctcggggtcctttttttcggaataattttttaccttcgaccgatactaacaaaaaacgcgtaaggaggataacgtgaacgcaataatccttgccgatttcggtcctatgataactccgcttacggacgattgcccgaaatccatgttgaaaatagccaatgtaccgcttcttgattatagtttcagtcagcttaattattacggattaaaggatattactttcgtttcggcaataaaaaacgacaaggcgatgaattacattgcctcgtataaggggcttaattgccgtttttacgacaaagcttgcagtgacttcggcttggaaaagctgaaagcggagtttaactcttgggacgatatttccgtcgtgataaaatgcgactccgtaaacgatatagatttattcaaattgatttatacacaccttgaatccggcgcggaaataacgatggcggtagtcccgcaaaaaaaacaagacacaaattacgcggtacttatcgacgcggataattccgtttatgctttttccgaccgcttcagcgtgtttgtcaaggaaaccatggcggacgcaggcgtatacgttataaacaaaagcgtcataaaaaattcattagaggcgggaaaatttgattttacacgagaatttcttgcggagtattcccgtaaacatacattaaaagcatttgtgcacaacggcagctattgcgaaataaaggataaggatagctttttcaaggcaaatttctttcttaaagacggcggctttttcccggaaatatcttcttacgaaagggaagcttacgggtcggaatcaaaaggaggaagccttgtaagcaagggcgcggttacggtaggcggtttccgcgattgcattgtgggaaaaggcgcaagaatagcaagctgcgcgcgaatttcggattgcgtggttttggacgacgcgttggtgacgggagtgcacagctatgccgttatcgggccgaattttgtcgaaaatatagcttctcccgcaattaagcctgctttaagcggggatttttacgataatttattgcaaagcggcatataaacgattgtcttttttttacaaatcctgtataataaatacggaaactgaaattaatacaatatcgtcttactaaggtagagcaacgcaatttttgcgtgttttttcgcgcggtttgcttgcgtccgccttaattgtatgatattgtaccgaaaataaaatttattgtacggaggttgttttgcgacacagtattgacgagtccgcccttaaggtggtttttttgggcggcgtaggtgaaatcggtaaaaatatgaccgctttggagtatgaggacgaaataatcgttatagacagcggctccacttttccggacgtggatatgccgggcgtggacctggtgatacccgacatcacttatcttcttgccaacaaaaacaaagttaaaggcatagtgcttactcacggccacgaggaccatataggcgcgatgccgtatattctgaaggaccttaacgttcccgtctacgggaccaaactcacgcttgcgctggtggacgccaaattgcgcgagcagaaagtcgaagggaatcttaacgttataaaatccaaaagcgtggtaacgcttggcgagcatttccgcgtggagtttgtaaaagtaagccattccattgcgggcagctgcgcgctttgtataaccacccccataggcgtggttttccatacgggcgactttaaggtggattttactcccatcgacggtaaccttatcgatttaaggcgtatatccgaaatcggcagtaaaggcgttttgctgatgcttgccgaaagcactaatatcgaaagaccgggttcttcgatgagcgagtctacggtaggcgcgtcgcttaatcatatatttgccgaaaattccgagcgtcgcatattcgtggcgacgtttgcgtccaatatccacagggtacagcagatagtggacgtggctaaaaaatacaagcgtaagattgcgttcggcggcagaagcatgattaacatagtggaagtcgccaccaagataggcgagcttaagcttgataaaaacaacatcatagacatcgagcagataaataaggtggaagacaagaacctttgcatcattaccaccggcagccagggagaacccatgagcgcactgacgcgtattgcttccgacgagtttaacaagataacgataggttacaacgacaccgtcataatctccgcgtcgcccattcccggcaacgaacgcatggtttacaacgttatcaacaacttatatcgccacggggcaaaggtcatatacgaaagccttgccgaagttcacgcttcgggacacgcctgccaggacgagataaagcttatgcactctttgctgaaacccaaattcttcattcccgtacacggcgaaagacggcatcttcagaaacatgccgaactcgcgatgaaaatgggtatgcttcccacaaacatcgtgataaccgacatcggaaacgtggcggtaattaccaagaattccattcgcatcggcgacaacgttccgtctggctgtctgttggttgacgggctgggcgtaggcgacgtcggcagtgtggttttaagggaccgcaagcatttatccgaagagggtatgcttgttgccgtcgtgggtatcaactccttaagcggcgaggtttacggcgtggacattacttcacgcgggttcatgtacagtaaggacgagtctgaaaaactgcttgccgaggctaaagaggtgactcgtcatactcttgaatccatggaccttaaaagcgtgggcgactggactgcggttaaaaatgcgataagaaaggaccttaaaaacctgttctttaagcgcactcgccgtaatcccatgattatacccgttataatggaaaactgaaatgcctttcaaaactcccggccgcgattcggagtatatccgcgcgcatcttaaacccgaaaccgatccgcttttgtcggaaatgctggaatacgcggataaaaaccgtattcccgttcttcttcccgaatcgaaagcctttctcgtacagcttgttacgctgcttaagcccgcaaaaacgctggaaataggcactgcggtgggttacagctctcagcttatactcaggaacggcggagaaaggcttttcacggtggaaatcgacgagggacttgcctcaattgcaaaaagttatttttcgcgcgcggggctcagtgaccgagtcaacgttttcatcggcgacgcaagcgaaattattccgcttatggaaggaagttttgacttcatcttcatggatggacccaagacaaggtatatagagtatcttccgcatctgatgcgtatgctgaaaaagggcggggctcttttgtgcgacaacgtcctttggaacggcatggtcagcggcaaaatcgaaacgcagaaaaacaaaaccaccatcgtgcacggactggataaattcattacggcaatctgttcggacgacaggcttattacaagcattctgcccgtaggcgacggtatgagtttaagcataagaaaaaatcaagaggattgacggatgatagaactgcttgcccccgcaggtaatttcgaaagattggagacggcgctttacttcggtgcggacgccgtatatctttcgtataaaaaatacggcttgcgcgcgtttgccgataacttcgatctcgatcagcttgcccgtgcggtaaaatacgtccatgacaggaacaaaaaaatatatgttaccgtcaatattttcgcgcatgacgcggacttttccgaaatagccgattttatgcgctttctcgaggaagtcaaacccgacggcgctatcgtcagcgatttggggattgcggcgctcatgaaaaagtatgcgccttccgttccgctgcatttaagcactcaggcaaaccttaccaacaagtacgccgcgcgggagtatgtaaattacggttttaaaagacttgtcacggcaagagaactcagccttgacgaaatacgcaaaatacgcgattttctgccttccgacgtggagatagaggcttttgttcacggcgcgatgtgcatttcctattcgggacgttgtctgctttccaattttctgacgggaagaaacggcaatcacggggagtgcgctcaaagctgccgctgggaatatactcttaaggaaaagcatcgcgacgacgagcttcccatcgaggaagacgagcgcggaacctatattctcaacagcaaggacatgaacatgatagagcacctcgataaacttatagacgcgggcgtcacgagttttaaaatcgagggaagagtaaaaacaagttattacgttgcgtcggttgtcaactgctaccgccgcgcgctggactggtattttgcgcacggcaagccttataatccgcccgcagaaatacttgaagacataaaaaagccttcgcaccgaatgtactgcacgggtttttacctgaatgataccgtaaacaacgaatgttacgatacctcgaagccgcgtcaggaatacgactttgccgcgcttgttctcggcagtttcgaaggcggagcggttatcgaaatgcgcaaccgattcagaaaaggtgacgaacttgaagttttgtcccccgggcccggccacaattccgtgattaaggtggacaaaatggaggatgaagcgtctgcgcccgtttacgatgccatgctcgtcaagcaaaaactgcgcctttttacgtccgttcctctgtcaaagggcgatattttgcgcaaaaaagcttcgatgtaggcgttatatgcgtttttttattgaaaacaccaagggaaaattaacttcggattataaaaacggcgtttttcggtttgtttatcgattataaatgtacagtttaaaattcagaatgtcttaaaagactgccgtattccaatcggcggtcttttttaatgtcaaaaaaggccaagcagtggttgtcttaagttaaggtggacgtgcaacagtgatttttacgtcacatataatgataaagtcactcgcaaaaatcacgtttacgttatttcgtaaatcgcgaaagcttttgcgcgggcggaggcttttaagtgattgtagaatcttttttgtcttttttaagcaggatattttgctttacctcttacgtaaacaacaaggggtcttttcccaaacccttaccgccgaaggaagagtacgaatatctcatgcgcgcgaaaaacggcgacgccgaggcccgggaagtgctgattcgtcataacttaaggcttgttgcgcacatagtcaaaaagtacagcagcgcgggcgaagcggacgatcttatttccgtgggaagcatagggcttataaagggaattgaaagcttcgagtacggtaagggttcgcagcttgcgacttacgttgccaagtgtatcgacaacgaaattctcatgtacatacgctccaataaaaaacaccgcaacaccgtttcgctttcggagtcggtaggaatagacaaagacggtaacgagattactctgatggaaatcctgcccgcaaaagacgaaagcatgttttccaaaatagaaaacaatcttgtcatgcaacgagtcatggaagtgaccaaacaggtgcttaacaagcgcgaatataaaattatttgtatgcgttacggattggagggggaaagggtacatactcagctggaggtggctgccaaactcaatatttcgcgttcttatgtgtcgagaatagagaaaaaagcggtggaaaagctttctaaagaactgaaaaaataaactgcaaagctttttttgaatttgcttgcaaattttacgcgtaagtgttataatttcaacgcaagataatcggacggttgcgcggtttaccgcgaggaaagtccgaacaccgtaggacaggatgccggctaactaccggtgaaggcgactttaaggaaagtgcaacagaaataaaccgcctatgccgtaaggcaggcaaggttggaaaggcagggtaagagcctaccgcggccgcggcaacgcggacggcaatgtaaaccccatccggtgcaagatgtgagggaaatcggttgtccgccgtccctcctatatcgcttgaacgcttcggcaacgacgcgtctagacagataaccgcccaagacagaattcggcttacagattatcttgctgttttaaaaaatattccgcgtccgtttcggggcgcggttttttttatgccgtaaaagcatgcgtatacgtttacgccaaaggaaaagagagcataatcatataaaatattttcggagtttttatgctgtttctttccttgatttttaccgttctgcttattttcgcggtacttatcttaatacttttaagtcccgctgcaacccccgatttcagacttaaagctccttgcggaaataaagagcttgagtcggccgtcgtcgaccttgctttaaaatgcaggtttgcagttaaaggggggacgggattgcccgtaaaaatcatatcgcgcaagattttggaagcatattccgttatcggcaaaaaaaaatcaacgggttattcgttggaagagttcgaacgcgtattttacgataactacgcgcaaatttcgtcgttgctttcgtctataaaaaacaacggcaggaatttttacgccttgccgcacatctggggacttccgagagtttattttttatgcgaacttatcgtaaaactaagcggcggatacgtgacggaagaaagtttttcaaaatacgtccgtttgttttcggaaagctgtccgcttctttatagcgaaataacgtgtctttacgatgttttttcatatgcggttgcggaatatatcactatcgttgcgtccgcggcggtaaagataaacgatttttgcggtaagggcaaagccgacgcaaaaaaggaaagagtaaacgtcggacttttaaaaagcgcggcatatctgaaagcgttgtatgaagaaggcggcgacaaacttaaaatacaattaaaaaaactctgttacgacaacggtatcgagcttaaagaccgtattgacggactttatgcttcttttgacagatacaacgttttcgtttcgtcggcggtaaaaactcttttcgaaagacagaaatggatgaaagaggaatttttgctttcgctttattccgtaaacgattattttgcttccgctcatgagttgcggttttacgaaaacacactctccacgcgcaggctttatcttgaagcggtaagtaaaatttcgcttaaaacaggtaaaagcgaaacggctgttgctgcggaagcggcgtcgagggctattgcggaaaattgcgacgtcgggaaatatctattgaaaaaggagcgtggaaaaacagccgatgcgttggcgatttttttggaggttttgattgccgccgtattgagcggtttggtagcatttatcgtgccttttcccaaaatcgcgactgccgtgctgtccgttccgttgacttttgtgtgttcgcatttgattgtctcgttctttttttcggttgccgcctcgccgctgatactgccttataaggacataaaatacattcccgaagaaaacggcgccaatatagtctgtaaagccgttatcgcaagcgaaaaggacgcaaaagacgcggtgtacgaactaaaatgtcttgctttcttaaatcctgagcgtcatttttcctatacgctttgcgcgcttgtttcactcggggttaaagacgaaaagcacgccgattcgcttgtaaaatttatcgaaaaggaatttgccgcattggctggtgacagattcaatctttttgtgcaaaagcctgtttattcggccgataaagcaaatttttacagtagctcggataatgcggatacggaatacaacctgttccgtatgatatcggaaggcagcagccgcttttgtaaggttctgggtaatacctacaggaaaaaatatcttattgcggcggataaagatatggttttcaattgcggcaaagagctgcttgaaatcatggaacatccattgaacggtaaaaaaaattttgtcgcgatgagtacggcatgcacgcctcagaattcggagtcttcgttttttgcccgtatcttttccttaaaatccagacaaggcttttatttcggcagcgagggggtggggatgaagagtgtttgcgacggctctcaaacgggaatttaccgcgtcaaggaattttataagaccatgtccgagtttaaggaacagggcgaaaaatccgaacgcatttttccgcttgctcaaaccttaaacgtgacgttttgtaaagaaaaggtttatgcgcctttccctgcggatacagaacaatacatttttgaaaattcattacgaataaaacgatttttgcttttgtcgggacggaggaagataaacaaaagcgcaaaaacaactgcccgtatatcgtttatgattaagtggcgcgcctttctgaatgtcttttattccctttcgcctctgttttctttatcgctgattgctgtttcgctgttttctccgtattcgcctataatagtcgtcgtcgctttgcttccgtatttagcagaatttcttcttgtcgtgccgacgctttcgttgtcggttaaaaacgcgcttttaagctgggcggcgattttcacggaaatatgtcttctgcctgttgcggccgcgtgcaacgttgcgacgtttttaagtttgttgtttggtctttcccgcaggaaaaaacacggcataatatccgcaagaaaaacgggcgcggaaagaaacgagtcaatcgtgcttgtgcttataatatccgcgattacaatatttaccgtcaatattttttacggaaaatacgttgctccttttggcgtaagcgcgttgtttttgtttgccgttccgcttcaggcctttctgtccgagaaaaaacgaatccgtaaaatttcgcccgcgctaaacggatatctgttgcttacggctgctaaaacctggaattattttgccgaatcctgcgtaaaggaaaataacttttttccgccggatatgtattgcgaattaggggataagggattttgcaaaacgacttcgcctgcctccgtaggcatggcgattgtcgcggcgttttcggcaaaacagttaaaaattataaattccgtccgcgccgccgaatttatagcgccgatagtaaagtcgatttgccgccttgaaaaatataaggggaatttttactcttcttacgaactgaactctttgagggtaattcctccgcattatgtgtcgtcattggaaaacggaataattttctgcgcgttgatgctggcgcaaagttttgccgacgatataaccaaagcggcaatagatgaaatcgtcaaggacttcgatttcaaggcgttgtatgatgaaaattcgggattcgtttataagggaatatacgtttcggaaaagcaaacggactcggttgccgattttttcgcaagcgaagaacttttatactgtttggcggggataggaaaaggcgatattccgcgttctgcgttttatgcgttaagcagggacagagtacgctgtaagtataaaactgtttattctttgacgggaggagcatcggaatatttgcttgctccgttgttttttaactatcataaaggtactttttgcgattcggtcgcccgcggtgcggtgtcggctcagcttgattatgccgtaaaggaaaagcttccttactggggactgtctcaaagtctttgtcttgtttttgacgaaaaggacgaatacagaagcggccgtttcggcgttaaacaaatatcttgcttgcaaaacgacggagataaggcaatatcgccgtattcgtgtttgcttgcgcttaagtatgcgccccgtgaaactgaggcaaatattgccgcaatgattgaaaataaacttctcggacggtacggcttttacgacgccgtggaaaagaatggcgtggtgcgtgcctttacggcttatcatcagggactgtctttgggcgctatttgtaattttatgtgcgaagattcgattttggaggcgatgagttcgactgccaatattcgtgcggcggaggttttactgtattcgcacgaaaaaatcggaaaatcatacgcgaaatttaaatcttttaataatgggatttccgcgcccgcgcctgttaaagcggaaggcttttttgaatatcctttgcttggattgtacggcacaaacaattataaatttgtcgtcgatgaaaacgggagaggtttttccgtttcgggaaactattatcttaccaaaaaaagacgggatgacgggtttaatatatacgcttcggcaggcggagaaacatttgacctgacagaaaaatcaaacgcttgtttttattccgattatgcggaattctattcgtcttttcccttgtttaaatcgcgtgtttgcgcgcgggctcttgtgagcgtagccggcgaaatgagaacggttacgattaagaatttaagcgacaaaacggttaaagcgcttataggagcttatgtgcctgttaaacttgataagaaatatttcgtttcggaagacgaggggacggcggatatttcagtgaaaacggaaataaaagacggctttgcttttgcgttccgcgacaatgattctccatgcattgcgcattatgcttgcggcggcgaagacgtaagatattacacttccgaaaaggaattctgcgatattttcaaaccgtgttcaaaaacggggcttatggaccccgctctaggctcgacagtagaaatcactctttcttcgggagaggagaaaagcgtaagctttgctgtttttgcttcttcgcgtcacagcgttgcaaaaagacaatttgacatcgtttcttcaaacgggttttttgcacgggaggaaactttttccggcggcaaaaaagctgtggacaaggtaaccgcttcaatggcgtcaagactgatttacggttccgtggggatttataaggacgctgccttaaaaaactttgtaaacaccgattttcctaccgtggtcgtaagtgtggaaaacgatcgcgcaatcagtcgcgccgaacgggaattgaatcgctgtgcgactctttattcttacgggataaaatttaacgtagtggtgtgttatcgctcaagtaaggaattcgaattcggtttttcttccgaattgaattctgccgtgtcaagaagcgaaattaagcgggtcttacctcttgattgtgtgttcaggttgtttaacgtactgaaagaaacggatattgccgaaaaacttcaagctaccgactgttgcagcgatgttgtgaatcctgttttgaaaaatagtcttattgtaactaaacggcaacttcccaatgcggaaatggcgccgcccaagcttattttaaaaaccgctaagggcggatttacggaagacggaagttattttatagacgtaagcgaatgcccttgcgaaaagccgtggcgtaatttcgcggccattgacggattcggtacggttatgacggattcgggcggaggttatactttctccatggacgcgaaaacgcacaaaatcacttcggacagtttaagtttttcgcccgattgcccgtctgaaagcgtttttctgggggaaggtggcacgatttggagcgttacgcgcgcgccgataaagaaaaactgtaattattttgtattacattccttcggttataccaaatactcgtgtaattttaacggtctcaagtcttgccttaccgaatttatcgggcaaacgggagtaaaatattactcggttgaaatccgcaacgaagccgattacgaaagaaaaattaacgcggcgcttgtgcttgacgtcgctttaggtagcggtgaaaatacgtcatgttcgcttatcggatttcgggaagacaataaggtgacgatgaaaaatacttctgacggaacgtattgtaccgtggaatgttctcaaaaacttaaaagcttttcgttttcccgtaaatccatgatgaacaaacgtctcgaatacgtcaggataaatgaactcgaggagatgaaaggcagttccgtcgtttattccgtatcagtgccgataaaggcaaaatcaacgcaaaaaattgttttttgtctttcggcaggggcggaagcgcaccccgaacttgcggacgaaatctttgaaagcgtaaagaaaaaatattcgtcggtttcgcccgtatcgttgcaaagcggcgacaaaagtcttgacatgctttataaatggttgccttatcaggtttattgctcccgattttttcgcagatacggttatgacgcgtacggtgcgacggatgcgtttcgcgataaacttgaaacggctcttggtctgatgtatttcgattgcgcttctgcacgaaaactgattttggaatgcgtgggttatcagttcgaaaagggcgacgttttaaatttcctcgacaatactggcgcgggactaaggaccaggcgttacgatgacagattgtttttgcccatagccgttgccgattatattgctttcagcggcgactgcgaaatattaagcgagcgtgttgcatatttggcggatatgcctttgccggattttaaagcgacggtttacggtaagaccgttgtgactgcttccacgggaagcgttctggaacactgtaaaaaggcactgttttcaacggaaaccgattatttaaacagagtattatttaaaggcggcgacgaagatttatccctaagaaccgaaggcaaggaaggcatatccgtttacggaacaatgctttattatcatgcaataaagaaatttcttcctttcgttacttttcctgccgaaaaagaaaaactaaacgttttgcttatcgagctgtccgccgcggctgaaaatcagtgggacggggagtggtatcgccgtgccgaattcaagggcagagtatgtctcggtggaaattcctgcagcgaatataaaatagaccttaaaacgcaggcaattgccgttctttccggagcggtatctcaggaaagggcggattttgcattgagaagcgcggaaagaattcttgtaaacggaaaaaacaatatgcctgtatcgtttatgccgccgctaaataaatacggttccgtgttcgaagcgggaaaatatccgtccggtgtaagagacaacggcgcgcaaaatgcttatgcctccgtaatgtttacaaaagcgctttataaaacgggcagacataatcgcgcatacgaatttctgaacgcattaaacccgataaatctttctcttacgcagtccgatatggaaacttataaatccgagcctttttcgtttgcccgtaacgttacgattgggggcgaaggtgatttatcctggtatgcttcttatgccggatgtatgtacaggtgtattaccgaatatatgctgggaatgaccttcaaaggcgatactttaacctttcggccgcgcctgtcggataaaacggacgggcttaacgtgcgcgtaagaagaggaaagtgtgatatcgatatctatgtggataattcggttaaagaaggcgaatggcgcttttctgtgggcggagttacctataataccgatacaataaggctttttcccagtcttaacgggaaaaatataacgatttcgcggcaaaaataaagtactatgtcagacataatgcaatataaaagtaagatttaagctactatttcttaaaaattcaaataacaatttaaatattgcgttaaaaataaagcaataaacgacttgcaaataaaggagatttgcggtatacttttcgca

SEQ ID NO: 1045 - DNA, 2924 bp, Unknown
  16S sequences of unknown bacteria
gaactcacagaggtgcggcgtttgagcatctctgtgcgccctccgcgtaggagcgtcccctcaccgcagtgagatataataaatctgaaagggcgaagctctttcttccttttttcttacttaaaacctaagtaagtctcacaaaagggaagtctcttagaatacgctcgttgtctaaggaaaagaaattagctgcgctctttcttcatatttttctccgaaaaactaaagaatttcaaaaacttttgagaaagagctttcccaaagctcatttcgctcacgaaaggacaccccacctccatgattctcgctgatcacttccttcctactactcccgaggagcttgacggaaaaaccccagacttcgtatatgtctgcggagacgcttacgtcgatcatccgtccttcggcgcagccctcattacccgcgtcctcgaaaaacacggctttacctgcgcaatgctctgccaacccgagttccgctccgccgacgaattcaaaaggttcggtaaaccacgcctcggcttcctcgtttccgccggaaatatcgactccatggtcgctcactataccgccgcaaaaaaacgccgcagcgaggactattactcccccggctttaaggcaggacttcgacccgacagagctaccatcgtatattgcaaccgcgtcagagaagcctacggtgatattccgattctcataggcggtcttgaagcctcactcagacggtgcgcgcattacgactactgggataataaggtcagacgctctatacttgtcgactccggcgcggatatcctcatgtacggcatgggcgagcgttccatcgtccgccttgcacagctcctcgataagggcgttcccgtaaaaaagattcgggacgtgcgcggaacggcgtatctctgcaaaatcggagagaaaaccgctttccccgtcgctgaaaactataaattcctcgaccgcgagccgcttcacgacagctttgacaaggacggcgaagaacctctgccggcgggatattcctatgacctactcaaaaccgaccgcgaggtatacgcagattccttccgcgtgcagtatttccagaacgactccgtacacggcaagtcaattgtagaatactacgacaaaaagatgctcgtcgtgaatcccccgcagccgccgcttgagagggaggagcttgacgaggtttatgctattccgttcatgcgcacataccaccccatgtacgaaaaggacggcggcgttcccgcgattactgaggtgcggttctcgataacccacaaccgaggctgcttcggcggctgcaacttctgcgcgatagctttccatcagggaagggcggtacgctcacgcagcattgaatccgtagtggacgaggcgaagatgctcacgaccctgccggacttcaagggatacattcacgatatcggagggcctacggcaaacttccgccgacccgcgtgcgaaaaacagctcaccgacggcgtatgtccgggcaggagatgtctcgtaccgaagccgtgcaagaacctcatcgccgaccacagcgagtacatagagctgctctccgaggtggagaagataccgaaaataaaaaaggtcttcatccgctcgggaatacggttcgactacatgatgtgcgacaaaagcgacgaattcttccgaaagctcgtgcgggatcacgtcagcggacagctcaaggtagctccggagcattgttcaagccatgttctcgcgtgcatgggaaagccggacgtatcggtatacgacaaattccgtgagaaatacgcgaagctgaacgaagaatacgggctgaaccagtatcttgtgccgtatctgatgtcgagccatccgggaagcacaatggacgacgcggcgcttcttgcggcatacacgaagaggataggtttagcacctgagcaggtacaggatttttaccccacgccgggaacagcgtcgaccgtcatgtactacacggggcttgatccgttcaccggcaaggagatatacacggcgacgaactaccgtgaaaagcagcttcagcgggcgctactgcaatggcggaagccggagaaccgcaggatgatctacgaggcgatgaactactgctccgaggaagggaaggagaacctgcgggagctgctgcattccgcgaagcctgcgcacacgggaaagccgaacaatcccgcgaaggctaaagcgaaaacttctgcgaagtccgaagattctgcgaaatcttcaagtgaatccaagagcagcgtttctccgagaaaccatacttctcagaagaatcaaaagtcttacgctaaggattcggcgaagtcttttggaaagaaaaagaaataaaaaatgcccgaggtattgtgggggagattttggtaaatctcgcgatacctcgggttttctttaagtttcacttaaacttcaagtgagaagatagaagaaaggacttcgccctttcagatttttattttatcgactgcggtcgaaggtcgctcctacgcggagggcgcacagagggattcagacgccatccctctgcgagtaccggctcgcggtggagtttggttgatatgattaactctatcatcgcccatttgaacagctcagtcgcgcggtttagcataagccttagtagtggcattagcatgttcgcgcgggagaggtagacgcggtaaatgcactaaatttgttcgttttgcttacgcgcggagttgagaatacctaatcaaagtaaatggattaggctaaccgcggattgtcgggagtttgtgcgttgaaatgtagataacgtccgatttcgttttgcttccgtaggagaactgacgaacgatttataaatctaagccaaataaacagacgcggacattctaactacactactaaggcttatgctaaatcgcgccccaaaactcaccgcg

SEQ ID NO: 1046 - DNA, 29141 bp, Unknown
  16S sequences of unknown bacteria
cgggccgttcacatgttggttttcttatgttttggtggttgcggagcggactctaatgtagctaagatataatacttttggagttgggatggatgcatgtcttcgtcggtttctccccgacccttctttcttaaaacgccgcacgccagcgggatgcggatcacctggtggcattctgcggcgtttccccaaaagagaagagctgcctttgcagcaggcagctcttcttgtttttccccctgacgggggcttttttatttcctcataaagagaatccccagcgtgttgggcccgcagtggctcgtcaccgtagagcctgcgtccgtctccaaaatttccgcaaagggcggctcgtgctgcagcagcagctccttcaccgcctgtacgtccgcaggatcgcactcggtatgggtaatgaagattcgatagggatccacatcgtcccggccagccagacgatcctccacataattcaaaagcacctgacggaaacgtccgcgatatttcttggtaggcgccattttgccgcccatgacctcaatgcaaggtttcagatgcagcacgttggcccccatcatggtaatggcgctgcagcggccgcccttgtgcatatagtccagccgatccagaatgaagctggcctccaccttgttggtcagtcgggtgcattcctcgtagatttccttggcggaagcgccggcccgggccatttccgcgcccttcagcaccaaaagcccctgcccggaggacagattccggctgtccacgacgtatacctcgtccatctcctgtgcggcggcgcaggcgttctgatagcagctggaaaattcgctgctgatgcagtaatgtacgatcgagtaccccttttcccgccaactgcggaacacgcgaacgtattcttcggtattgacggcgctggtcttgggcagctctttgcattccgctacatgctgatagatcttcgccggggtcacttcgataccgtcgcggcccgtgaaatcgcccaggatcacggaaagcggcacaatttcgatgtcatagcggctgaccagttccgacgagaggtcgcaggtgctgtcggaaatgattttaacgttcatcgtgttccctccctgttttattgcaggttacgaaatttatcatacccattcggaggttgtcaatcaataggcttccttccaaaaatgcacaaaattttttcatttcgtctcttatgtccaaaaaaatcccccttggcataccaaaggggattcgggaaaatcaggaatccttcttgtccggccgcaccggcttttcctgaagcaatggcagacgattcagctcctgccgaacaccgccccacaggcagcccagcgccagcgccccaaagccgcaggcccagcccatcaggcggctgtaaaaccgcgcccgcaagagctccggcgtgcggagctccatcacagtggccgtgtcctgccacacgttccagaaggcggcggcaatgtccttgggctctaccagcacggcgggcacccactccgggaaggtgaataccggctggatcagcacaacgaacagccccgccagcgcggccacacaggcagcatagccgatcatcagccccactgcccgaagcagcagccagcccagcagccgggcggcatattcctcccgaatcttgctccgccacgcggcgcatacccgggaaaacagccggttcaatatgcggatgaggtacagcgccagcacccagccggaaatgaccaacaaaagccgcaaaggcatcttgccgttcatgctttccttaggcagactgtgggtggagccgctttccgacagctgttttgcggcgctctgaaacgcagcccagccgcccgcacccttcaccggtttgccctcaaagatcacgcagctcatgacctgcgtggaagacaccagcgaacggtagggcacgtacaggctgtattcctcctgatcgcccacccgcttttgatcccgtacaatgccgatcacgcggtatttttcgccggaaagaacgatctcctcgctcaggggctcggcgtactgaaacagcgccacggccagctgctcatccagaagggcgactttttcgccgtaagtgtactcgtccgggtaaaaatagcggcctgtgtacagcgcgaaaggctccacggacagatagttctcgtcgagccctacgagccgcgcggaggcagcgttttccccctcgccggtttccactgtggcgggctgggccaccgcatacagggtggtcggctcgcaggagccgtccaacgccgtatccgccgactcctttttgtccaccaaatcccgcaggtaacggttcaccggctggccgccctcggtttccgccagctgctctcccggcagaaacacatgctgataaacgccgggaaggccgttcagctccaccgccgcataaacgatcaccgccacggccagcgccagcagaaacagcagttttccgcggtctttccaaaatgctttgattgccatcactgtccgctccccggtcactccgtatattccatcacaggcttgccgtcctccacggtgcggtcggccttgtcgatgatctgctgccagcccaggtcttcttccacgctgacctgggtgtcgctgcggtcgatgacggtgacggctgtctttttggccgtcatgccggaggaagacagcacgccgccatagttgtactgagccacgaaaacgtactccgtgccgccctcggagcgcagggccgatgcgggtataatggtggcgttcttccgggagcggaagacgatcttcgcgtcgatgctgccgttctccatcagcttgctcatgccgcccgcggcgtaaagaatatcgtcggtcatttccatctccgcgtatttgcggccgtcgctgtcgttaacgatctggctgaccttggtgcggtaggtgctgtaatcgcccttcacctccaccttcgcgccctcgctcacgtcctttttcaggtcggtcacatctgcccgaagcacgggcttatcctcttccttggcgatggtatacaggatcttgtcccccgaatacacgtcgccgcttttcaggtccagccccaccacataaccggcgctggaggccgtcacaacgctcatgctctgctgggcctcctgcagggccaccatgtcgtcggacagctgctgcagctccttcacgagggcgttgcggcttttgatgtacttgaaaacgtcgtccgccaccttgatcttcttgttttcgtagctgtcgaagaaatcctgccgggcctgatcgaaattctgcttggccgtaacggcggcgcggatcagggaggtcacttcgctgctggccttggcggactgggctttcgccagccacgtgctctggtcatagctcagttccagcccctccttagcggcggccagacgagccttgctttccgcttcggacagcgcgtcctgcttggcgatcatatcgtcgtacagatcgttctgcatactctgcttgctgtttttgcggttggtgatgtccagttcgatcagctcctgcgccttcttggcgtagctgtccgtcagttccttttccttcttgtcgtaatcgttaataacggcggtcaggatggtgtcacccttttctacatacaaaccggtctttacgtaaaccttatccaccgtaatgggataatccttggccttggtcagggtgatctccgtttttacggggaaatagggcgacagtgccacggccaccttctgctcgatgcgccccacatccgccgtcaccagcttcaccttgggggtggtgatggtctggatggtgcgggagaagtacatacagatggcgatggccgccgccagaatcaagaacgccttgagaaccttgcttttcttgctcatgggagtctctcctgttattttagttcgctgagctgcacgcccagcaggatatcatcctgaaaatacagatacaccagcaacatcggcagaatgtacagcgccgcgcccgcgaacgccacgtcggcggagtcggtgttgatctggttgaacatgacgctcagcggctgctggctggaatccgtcagatagatcagcggctgctccaccagattccagcagtcggcgaagctcagtgccaccgaagcgccgatgatgggccggcagaccggcagcaccacctgccacaggcagcggaaggtgcccgcgccgtccatctgcccggcttccagaatttcattgggcagccccagcatgaactgccgcaccagaaacagataaaacggagagaaccacatgggcagtatcaccgcccagggggtgttcagaatgcccagcgcccgcagggtcatgacgcttggggccatcgtcacctgaaagggcaaaagcatcaataccagcaccagaaagaacagcgcatcccgccccttgaagcggaagcggctcaggccataggcggtcatgggaatgataacggcctgtcccagcaggatacccacgctgtagcggacgctgttcaggaacagcttcagatattggggctgctcaattagaattttgtaatactgccgcaggctgacctgcgagggcgagaacagcaccggcagccacttggacgtgtcgtagctgctgcgctgattcagataatcgctgatctccgatttaggaaagaacgaatacaggaacgtgaacacgatagggatcagcatcaccgcggcgatgacgcacagcagcacgaacgtcaggggccgggcttttttccaccagtggcggaagctcgggcggcgtgtttttttcctgcgccctgccgccggctgattcgaggttttcgagatctgcatggatttttctcctttcaggcggcgctgtcgccccggacggacttggtgcggtacagcaggaaaataaagaccagtacgatcaatgcgaaggaataggcggcggtggtcacatcctgataatccagcttggagaacttgttgttcatgtaatgctgcagggtgtaaatgctttcattaggataggagccgccgatgaagtacacttccttgaaaatcttaaaggcgttgacaatggccagcaccagcaccagaaaggcagtgggcaaaatctgaggcagggtgatggacagctccctgcgaagccaacccgcgccctccagactggcgtactcgtacatggcctccggcacggcctgcagggcggcggtgaagatgaccacgctgaagcccagattcttccagatgtacaacagcacgatgggcacccgcagcatctcgccctccagccagaacacccgctccgcgcccagagctaccaccagccgattgatcacgccgccgtagtcgaagatcagcagccagatgatcagaatggcggaagaaggcatcagatagggcagcagcagcgcgttgcgaaagaagctgtcccccgccacgtgcttgcgcagcattcccgccagcagaaaggacagcaggaaaatggcgggggcgcacaggagagacagttccagcgtgtttttgaggcccagctggaacaccgggtttttccacacccgaaggtagttggcaaagcccacaaaacggttgtcgatggttccgtcggtcaggctgaaccagatgccccacacgaagggcaccacatagaaggccagcaggccgatcattcccggcagcagatacagccacacggatttacggtgaaacatagttttttcctttcctttgccttttggaatttcagcgaagggtcaaatttcgtcctccagctgcatcaggcggatgcggccttccagctcccggatcaggcgatcccgggggatcgcgccctcgatatactggttgataagagtgctgatctcggtcatggccgtctggttgccgctgtagagcacgttctgccgttccacatacaacatgggcagcatggtctgctggtaatactggatccgctcggcgctgatgctgtagcggttctgttccagatacttcaggtcttcttccagactgctgatctcatcccggatggatgctttgttttcctcactggccttttccaaccgctccttcgcgttggcgatttgtttttccgtctcttttttctggcgggcgtagtaggggctttccaccggctccggcgtgccctggaagaaggtgatcgcgccttcgtccttgggcaggtgcgtcacgtaatactccatataggtcttggcttcttccattcgggtggtcttggggttgatgatcatcaccgtcgtggtgacggacagggaaggttcttcgccttcggccacggacaggtacagcggccggtagttttcatccatgtactggaagttgctcagcggcaatacagaggtatagctctgaaaaataaccttttccatgtccatggattcgttctggtcgtgaagctgttccagttccttgaagttgatgtcctcaaaggcccgcagaagttcttcgaactccggcgtgttgaaaatgatctttccttccttcttctggatgtaggtgagatactcgctcagaatcatggagaagaagctggactgattaacccagtcgaacaggaaatactcggaataatcatcgccgtagtcaaaggcccagttggcggtgaactccatcagatccagcagggtcttgggcaggtcgtcctccgtcaggcccagtgcttcccatgcgtccatgttgacgctgtaggtggaggcgctggcgtccaccggcagaccgtagagcttgccgtccttcatcagaatttcgccaaactgggggtacatgctccgggccacgtccatcagcgcttcgtcgccggacaggtcggcgcagtagcccttctgcaaaagccgatccaccggcatgtagttcaggctcaaaaacagcacgtcgtagggattggtatcactgaccatggcctgggtcagggtctccagatcgttggagtaatcccccgccacctccacagaaatttccgggtgggccttggcaaagttccgatgagtatcggaaccgctttcgccgaagatgcgcagcgcgcccttttccagcgaaggactgttgagcaggtactgattcagcccggaactggcagtaatgtagtagccgccctcgcacagcacgtttccgtaggagcttccgccgtacatgccctcgccggtataggccgcaatcttgctttccccggtctccgggtcaatgcccatgatccgggaaccgtcctgataataaaccttgtccccgtcgctgcagaagcccctcagattataaacgcccatctgattatcgctggtgaccggccattccgtgcccaatgtgccgctctccgggtcgaaaatcgccagcgtggcggtcagctgatccaccgaggcttcgccggtgtacagggcgctcatatcgcacaaaaacagcgccacctttccgtctccataggcgcaggcattggcgatgctgggcacctcaaacatctggctggtcccgcccgtcagggggacgcgaccgaagcacattttattttccccgccggaataactgctgcccacgaagtacagccagtcccccatcacgaaccgggcgttggtgctcatgggataggaatagtccccgtccttttccatcatcacgtccaagtccagcttgaccgtctgcgctttcagctctaattctccctgatcgttcagcagagaataccactggccggtatagggattgagcaggtacaactgctccttccatgccagcagaaagcagctggacacgtgatagcccatacccgtggcttcatccatcagcatttcggagtcgatcaccccaagctccacggacgcgccgccggtcagcggcttggaaaaaagcatactgtcctccgcatcggagaaaaaatacagattaccattcaaataggcgatgctgccgtacaggtacccggtgctggggtcgccagactcgtcgtaagcgctgtcgtccccttcggatgcagtctcggccatagcggccggcacggcccagactgtcagcaatatcagcgccatccaaagagcgcccagcatggaaaaacgtttccgctgcatattttccttcctttccctgccgaagccttccgcttgggcttctgtacagactgtatcataccacatcgtacagtggttttgaagggttccgccccctgcaaaactgtccagattgtaaaaattgaccgggaatgcaaaactttccgaaaacctttgtgttttggggcggtgctatgctataatgtcaaagtcgtgcattacggctgttttggcgtattcgcagcccgaccggagttcattccggcggcatcaaggaggacttttactttgaagaagaaccaacggggattgatggggtacgtggtcctgatcgcggtctttctcgtgatcgcaatcctgctcaacggcgggttgggccagcaggagaacaaacggatcgaatacccccagctgctgacctccatccgggaggataacgtgaaggccgtcgccatccgcggcacgtcgctggtgggcctgtaccgcaacggcaaggtggccgacgcggattttccggatcggggctatgattttgaaaccactatcggcgcggacttcatcgagaccgtgcgccagatgactgccgccaagaccggcaaggcgctggaggacgtcagcgtcagcgatctacccttcacggtggaataccgcgcgccggtggtcacgccgtggtatctggaatacctgccctacttcctcagtctgattctgatcgtgggtctgtggtatttcatcatgatgcgtcagggcggcggcaacaacaaggtgatgaacttcggccgcagccgcgcccgggtcagcgaccctgccaagaacaaggtcaccttcaaggatgtggccggggccaaagaagaaaaggaagaacttcaggagatggtcgatttcctgaagaaccccaaggcctataccgccatgggcgcgcgcattcccaagggcgtgctgctggtgggccctccgggcaccggtaagaccctgctggccaaggccgtggcaggcgaggccaatgcgcccttcttctccatttccggttccgactttgtggaaatgttcgtgggcgttggtgccagccgcgtccgtgacctgttcgatcaggccaagaaggccgcgccttccattatcttcatcgacgaaatcgacgcggtgggccgtcaccgcggcgcgggcctaggcggcggtcacgacgagcgcgagcagaccctgaaccagctgctggtggagatggacggtttctccatcaacgaaggcgtcatcgtcatggcggctaccaaccgccgggatatcctcgaccctgcgctgctgcgtccgggccgctttgaccgtcaggtgacggtgaactatcccgaccaggaaggccgtgtggaaattctgaaggtccactccaagggcaagcctcttgccgccgatgtggatctggacaacgtggccaagcggatgccctactccaccggcgcggatctggaaaacgtgatgaacgaggccgccattctggcggtgcgccgtcacaagaagcagatcacccagcaagatatggtggacgccatcgcccgggtgcagatgggcccggaaaagaagagtcacaaggtcaatcccaaggatcgtcacgtcacggcttaccacgaagcgggccatgcggtcatcgccaacctgctgccggaatgcgacgacgtgcatctgatcaccatcgttccccggggacaggcgggcggctacaccctcagcctgccagaggaagagcatgacaacctgagccgcaaggcgctgctgggcatgatcaccatggcgctgggcggacacgctgccgaggacgtggcgctggacgacatctacaccggctcctccagcgacctgaagcgggccaccgacctgtgccgccgcatgatcacccagtacggcatgagtgaggaactgggtaccatgtatctgggcagcgatcaggaggtattcgtgggcatggagtttggccagagccgcgaatacagcgagcagagtgccgccgccatcgacgcggctgtgaaaaagctgatggagacctgctatcagcgggccgtctccctgctgaaggagcacttcgaccagctcaagggcgtggccgaggccctgctggagcaggataccctgagccgtgtggaatttgaagccatcatgaacggccagcccctgccccccatgagcgaagtggaaatgctcaagcccaacctaagcgtggaggacaaaaacgctcccgccgatgaagaaaccgccgaggaaagtccggaacagccggaagctgcccccgaagcggacgacggcgagccctttatcgagccggaggatcagaaccggctatgagccagacgatcgcttatcccgtggatctgcacgtgcacagccgctactccgacgggcttttcagcccggaggagctggctgcgcgggccgtccgcggcggcatcggacagatcgccctgtgcgatcatgatacgctggaaggaatccagcccatgaagcgcgccgttgccgcccgcctgctgcccggcggagaacggatgcgcttttttccttctctggaactaagcaccggcgatggcaacacccatgtactgggctatggagccgatacggaaaacgccgtcctgctccgcacgctggaagaaattcgccgcagccgtctgacccgcatggaggaaatgctggaacggctggaaacgctgggtatccatctgccggaggaacgccgggcacgcctgctggttcccggcacaggacgggctcatctggcccgggagctggtggggatggggctcgtttccaccgttgcgcaagcgtttgaccgttatttggacacagggaaacccggctatgtgccccgcaaatgtcccacagcgctggaaggcgtcgccctgctgaaagccgcgggcgcggccccggtgctggcgcacccctaccggctggggctggaaacggcggccatgtgcagcttccttctttccctgaaagaagcggggctggccggggtggaggcatggcatccctccgctaatcgaacgcaagccatggagctggaccgctttgcccgccgaaacggtctgctggtcaccggcggcagcgatttccacggagacgccaacacgcaggtatcgctgggccacatgccctccggctggaacacctgccgggaggatgcacagcttctttttgatttcatcaaccattgacaaagtacgaggtggctttatgtacaaccaaggctacgttccccagaatcagggtcagcagagcggcaactggtatgctcccccgccccagcccaagcagcagacccgccgttcagggggaagctccggcaagcagccgccccaaaagccgaagaaaaagcgctccctcaagtggcagctggtgaaggtgctggtggtgatcgtcctgatcgcaggtgcgtgcgcgggcggctacgtctggaagacccagaacgaggtcaggccctacatgagcgttttcctgcccaacgtttacgtggacggtatcgcgctgtccgggcttacgtggcaggagggcagtcagaaggtctgggaacaggccaacgccaaggaaaacagctggtatgtccggctgaagaattcctccggccaatatcaggacattacggccagtatgctgggcatttccttcgacccctctgcggcgctggaagaagcgtgggccatcggccacgccacggacgccagcggacggaaggatatttttgagctgcagcaggacatcgccgcagcgaaaaacaccacctattcctttaccagcgcccagcaaagcgccaataccgcccccattgacgagattctgaccaccctgcagaatgtggcctacaaggccccgcaggatgcggccatgctgtcctttaacccggacgatacatccaatcccttcacctttcagcaggaggtctacggccaatggctggacgtgagcgccgtgaaggaacaaattttggaaatggtctccacgctgcaaagcggagaaattctgctggaaaccacgcccatcgccccctccgtcaccgtggcggagctggaaaagaacgtggagcttcgtttccgcgccacgacggccatctccaaaaattccacggaggaccgcaccaacaacatccgtgtggcctttgaacggatcaacggcaccatcctgcaggataacaagaccttctccttcaacactgccgtgggccgccgggaggccggaaacggctactatcccgccatcgaatatgcctatggcaacgaggtcatgggtatcggcggcggcgtgtgtcaggccagcaccaccgtatatctggcggccattcaggccgggctgaagatcaacaagcgggaggcccactccaaccccgtcaactacacggaaatgggcatggacgccacggtcaacagcactcgcggccatgaggtggacttcaccttcaccaacaacacgggaagccccatttacatttccgcccacgttatttcctcttcctccaacaaaaaaaacctgatgtgcgaggtgcgtatttacggcaaatcgctggaaaacgtcagttatcagctggtgagcgaaaccgtggaagtgctgcccaagccggaggaacccgtgctggtgaaggacgaagacggcgaaaacgtggtctacgaggatgagaccaagctgcgctccaagggccgggacggctacgtggtggaggcgtatctcatcactttcactgacggagtggagaccgaccgcacccgcgtcagccgcgatacctacgccgccagggccgaccgctattgggtgggcgttacgccgagatactgattttttgagggcaacgaacgcatgaagaccgttttaggaaagattcgccggtgcgatgaggaataccatcttttcgcccccggcgaccgggtcgccatcggcgtcagcggcggcaaggacagtatgctgctgctcaaggccctgagcctgtaccgctacgtgcgccacggagatttctccctgcaggccattaccctgacctccggcaaggaaaaaccggacacctccgcgctggaagcctatgccgcccaggtgggcgtgcccatccacatcgaacacacggacatctacgaaattctctttgacatccgaaaggacaagcatccctgcgccctgtgcgccaagatgcggcgttccattctgtgccagcgggcgcagcagctgggctgcaacaagttggcgctggcccacaaccgggaggacgtgctggagaccttcctgatgagcctgatcttcgaggggcggctccacaccttccaccccaaaaccctgatgagcaagaccggcgtgacggtgatccgccccatggtctacgtccccgagcggcacgtgatccacatgcaacgggagctggagctgcccattctgaaaaacccctgccccgccaacggctataccaagcgggaggaaatgaagcagctgatctacgagctggcccgccgctatcccacgctggaagaaagtatgctgggtgcgcttcgcaactacaagcagtacgcgctgtgggagccggtggaggaagaaagctccgaaacgcgatcttaagcatgaaaacgcagtattcacaccgaaaagtgaatactgcgtttctgcaaaaagcccattttctatgacatgagtcgtccagtaggtaaattttgacgaaaggaagtcgtcgtaatgacgcctttctttgcatttatggtcgtatgactggagtgcctgaaaggagtagattcttgtataaaacgccttgaatggttgctgcacctagaccttcatagtggttggtgcattgccatataaagctcttgttttcataactataggtataaagatcaatatcggtagaagtactgtgttctgtaaccgcttcggattctatcgtgcaaaggcttatatttctaactccatataaatcgcacgtgtaagcggattcagttccatcaacgatagagtattcactgattatagaataagcgtttaataaaactacatcatccatacccatgccataggctggagaagtatcacgagatgcatagcacacttcatactttctagaagataaattatacaaacgctcgatctgaacgctgtcggcaaaagcggatgtcctgattttcagccatgtgttggtcaggccatccactatttcaacagattctacatctggtaaaacattggtcaacaaccattcgccattttggcgtagaaacacaacagcaaaagtagaaggcggataaccataacggataacgactacatcacagagcgtatctgaaacaggaactccccagaaagtaaagtactttgcctgcgttgtagagagagaaggcaagtagctggtgttaagaccgttttcccttagtacttgatcaagtcgatgaatatcattgtcaacggtcagcacaaaatcatccggtgaaaacagaatacactgaaagggcgcagcttcattcagtgattgggaggactctagctcatggagactgtttgctacaatatcctgatactgattatctaaagcaggtgcacatcttgtactggataagagcaagagaactgcgaagaaaatgacgaaagggattcgtttattcatacgatctactcctgtcattgtatttgttgtttaacatatcactggaatgttgttttgtgtactttcttgctggcatagaccagcctgatttagcgacatctcatttatgtatacgaaaaacaactgttctttcttgccaagagtttaaaaatatttgcataggatgtgattctgtcatcctgtaggataaggagtttttgtttttctaatactgcacagtttgtatcttcaaaataaatgcttccaaccataaccgcattgtatttctgctccggcagaacaataaagacaactactgctttatatcgttcagttttttatattcctctggaagataaataaaatcataaatacccttatcgtcagaatggagatcaaaatcttcatctatagatatttccactgtgcagatatcattagccagtttcactactttccctttcaaatttctattgccttctcatctgccgcaaaaacagcagcaccgccgccgccagcgtcagggccatgtatcccagcacccaccacaaatgagggaaaactcccgcccagtttccggccagaacagcccgttctatttccaccgcatgaacaaatggcagcgcataggcgaccttctcaaaagcaccgcccaccaacttcaggtcgaaccacgtgccggacagccatgccgtcagattggtcagcagcgcgccgcacaggccgcctacttgcttggtattcatgatgctgccgcacaaaagccccagcccaatgaagaaaaaagcggcaggcagcaccgtcagcacggcccctatcatcgtaaccgtaggtttcagtcctaacagcatggcgaacccgtaacaaacgatacattgcgccagcgcaatgggcacgaccggcagcagatacccgaaaatgaagtcagccgccgtcaggggcgtggtatacagccgctgcagcagcgccgtttcccgatcccgggcaatgagcgtggcggaaaacagcgtcataaacgccagcccgaagatggtcacgccgggggtcagagtctccagccgaaacaagtccaccggcacattggcctgaatggccgtgagcagcgccaaaatcactacggggaagcccaaactaaaaatcgcggtcagcgggtcccgcaggatctcccgggcattgcgtcgggcaaataccagcattctcattgcgccttcccccttacgatcgccacaaaggcgtcctcaaatttttcttttccagcctgcgctttcagctccgcaggcgttcccagcgccaacaggtggccgtcccgcatcacacctacccggtcggaaagttcttccgcctcctccatgtaatgggtggtcagaacgatggtcatccggcctttcagtgcccggatggtgtcccacaggtcgctgcgggccagcacatccagccccagcgtgggttcgtccaaaaacaggatcttcggttcgccgatcagggccatagcaatgctgagccgccgctgccagccgccggacagcttgcccgcccgtcgggacagtacctcgcccagcttcagctgctgggaaagctcctgaattttggcggcggtcttttcctttgggaagccatgcacaccgcccatcagttccagattttcccggacggtcagattggccgcaacggcggtctcctgcggcgaaacgccgatgatctccttgacacgctcagggctttggagaatgctttcgccgcagagaaaagcctccccgctcgtaggctgggtcaggcagcagagcattttgatggtggtggtcttgcccgcgccgttcacacccagcagggagaacagctccccctcccccacggtcaggttcaggccgtccactgccgttacctctttatattgcttcgtcagatcgacgatctggatcgcgttcattttctttccccttccgtttcttttggcagaaacctcagccgaagcccctgataagcatcagtcagcgcggcgctgataaagtccatatcccattccagataggcggtggcgatcatcgtggcgataccgtgcacatagatccacatttccagatggaaacggtacgcatcgtcccggctcagtcccatgcttttctggatcagcccaagcagcgcttccaattcgtccccggcgaccttttcttcgtgggtgcggtcccgcataaacagcagcttgaaaagctccttctgctcccgggcgaagcggatgtaggccatgccgctggctttatagggcggataccgtccggcggacatatcctgccgcagatactcctgatagcgcagattggcggccttcaccacctcctgctgcacttcttccatattggcaaacaggccaaaaatgggcttggcagacgagccgagccgctgagccagaccgcgggccgtcagtgctccgacgcccttttccgcagtcaagtccagcgcggcctgaatgatttcttcccgcgtaaaccggcatttgggcggcatgagggttctcctttccgactggatctataaaagaatcaaaagttgcgcaacttacgtttcttattatgaaacgaaaaacggctcctgtcaagagccgtttgaaattccgcccggtcagagggccgactgctttcttgttcttttcgagcagaacgacttgccccatcgggcgaacccatccgtgaccgccgtcagcgcggcagccagcaacagcgtactggcataacacagcaccgtaaaggcccattgcagtccggggtcgctgtggagcgtgttggggaaccagttccgcacatactgcaccgccaaaaactggtgccagatatagaaattgaacgtcaacccggacagccagcgcatcagccggttgccaagcagccattccagcggacggggcagaaaggcggatgtaagaatgcagcccagcagcaccagcgccagcggcagccggtgtttcagctgccccagccgcagcaaggccgtgctttgcagccccatcgtacactgcgcatggagaatttgcagcactacccatatgcacagggccagccctgcggcggccgcccattgcagcgctgttttccgtctgggcgcacacttttccaaaaacgcccggcccgcttcatagcccatggctcccagcattcccagcgcatatacgtccagaaaggcgggcagttggttgatatacatggccgtatcttcgaccttgtaatagatgaacgcccggtacagccagcccgccgccatcatcaggcccagcgtcagccccggctttttccttgtccagcgggccagcagcggaaacagcagataaaactgcatttcgatgcagaccgtccacagtacgccgttcagaggcgtcccataatagggctgcaaaaagaaggtctgggtcagcgtcaggtggctccacagatccagccgcctggccccctcgctggcgtagctgccctgcggcaatgcgaacaggaaatacgccgccagcaccgccagcagataggagggcagaatacgccagagccggttccgatagaaagccagcacgcttggtggcttcgtcccctcccgacggcatccggcatggggcagaaacagcagaaacccgctgagcagaatcagcccgtccacgaaaatatatcctgtgcgggtgatatagtcaaaactgatccgacttcccagcagcgtcaccgtctgagggagccagctctgctgccagatgtggaaattggccaccagcagggtcatcagcacccgaaagccgtacagtgcgccgatctcccgccgggcattggcattttccctcatggctcaggcctcgcctgccggagcgtccgtagcttccggctggacggtttcctccggctgggacgtttcggtcgcggcaggggtctcggccggggtttccgtcgcggcgggcgcgtccagctccatggcgggcatttccgcctccgccgtcttggtgaacttgtagtcccgcttgctgccgtcccggagatcccgcaggctcatacccttggcggtcagctggctgatctggaaagaggatttcagatcgtccgggctgtttcccaccagcagactgaagttgctgacccggaagtacagttcctcgcccagcagggtgcaggtgccgtcagtgcggaactccgcctgcgtgccgctggcggactcccacgaaccaagaatcagataggcccggcgtttcagcttgctctccgcgtcccgatagccgattgcctcctgatagaaaggcatggcccgatagggctcgtggttccgatacagctggtcagcgtaggaatagcacgcctcctgatagagctgctccaggtcgcgatacgctctgggcaggttcgtccgatctacgtcctgcaagacccggatggccgcagggtaattttcctccgcaagggcttcccgagccgtggcggaagcggctccgtacagctgatcgtagcagtcggaggcctgctgggacgcatcctcgtaatcgcccagcgcggcgaaggcgtcgcctgcggttttcagctcgcccgcgttcttctgcgccagcgccagctgataacgacaggcgttgatccgctccagcgcccgttcgttatcgcccatctgttcatacaggtcgatggcttcctgatatttctgttcgttctccagccgcgcgccctcgttgaggatcatttcgttcagggtgtccacggcctgcgtgtcgtccagcttgccgacgttctccaacgcggcctgcacgtcgccgctttcctgatagctctgggcgatcttttcttcggtgtccttcgcccactggacgctgtcctcataatctcccaactgggtaaagttttccagcgccgcagcataatcccccgacgcaaactgcgactgggccagctggtagcggcactgatttttcagcgtctcactgtcctgatagcggcccagcaagtccagcgtttccagtgcggcggcgtaatcgccccggctgatggcggcctgggccagctgatagcgcacatcctgaagcaggctgtcgctgtcctgatagccattcagcccggccagcagctgctcggcgctctgataatcgctgttttcaacagcggtcttggcctgctgataccggcactgctgcaaaagctccgccgcgtcggcgtatgacccggcgctttccagaaggggcgcagccgcgtcgtaggcctgctgctccatcagctgcacagcccggtgataatcgcagatctccgcctgtcccaggctgtccagatagtcggggattttccgaaacgcttcggacgcgccctcgtagtcctcctgctccatccgtgcccggccatactggtacaggcagtcgttgcccttggccagcgcatcctgataatccacaatttccaaatagcgctccccggcagtcttcaaatcgccgtcagccagcgccttttccgccagccgatagaccgccgcctgacgctgttcctccgcatcctcccagccggaggacagcaggtacagtcggatggcttcttcatcgttgccctcgtccgcctgcttggcggccagccggtaatagcattcccgaaccttgtcgtccgcgtcctgatagccgctcagattcatatacagggccagcgccacgttctcgtttcctgcgttcagcagttcctccgcctgctcataggcgcactgctggcagcgttccgggctgtcctcgtagtcttccaagctctggaaggactccatggccttgtcgtacagcttgtccgccagatagctttcgcccagcagatatacggtcttcttccgttgatcctcgctgtcctgataaccgttcagaccggaaaacagcttttccgcttccgtcaggttgtccgcgccgcccaactcccgcaggctgagcgccttctgataatcacattcctgctgccgttccgccgcatcccgataatcgcccatggcggcaaaagccgtcttggcctcgtcgtactgcttggcggtcagcttctccaccgcggcgttatagcgcagggtgggcagcacccacagcacgccgaacagcacggcggccagcgccagcacgcccgcgacactccagcggatgacgcggtttttccggcggcgctgctgacggcgctgcttgctttcttcttccagcaaacggctgttttccttgcgggcctcagtcgccacgtccgccagtttcttctcatggacggcgatcacctgccgcacgttttcccggctgaagctggcgaagaccgcatcccggccccgttcgcagcggcagcaccgggctgaatccagcgaattggcccgtccgcagacgcagacccacgcctgctgctgcacctccgggtagcccatcgcgtcctgaccagccacgaaacgcagttcatccagcgcccggcccggctgcaggttgttgggctcatagttcaccagcggtgcgttgcccttgcgccagatggtcgcgtcgtcaaaccagactttttcgatggtgacttccgcttccttgacgttcttccactcgttgggcaccatcatcacactgaaccgctcgcccgggacgaccttcaggccctgcatccgctcggactggcggaacagcagccggttgtcctgatcgtagcagctcagcgtcagaagaaggctgaccaccaccttatgggacagattattcagcacaaacgtacattccgaaacgtcttccgccggcatggcggactgccacagctccaccggacacgtcagatcaatcttcatggttcaccctcccggtttttccattgtggatcaacctttattgtacaggaaaatacgaaaaaagtatagtcccggcgggcgcttccatttgtaaagcttccgcggcggcgtcaaaacgggccggacagctttcgccgtccggcccgccgggggtcagttcttttactgagcgaggaacgcggccagctggctgttggcttcgtccacgatcttctgcattccagcgccgtccagcttggacagcagctcgggcagcagagtgtccacatcgcccgcgccggtccacagagtcagcgcataggcttccttgatgttcatgcaggcagcgatttcgttctgcacaggagtggtatcaaaggtgaaaccgtagatgggcagcttcttggaaccgccgtagaactcggcgaacttctgctggaagtcagcgccctgacccttggtggggggcagcagggtcacgttgccgacgccgttgacccacacgctgtagctgttggtccgagtatcggtgaattcggcttcgcccgcgtcgttcaggttgtaatgcacgccttccacgccgtagcacagcagggtgatcacggtaggatcggagttgagcaggttcaggaacttcatggcttccacgggatgagcggagttggcggaaatagccatcatcgcgccctgcacggaggtgttgtcgatgtagggggcgtcgtagtccatcagataggccacctgcacgccgcgggcctcagaggtggtcacttcgtagccatagagggacacttcggtggagatcaggtagttcgcggtgttctgggcattgcgccacgcgtcggtcgcagtctcgccgatggcgatagcggggtcgatgtagccggcctggaagtagtcgcgcatctgcttggcgaatttctcaaactcaggggtggcgaacttgccgaccagctcggtgccgtaagcgccgggagcggacacgtcttccttgttgtagtagtagctcagcagcaggttggcgtcgccgggaacgatgctcacgccgtccacgatgcgctccgccacagcgccttcaaagatgaagggatagaaggtcttgccttcggcttcttccccggccttgaccttggcgaagatgtcgccccagccgtagaagccggcgttcttcacatcgtccagcgtgtagccgtacttttccagcagggtcacgttcacgtcccagcagttcatggtagcgaaatccttgaagccggggatggcgtagatgcccttttcgccgtcttcgccctcggtcttggcgccttccagcagcagggcgggcagagcggcttccacatccttgccgtactcgtccagcaggttgtcttccggatcgtccagacgaacgaacgcgcccttcttggcatagggagcatattcgttgctggtccaggagcaggtgaacatcacgtcgtactcgtcactgccggcgttgatggcattgctggccagatcgttgaaattggcccaggtgccccaaacgggcttcacggtcacaccgatcttctcggccagataggcgttcagctgttccagcacagccgcatcgtcggtcacgttgcagccttcaaacagaacggtgatttccacgggggattctgccagagcgggggtcagggccgccacgatcagcagcgccgccagtaccagagagagcagctttttcatgggttttcctccttaaaatgttggtttgattatttgtaagcggcttgcagcaccgcgcgccgcgttacatcggggttcttttcgccgaacggtcagcccttcaccgagccgatggtcagcccggccaccacgtaccgctggaagaagggataggcgcaggcgatgggcagcacgatgaataccaccaccgccatccgcatggtctggctgggcaggctcttgagggcttccgccccgctggccccgatcatggagctgttgcgcgccagaaattccgagttcttctgcatttccatcagcaggtactgcaggggatagagtttcttttccgtcacgtacagcatacacaggaaccattcgttccagtaccccagcgccgtcagcagcgccacggtggcaatgccgggcttcatgatgggcaggacgatgcggcagagggtggtgtactcccccgcgccgtcgatggtggaggcctcgatcagctcaaagggaacagtggtttgcagaaaggtgcgcatgatgataatattgaagggactgaccagcatgggcacgatcagggcggcgtagttgttgctcagccccagcaggttcttgcacacgatataggtggggatcaggccgccgccgaagatcatggtgaagaagctcaggaagctgaagaagctgcggaacttgtagtcccgccgaaacagcgggtaggcgtacaggatgcagatcgttacgctgagcaccgtacccacgatggtgatcaggaagctgttaaagtagcttctccacagaaggtcgcccaaccggagcacctgccggtacgcgtccagcgaccacgtcagcgggaagaaggaatagccctgggcggaaatactgctttccccggtgaaggaaatgatcaccacgaacacaaagggaatgatgcacaaaagagcgaacaggcccaaaatcaccgcgaagagaaattctgtgccccggctgatctcgttgagccgaagatgagaacgggactggttctttttcagggaaacggccgtcatggttccttcctcctttctcagaacaagctgctttcttcatccagcttgcggaccaccgcgttggccgtcatgatgcagatgaagcccaccagattctgcaggaagccggccgccgtggacatgcccacgttgcgggtggaggtgtaggcccggtatacgtaggtatccaccacctgcgtagccgggaacaggggcgcggagttcatgggcaccgaccagaacaggccgaagtccgcgttgaagatcttgcccacattcataatgagcagaatgacgatcatgggcttcaggtgaggcagcgtcacatgaatgacctgctgccacttggtcgcgccgtccaccgatgcggcctcgtactgcgtgcggtcaataccggtgatggcggacagatacagcaccgtggagtaacccgtgtttttccacatgctgcacagggtcagaatgtagggccaatatttgggctcattataccagtcgatggccgtccccgtggctgcctgctgggcccgaacgatcatgccgttggtggggtccagaaacgcgaacaggaagtacgccgctaccacccagctcagaaaataggggaagaacatcagggtctgataggtcttggccagaaacttccgggtcagttcgctcatcatgatggcgaaggtcacggccagcagcagacccatcacgatccacagcgcgttgtagcccagcgtattgcggatcatcacccagctttccgaggtaaacaggaagctgaagttcttcagccccacccatttgctgtgaaacagattgaccggaaagggaattttgcgggtcggcagcttgtaatccagaaaggacatgacaatgccgcccatgggcagatagcgcagcagcaggtaccagacggcccccggaagcaccatcgtggtcagcgcgagggttttcttgaactggccgccgttcagctttcggggcagggacggctgctttgcaggacacgacatggagcaggctcctttcttgatccacaggctttgatgacacgatccattcgatggcttgattatagattttccgcttctcgattggaatgcccggacttgtgcttttttgtccatttctgttcatttgttccaatcggtcgcaatttttccatgagaagcaggaaaacgcccttttcacccggtaattgtcatgacggatggaaaaacgggccgatcgttttcttttgattttatttttacgtcgggaggaatagaatgcgccgtctctgggacaagctgcgttccctgaaagtatcgctgatcttcatggttttgggctgttggctgctgccctccgtcgtgctgggcggattcgtcggttccgcgcttttctcgcttctccgggaaaaaacggaggaggcgctgctgaccggcgcgcagaatacgcagacgctgctcaaggccagcgtggattccatgctttctctggcccgggatgcgatctacgacggggaactgagcagcgccgtcaagcgttacgacggtggagaaattccctattcggactacggcaacagcgtccgcggctatctggaacgcaaatacagccgagaaccctggtgcctgtgcgccctgttctttcgccccggcacgcaggaagaactgcatttcacctcccagacccggcagaacgccgaatggttttccggccacgccattcaaagcgcggcgcaggccggggaaacgctggggaccggcagcgtcttctattcgcaggacggccgcatctatcttctgcgaaacctgtaccacaccaatctgcaaaaatatggaatgctggtgttggagatcgacatggacacagccatggctcccgctctggctgcggaacaggcggacgaggacgttcgctacgctatccggctggatgattatcgccacggcacgctgctgcccggcggtgagggcggcattgaggagtcagacggcatgctcctttacacccagcgtctggaaacagatgattaccggctggaactgcaggcgcaggccagccgccgccgggtctacgcccgcatggatttcttccgtctgttgacatgggcattgatcgccctgacggctccgctatgcgggctggtaatggcctatgtgcagcggcgcattgtgcgccccatcggccagctgtccgccgcctcccggcggatgcaggagggcgagctgggccagaccgtctccgtgcagggagccagcgagctttgccagttgggcaacgccttttccgaaatgagccgccagctgaaaaacctgatcgaccgctcctacaaggaacagatcgccctgcgggacgcgcgcattcaggccatgcagagccgtatcaatccgcactttctcaacaacgcgctggaaagcatcaactggcaggcccgcatggacggcgacgaaaccgtcgcccatatggtggagactttgagcgtcctgctcaacgcggccatcgcccgggacgaacgccacttaacgcccctgcaggaggaactgcaggtggtggacgcttatttctacttcgtggggcttcgtttcggcgaccgtattcacacggaggaagacatcgacccggaggcccggcaggcgctggtgccccggctgatgatccaggtattggtggaaaatgcggtggagcacggcgtcagcccggcgggtcggggacggatccagctgctggtgcgccggatggaggacgagctgctcatcagtgtcaccaacgacggcaagcggctgacacaggacgatctggaacgtatccgccgcctgttggagctggacgagcccaatcatgggcacatcggcattcggaacatctaccagcggcttcaacttctgttccctggcaaggcggccctgagcatcggcctgtccgaaaccggcgataccgtcgccgccatccgaatgccctataccgaaaacctgcccaacgaaagcgcggccctgccgccgaaaggagaggatcgcccatgaagcgccgactgccgttgctcttttctctggttctcgcgctgcttctgcccctgaccagtctggcggaggggctgaccctgcgcactgtcagcattttcgccggggcggatgcggcggcggacacctacacccggcttctcaaggagtgggaggagaagaccggcaaccgggtctccgacacgtccaccccttccaacgaggaatggaaaaccggcgttctgctggactttgccgccggaaacgagtccgacgtgctgttctacttcgtcggcacagcggacagcgcgccgattttaagccgggtcgtttccgtggcggagatcaacgccgcctacccggaactgcagctgcccgaaagcgaactgtgccgggaggccgatggctccgtctatgccatccccgtccgggagtactgggagggtctgttctgcaacaaggatctgttcgaccgttacgagctggagctgcccaccacctgggaaaagctggaaaccgccgccagggtcttccgagaaaacggcattgtgcccatagcagtctccctcagcgatcagcctcattatgtggcggagttttgccttttgtgctgtggcggagaggaggatcatcgccagcggccggcatcttccgaggaagcgcccgccagctggacggagggcatggcgctgctgcagcagatggagcgggagggcttcttcccggaggacacggaggtcatcaccgcttccgaagccagccagctgttccttcaggaaaaagccgccatgcagatcgacggcagctggtttgccaacagtctgccggcggatcgcatggattccacggtggttttgccctttccttcccggcagggggaaggcagtgccatcatccggggcgtttccatgggcttttacctgacccgcaaggcatggaacagccctcgcaaggacgcagcggtgcatctgctcagttatctggctaccggcgataatgcccgggcgctgggcggctacggcttcaccggcgcgcttcgggaaagtgcggacgccatgctggccagccatcccgaacggctcagcccggtgcaggacgctatgagcccggaggcacgcaccctctggttccggctcatcccttcgctggctgacggccgcatcacgcctgaggagctatggcggcaggtctttgccctgcatccctttcagcggcaggaataggaggacgatttcatcatgtatcgcgttgttttggtcgatgacgagcaaattattttacagggcctgcagcgggctttcccatgggcggaatacgactgcgaggtggccggggtcgccatggacggacaggaggggctgaagctgatccgcgaggtcaagcccgacttactgctgacagacatctgtatgcccaacatggacggactgaccatgatcgccgcgctgaaaagcgcctttccggccatgcaggtggcagtgctcaccgcctaccgggacttcgactatgcccagaaggccctgaatctgggcgtatgccgctatctgctcaagcccagcaacatggagcagctccgggaggccatttccaccatgaaggcccgtctggacgaggctccccctgcgccttccgctttggagccagaggccgaacacgccgaaagctccggcgaagcgggcgctttcatcgcccgggcggccatggactacatccgccagcactacactgagcatctgaccctgagcgacgtagccgaccacgtctacgtcagtcaatggcacctgtccaagctcatcaaccgtcacctgcagcagagctttctggacatcatcaacaccctgcgggtggagcgcgccaaggagctgttggccgaccccgcctgtcgcgtccatgacattgccgcgctggtcggctacagcgacgtggcccatttcagccgcatcttcaaaaagcacaccggccaatcccccctcgactaccgggcaggggtagtacccctgcaccccggactgcgtgccgaaggcacgcagggtgctcgggagacatgaaacttggccggggttttaccgccgtggcacgacaggtgccacggctcgccggtctggt

SEQ ID NO: 1047 - DNA, 4670 bp, Unknown
  16S sequences of unknown bacteria
aaaattttatggtagaaacaaagcttagaattgacggaatggcctgcggaatgtgcgagagccacataaacgatgccataagaaacaatttcgacgtgaaaaaggtgaaatcctctcataaaaagggtttgacaattgtaaaatccgaacagcctcttgatatggaaaaggtcaaaaaggtcattgccgatacgggatatacctttttgggcgaagaataagaaacagcccggcaatcaaaccgattgccgggctgtctgttgtttgtgcttacggataaattttgatttcgcttgtttccacccaaggaataaagttgtccttgccgcagaaattgtcgataaactcaaaacgaaggaatttagcctcggcgggagcgtcgagctcgatgtcctgccatccgaattccttttcaaggtcgacggatttgacaagcttccagtcaaccgaattgatgtcgtcatccttgcggcggagctttaagggctcgtcggtggccgaaacataaatgttcaggtgctttgcaagctcctcgggaacgcttatgtccacgccgacatttttgtagagcctgattttgctcaccgtttgaagctcgccgaagaaacttaacacaacgtcgtttttaggctcgtcaagaccctcgacgcaggcgccgtatgttccgccgttgcgctcgtgatcgtcgctgatgacgttgcagacccaaaatgtcgggtcggattcggtgaccgccgcccactcgattcgggtgtagtaggagccgtcacggcgcctgggcatcggcagcataatgttttccataaaaatgacctccttaaaaggtatatctcatttgaagtataccactttaaggaggatttgtcaatgtcatccaaaaaacattttaaaacaaacgcctaattgtaaaatatatcgaaataatgcagacttaaaggcttcccgcgatgttttcgaatttggttttggccgtgttgattttttgctgttcggctgccggagtcatataccaaccgcgggaatgcatctcttcgaaaatgtcaaactgaatatcatgttcctcccgcagaagggtcatggcgtcctcgcggagctgtttccccgcgcactcgttggcaaaggtgttataattttcggttacctgcttctgacttgaaagaacgtcggacagcatttctttttcgggcataaagggtttgtcgttcatggtttttcctcctttagttaagataggtcataagacggtcgaaatgttccttgtgctttgccgcgatttgttcgcatttgccgcgtaaagcagggtcggtgctgttttcggcgacggcgcgaaactttttgacaagcagcgattcggaattaagctggtcctcgagaaaggacagctctttttcggttaaattagccattttcattacctcttttcaaaagttctgattttatttttgcccaaagcgccgccgatattcactcttgataaagcttcaatttaatagtataattaaatataatttaggttgaaaggtattttatgttagaatttaaaaaaatcgaaatgaccgaccgagagcttctcgaaggctattttaaaaaattcggatttcccgtttccgataattgtttcggcgggctatatatttggcagaccgcatttgaaagcgaatttgccatttttgaaaacacggtaattctccgcggaagcgacggcggcaggcatttttatcaatgccccatcggcgaaaacgcggcggcagccgtcagacggcttgttgaggaggaaggtgaaaagctttgcttttgcggtctttgtcccgatgagaaaaagtttttcgagcaaaacttcggcgacgagttttcgtttgtaaacaaccgcgataacagcgaatatgtctatgagagagagccgctttgcacctttgcgggcaagaaatatcagcaaaagcgcaatcatgtcaataaattcacccgtctctacggcgagcccgaggcggtggtgctttgcgccgacaatctgtcgctcgtttcgggaaccgagcatctttggctttcggagcacgacagtaccgacataagaataattcatgaaaattccgccttgaaaaaggcgctcgacagctttgaaaagctggggcttttgggtgtggccgtcagggtgggcgaaaaaaccgtcggtttcggtatcggcgaacgcctttccgacgacacggttatcgagcattttgaaaaggccgacagagacatggacggctgctatgccgtcgttataagagaatttgcaaaaattctgccccaaagcataaaatatataaatcgtgaagaggacatgggccttgaagggctgagaaaatcaaagctgagcctcaagcccgcctttatggaggaaaaatatgacggaatatatgtcggacagggaacagataatatccctttggattgagggcttcggcgacaaaagagccgatgttgagctttttctcgacacggtttttgatgagaaaaattatttttgcataaaggaaaacggcaaaattctttcccagacctttcttgtgccggtaaagctttcttcaaaaggaaaggactttgagggatattatttttgctgcgccgccacgagaaaggacgagaggggaaagggacacatgggccgccttctcgaagaggtcaaaaagacggcggcggagaggggagcggatttcgttgcgctcatccctgcaagcggttcgctttttaatttttattcccgtttcgggtttgaagaattcttttattgcgccgatgaaaaaatatcggcaaaagcccttgaaaatgcggagttttgtgaaatttatgacagcgacaggctttttgagctgcaaaatctttgcttaaaatcccgtcccggagtgatagtcaaaagccgcgacatctacggctatctcataaaggatgcggcgctgtccggctataaaatctattcggcaaagctttgcggcagggaaatgggctatattttctatgaccccgaaaatgcccttgtgagagaggcgcttttgtcggaaaaatgcacggaaattctttcggcatttgcaaaagcggcgggaaaagacgaaatttgcgcaagactttttgcgtctgccgaaaggtatggaaacaaaaaaggcatgatatttgcccaaaacccccaggtcaaggcgcttaaaaatgattttccctttataaataatcttcttgaaagctgaaaaaccctacggcagaacagttgtcttgccgtagggtttaaattttaaaagctatttcatcatctggagacggtgctttttggcggcgataagacggtctacaaatatgtctgcaacggtctttgagccgatgggatttggtttcgacgacatcatgccgtggaaatcgcttccacccgtcatgcaaagatcatatttctttgcaatatcgataagcttttcggtctgttcctcgttggcgctgctgtgccacacctcgataccgtcaaggccgagacccgcaagctcgggaataaggtcgaccgaatcgtaaagccacggatgagccataacggcaagtccgcccgcctcatgaacctgaaccataacgtcgcgcacgtcgggataatctttgtcgataacggcgacgccgtcgggtccgaaaagcttgtcgtaaagctctccgtagattgtggtggtgtagccggcctccataagagccatcataatgtgctgcttataaatgttggtgcttccctgaatccagcgcttgataattcccaccggcaggggatagcgtttcatgacctcggtggccattttctgaccggcaacctttctgcggttgctgatgtccctgcaaagcccctgaaggcggtcgggatattcgggaaggtagcaaagaaggtgaacccttcttcccgtttcgggatttttgcaggaaaattccacaccgggaattacgtttattcctgctctttgtccgagcatttttgctctcatggcccctgcaagggtgtcgtggtctgtaactgcaatggttttaagtcctgcacctttcgcaagtgcaaccaattcttcaagactcactgaaccgtcggaaagcttagtgtggcagtgcaagtctccgggcattcatatcactccgtatcttctcattttacataacatttctactactatataataccataaaatgcgatttttttcaatggcaaaaagcaaaatgcaccgactttttttgcgtaaaaaaagccgaaaaacaacggttttcctcccgtgtgacggaagatttcaccgatttatataaaaaaaagacgagtttaacaaatgtccttatgaacactttttattgttcaaaagttgacataaggatttattgtaaaatgtatatacaaaaagtattcaacaatttcaacagacttttcaacatggtataaattaagcgtatatgcggatttcggaagaaaattacaaaaaatgggacgggcttcaaccgaaaatacggttgtgatttatataatgaattgagtttacataaaaccaatgcgtggtatacataaaatcaatgtaaaatacccattgtatagttaaaagaagtaaaaaatatcgttttgcaaaacaatttgtataattttacgtttttgcaaaaaacatcgggcataatgcctttatcaaaaaaagcactatgcc

SEQ ID NO: 1048 - DNA, 32759 bp, Unknown
  16S sequences of unknown bacteria
atttttttcgcttgcgctgcgagttttcttctcgcttctgttaaattaacagggttctatcattgtttaattttcaaggttcattcgcaccccgtttttcgagggcttaaacagtataccacgtcaaatcggttttgtcaatacgtttttttgagtgttttcttttttgtcacttttatattatatgcagcatcaaaaacgtttattcctcaggcaaaatcaaccgagcaaaagctgcggacaagtatgaccgaaacagacattcggcgcttccctaccaattttgatatatatgcatatgcgtgaaacggaataatgcaaaaaatcgcttcacaaaaaagttacccgaataatttgccgaaacgggttgacaatcgtcggaaaatgtggtacaatatcggcataagtaaatctttaattcgggacagagagaccgacaagaatgctttaaccatctgcggatgggcaattttcatacgagaaaactgcgcgctgtcggcttccgacggcgcttttttttattttcaggaaagggagaccggcttatgaagctaaaagcacttatcatggacgaaaatgccgtgagaagatccctgacgaggatttcgcacgaaatcgaagaaaaaaacgaaggcaacgaggtttttctgataggagttcgcagaagaggcgttcctcttgcgaaaaagatagcggaaaacatcggcaaaatttacggaaaagcacccgaaacgggcgaacttgacatcgttctttaccgagacgacctttcaaagcaaagcgatatgccgaaagtaacaaatacgaatattccttttgacgtaaacggaaaaacgatagttattgtggacgatgttctttacacgggacgaaccgcaagagcagcgatagacgccgtgttctcgctcggacgtcccgcctgcattcagcttgcggtgctgatagaccgcggacacagagagctgccgatacgcgccgattatgtaggcaagaacattccgacatcgcaaaaagaggtcatatcggtaaatgttcccgaatacgacggcagttgctccgtcgaactttatgagaagtaaaaaataatatacaacacaattttcagggaggatttctttatggatcttatctacaaagtcaaagacagaccgggtctcggcaaaacaatcgtctttgcattccagcaggtgcttgcgatccttgcggcaacaatagcggttccgtcaatcgtaggcaacggcatgagccaagcggcggcacttttcggtgcaggtatcggaacgatagtttacctgctcttcaccaaattccgcagccccgttttcctcggttcgtctttcgctttcataggttctatgtttgcggcatttgcaggtgcggtttccgcaaaaatgggctttatgggtctcataatcggcgcggcgtttgcaggtattgtatatgtagttatcgcaatcatcgttaaattcacaggcgttaaatggataaacaaacttatgcctgccgcagttatcggtcccaccgtttccatcatcggtctttcactcgcaggcaatgcggtttccgacctttggaaaggtaaagtcgttgatgcggacggcaactctctcgcaaatccctatattgcgcttctctgcggacttatcacacttctcgttgttatcctttgctccgtatacggcaagaaaatggcaaaactcattccgttcatcatcggtatccttgcgggatatgcggcagctgcaatattcacagttatcggaatcaagaccaataacgtagcactccaacttattgatttcaatgcatttaccgcggtatttgatatttcaaaattcgcattcggtcttcttgaactcccaaaattcactttcatcgatgcacttatcggcggcggatttaaagaaatcaatgcaggatacatagcaaccgttgctttcgcatacgttcccgtcgcatttgtagtatttgcggaacacattgcagaccacaagaacctttcatccatcatcggacaggatcttacggaagacccgggtcttcacagaacgcttctcggcgacggtgtaggctctatcgcaggcgcactcttcggaggttgcccgaacacgacttacggcgaatccgtaggctgcgttgcaatcaccggtaacgcttctgttgtaactatttttgcaaccgctatcatgtgcatggcgatttcgttctttactccgttcgtagtatttcttgcaagcattccgaactgcgtaatgggcggtgtttgcatgacgctttacggctttatcgcggtaagcggtctgaaaatgattcaggatgttgacttgaatgacaacgccaacctcttcaccgttgcggtaattcttatctccggtatcggcggacttacggtaagtttcagcattggcggaggtcacatggttaccctcacggaagttgcctgcgcgcttatcctcggtatgatagtgaacgcaatagtaagaccgagcctgaaaaagaaatccaagtaatttaattacacctaacccctcacaatataacattacttcccgatgttttacgtcgggaagtttttttgtcaggcggtgtatacgcaacaaagcaacaacgcaaaaaaataacaaaaaaacgacaacggcgcaaagtgaaaaaaaacccttgaaaaaaaacggcgtccgtgatacaataacggtataataactatcaggaagtaaccgacaatgaaaaattatacttttaagaaagttgacgagaagccgacgctcgactctcccgtttggaacgacgttgaaaaagcgacgctcgacaacgacaatctctgcggagaaaatgcggaaaagataaccgttaccgctcagggcgtctgcacaaagtacggcataaccgtaaaatttgaaagcgacgaaaaaaatcccgtaataaagtattcgcacgcaaatcagccggcatggacggacagctgcgtggagtttttccttgcaccgtatcccgatgaaaagggaaattatctgaactttgaacaaagtctgggcggcgcgctgctgcttcaaaagggaccgaacgcagcggacagagtttacattccgcacagcgacgaatattttgaaacggaaaagcaaatcgacgaaaacggctggaaaatcaagttttttattccgttctctttcatcgacaagcattttgcgacgatgaacaagaaattcagaggaaattttcagttctgctgcgaggacaaggacgtatatctgacgtggaacagaatagaaaacccgttccccgcgttccataagcccgagtatttcggagaaatgacgcttgatatgtccgttcttgacagaatgaccgcagagtgcatcaaatacggatacaatgtttttgaaatgtgcgaaatgaccgaaagcggcgttgacgacagaacgtttttgccgagcgagccgacgcatttttcgtattccataacaaagtgcgtgacctcgataattttcggaatgcttcgtgataaagggcttgtaaaagagaccgataaggttgcggactatctttcggaattttttcccgaagacgttgacccgaaatggtacgacgtaaccatcgaaaatatgctccaacacagaaacggcggctcgggcggcgggcagtggaacaaacatatcgacgcaaacgagccgaacgacaaagattttcttttctatatattctccgacaaacttcagtatgagataggcgacaagatagtttactgcgaaagcaactactatgtgatttcgagaataattgagaaaatcgtcggaatgccggttgacgaatgggcacttaaaaatctgttcaacccgcttcactttgaatatgtctcttggggaagatgcccgcagggacatactttctgcggcagcggtctttctttgcgaacacaagacatggcaaagttcggaatgatatatgcgaacaacggcatatatgagggcaaacgttacctttcggaagagtggataaaacttgcgacaaatgttttcaaagtcgacgacttcggcggctacggctacgccgtgcagaaaactgcgtacatgaaagaaaacgagttttatcttgtcggcgcgggagaccagacggtggttttcaggataggaaaaccgcaggtcatcgctttccatgcggcgggagcgggcggacacctcggactgctcaaaaccgttgttgacattatgagagaagactgaagaatatgaagcgtatgcaaatataaatccgcatacgctttatatttttatatattgcagtattttcaatccgtcagacaataggcttgccgtggtcggtctgttccacttttctcagaatcacatcgtaactgccgccgtttttgagcgaaaccgtcacgcggtcgccctctttgtgtcccattatcgcttttccgacgggagattcaacacttatcatatcgttatctatgtctatattgacggttgaaacaagcagcacagtctgttcttcgtcgtcatcttcaaaataaagggtaacacggctgaaaatccccacgccgtcgccgacggtgtaatcctcgataacctcggcggtatcaatcattttagtaagataacgtatgcggcgttcgttcttgttttgctcctgttttgcgcatttatattccgcattttcggaaaggtcgccgtattcgcgggttctttttacttctttaagcagttcgccgcgaagttcgcaaacgcggtaatgcagttcttctttcatttcctttatatcggattcggtcaatttgttgtgcatataaatatctccttttacaagaattatagcaccgaccgcagcaaaagtcaagaatgaaaaattcacggaatgtatttttatcggtcaacaaaattctataaacgggtggtaaaattattccatactgaaaattacggagaatgcttatgttatcacttaaaaacataatcaaggattacccggtaggcgacggcgttgttcacgcgctcaaaggcgttgacgtcgaattcagaaaaaatgaatttgttgccatactcgggcaatctggctgcggcaaaacgaccctgctcaatataatcggcggacttgaccgctacacttcgggcgaccttataatcaacggtcgctcaaccaaggagttcaaagacagggattgggacgcatacagaaaccattctatcggatttgtgttccaaaactacaaccttatcccccatcagacggttctttccaatgtcgaacttgcattgacgctttcgggcgttccgaaatccgagagaagaaaaagagccgtcgaagcgcttgaaaaagtcggactcggcgaccagttaaagaagaagccgaatcagatgtcgggcggacagatgcagagagttgccattgcccgcgcgattgtcaacgaccccgacatactgcttgcagatgaacccacaggcgcactggattcttccacgagcgttcagataatggagattcttaaagaaatctcaaaagacaaacttattataatggtcacgcacaaccccgaacttgcggagcagtatgcgacaagaaccataaagttgttggacggaaagataatatctgattctgacccgtacacaaacgaaaccaaaacggagcctatcggcaaaaaagagcaaaagaaagtcaaaaagccgtccatgtcgttcttcacggcgttggctctttcgagaaacaaccttatcacgaaaaaagggcgcacgcttctgacggcattcgcgggcagtataggaattatcggaattgcacttatactttcggtctcgacgggcgtcaacaactatataaaacaggtgcaggaagacaccttgacctcttaccccataaccattgaagccgaatcggtcgatatgagttccatgctttcggcgatgactgacagagaagaggacaaagaccacgacaacgacaaagtatatgcaaactccgcaatgtatgagatgatgaatcgtctcaacaatccgaacaagtctgtaaacgacatgaagagttttcgggaatttatcgaaagcggaacaagcggcatggacgaatttctttcgggcatacgctacggttacgacgtagacctcggtatttacacaaaggacgcgaacggctcgataaacaaatccgatattcaggcgcttatggagaccatgtacggcgacgttgcgggttcggagatgatgtcaacatattacgactctctcgaaatatggtcgcagcttcttcccggagacgacggacagaccgtcagcgacgttgtaaaaagtcaatacgatgtggttgcgggaaaatggcccgaaaactatgacgaagtcgttctcgttttaagcaagaacaatgagataaacgacttcacaacgtacgcattgagccttaaaacgcttgacactttcaaagatgagtttgataaatatatgaacggcggaacggttgacatcaaaactctttcttggagttatgaggatataatgtcaatcagtccgagagttattctgccgtcgtacagtttttcttacgatgaagaaagcaagacgtatacagacctgagagaaagcgaacagggacttgaatatctctattcgagcaaatcgacggcattgaagatagtcggtataatcaaaccgagcgaaagcgcgacatcaacaatgattcgcggcgggcttgcatacacgtcaaaactgacagactatattatagaaaaggcgaacaattcggatatagtaaaaaagcaactcgaaaacgatgatacggacattttgacgaatctgccgttcccgtccgacacggagattccgtccgacgaaaaaatcgcttccgtcaaggagtatttgaacggtctgaacgacaccgaaaaagcgcttgtctacgtcagcataaaatccgttcccgcagatgcggacacgcaggcattcatagacgctcaaatgcagggactcgaaagagcggatatggaaaagacgcttacgcaggcattgaagcagcaaatgcaacttgatgaaaaaacgcttgcgtcgtatatcgccgaaatgagtgacgaagaaataacggagaacatgaaaaacatactttccgcacaatatgcggcgcagtatgcggcacaggtaacggcacaactttcgcaatacacgaccgaacaactttgcgcaatgttcaactcttccgaattttcggacgccgactacctgatgatgtatgagcatatcctgcccgcgaccatatcttcttcaacttacaagaaaaacctcgaaaaactcggctatgtcgatcccgaagaccccgataccatagacctttacgtctcgacttttgaaaacaaggacaaaattgccgacataatcgcaaaatataacgagggcaaggacgaaaaagatcagataacatacacggactatgttgcgcttctgatgtcaagcgtgaccaccattatcagcgcaatatcttatgtccttatggcgtttgttgcaatctcgctcatcgtttcgtctattatgataggaataatcacatatatctcggttatcgaaagaacgaaagagataggcatactgcgttctatcggcgcatcaaagagagatatttcgagagtattcaacgcggaaacgtttatggttggtcttgcggcaggcgttctcggaatagcgataacacttctgctttgcatacccgttaacgcaacaattcatcatctgacggagatttccgaactctccgccgcattgccgcccatcgcaggagtaattcttgtggctataagcgtactgctgacaatgatagcgggacttcttcccgcaagaatagcggcgaaaaaagaccccgtcgaggcattgagaacagagtaaagcaaaatttcccgattacggaaaacttttctcggatacgctgttttgtccgttagggacttgcatttgtgaaaaaagtgtgatataatatttttgataagtcatcaaaatatatatcgcacttttttcgtttttgagaaccgaaagaaaaaacgtccggaaaaagttttttccgaacgagataggacaaaaaatgcttcacgaaaaatcctgcggcgcggttttgtttacaacagaaaagggaattaaaaagtttctgcttgtcgagtcaaattacttcggctttccgaaaggtcatgtcgaggaaaatgaaacagagcaggaaaccgctttgcgcgaaattaaagaagaaacgggggttgacgcaacaataatcccgggtttcagggaaacggtcaattacaaattgccaaacggaaatgtcaaggaggttgttttctttattgcggagtacgcgccgcagcagtacacggtcaacagaaccgagctgcggggaatcaccttgctgacctatgataaagcgatcaagcggataacgtatcccgacacacgcaacgtgctcaaagatgcaaacgagtggctcaaacatcacggatattagacaaaaataaaaataatcgcggcaatatttttactgaacgccgcgattattttttattatgccgctgtttatttcaggcaatctttcagttcgccgaatgtgatgggagagacgatgccttttttgcctatcaggcttactgcgcagaagccgagcataccgtaaaaatgaagctcgttgccgttttcaagagaaacgcagaatttacatatccccctttcaccgttttcagctcgaaaatcaactatctttttaccgacacagcggcagaaaaatttatcagggataaagtttacggctttttccgcggcgaaacttccaaactgaatatcgattctctcttcctcggggaaaaataccgaaaggctttcgccgccgtcaagatcaagaataaaggcatcttccacagcggtatgacggacaagcgaaaagtcatcgggaatattgtcaaagcgcgaccaataatcgcgatccgcctctccgagacgttcaagtcggttatacacggcggcttcgatatattcgcgccgaagaaaaaccgcgtcgccgagacagcgcagcccctcaacggttcttccgatatatttttttgttatctcttcgcatttttgcgggctgtcaaaaatcataaaaaacctccgttgcgaacaaagcgcaggacttgcaatacgaaaaattttgtgttatactgttatcaaataaactacgggacgatacaatgattaaaagaactgttgcactatgcttgttttttctcgccttttgcctcattacaggctgtggaagaaattccgagccgatagacaaaaacgattcggcggcaatagacgaatatttcagatttgaaaacgcaccgaaagacattatcccttttttaaaaggaacaaaacagttgacggaagatgacgttattcgtatttccgaaaatgaaaatccgagccttgaagacttcaaagactttaagtgcgtcttttcgggaaatgagaatgcctatgtggtggaattcaaggtcaacgaccgtatcagcctgcaatatgtttacaatgcggaagaagatgacatctcttttttgcttgtctgtgcggaagattcgaccgcgatagacatcagaacgggagacgtcagaaaatatataaacgacagaaaggtataatactcatgagacaggtcaaagcaattcccataacacatgaaaattttgcgccgttcgggcagttctacaccatggcagacccgaaaggctatgctttatgcggagagatccacaaatttttccccgacagattgacggcttcggcaaatcacaatgtaggatattctccgatactcgtcaaaaagcctgaaagaatgataatttccgcggttgaataccataccacgacttgggaaatgataatgccgctgaacgatgatatggttcttcatgttgcccccgcatcggcaggaacacccgttcccgacttggcgcaggcgtttatcgttccgaagaatactcttgtcaagataaatgccgcgatatggcatcttgcgcctcttccgaaaagcgcggacgaactttgcgcgatgataatactgccggaatgtacttacgcaaatgactgcaccgttgttccgctcaaagaggaagagcaattcgagataattctctgaattaaataatttaaaaagacggataacggaatatctttcccttttccaaacggggctgtaaaaaacttacgttttttacagccccgtatttttcagtctgatgtcaaacactccgtatcaacgggcatttcttaaaaccataacggtaaaattgccgtccaaataaccaatgcccacattataactcttatcggaattatccgcaaaatacatgatggcgtcatctgacgacatatcggaagcggaaacggtgaaacccgctttttttaccgcttcaaggtaatctgccgcgtcgtcatacgttgcatccgaaaaggatatggttaaaagtcttctcgatgcggagatgaccttgtttttctgtttgccgaatttcggttcgggaataacctgagtgaaaccgtcttcaccccaagcctccgtcacagcggaggactgctgctgtgcggacgtggtttgcgaagtactgtttggggatgaatccgaaccgttgtttttctctgtatggggaacggtcactatctccgtttctatctcccccgcagcatttgttctggtgacaacaactgtctcatatgactgagaggaagagttatcttccccccctccgcaagcgcaaattccgagcgcaagaacgaatgcaagcggtatcagtaaaaattttttcatttcgaattctccttctctgctgttgacggtgcggaaatgttcaatctgaaaatattgtcggaaaaaatcacgttgacggtatagccgtcggagttttcatagattctgtttacggcacctttcgcctgattgttgctttcgacttcttcttcataatcaagaacaaagcctttttccgttatttttgcgcaatacgcttctgcctgcgcggaagaaacatcggaatactcacttatgaaaccgagagcctccgaaaaagaggactttgttttggtgccgaagtcaggttccggtatcttatcggaaagagattcatatccccaaggaattgaatacgtttctttgccttcaagttcgttgaatgtatagaaaaagccgttatcaaaaccgacggaatagtatccttcattgtattccttaaaataagcaactatctttgctttatctgcctgtgtcatggcatcgtagcctgcaaacccgtaattctctccgaaaatctctgtaatgaaatttctttcaaaatcgctgagatcgtcaagtgttttcggcacataagagaccgcgagcgtttcaccctgtttgaaaccgggagcggcatagtcggaaccgtcgttataatattgataatgacaggcaccgagcacaaaagcaaagcaaataacaatgaacaaagcaaacacttttttcatcgttttcgccccccttgttgccgacgcctgtcatataaataaaaatcagttggttatcagcctatgatttcaaaagctttcgccgaatcatattcggttctgtccttaaagccctctacgcatttctccgtccaattattggtatctgtgcttctgaggttggattcagcagattttttccagaaaatttcacccgaagagaggtaatatacgatataatacttcttcgaaccctcgaacatcttatattcgccttttactctgtcaccggcaaatacccattctgcgagttcggaggagtagccttttgctgtcgtttttgcaaagtcctcataaagtccgcctttggaagaagtggaagaatccgcagagtttttggaagcaagttccttgaagttatcttccgtcggggtcttgtcaagtgccgcaagaaccgattcagccttttctttaagagctttgagttcttcgtccgtcgcgcccttatctttatccgcaacggtcgggtcaagacggattatacgaatgtttgcaagtttatattcgtctctttcagagccgatatagtaaagagcgatatatttatcggtgcccttcacaacggtagtatctcccgcttttctctcggaatccgtcagccatttctgaccgtcggagccgacaagagaacttgcctcggaagaagtctttctttcggacttagcaactttttcgttgccctttgtaaatacttcttcgctttccttgtttgcttcaacgtaagcctccgcgtcagccttggctttcttttcagcctcggaagcctcggtcgtcttggagtcggaagaactgttgtcatcagtcttcggcgtttcataagcaaaatcaagagcaaggaaagtataaacgtcgtaagtggatttgttttcgctgtaatatttttcaagcgcggcatcatcgtaattcaagccgtctttgtaattcgtctgatatgcatttgcgacataggaatattcaagcatatggcgcatagtggattcgttaaagcccttgccgtaagaagacgaataaagggttttcagatccactttatagttgcccgcggttgcggtatcggtgtcaattttgttgtcaatgttcttgtttatagtatcataatctatcgtataattttcatccgcttttgcaagttgataaagagcgagttcggttttaaggctctccgcggcggcatttacaaacgcctgcttccatgtatcgccctccgaaacggttataccgagaaggctcgcggcgcttgcgttcgcctgtccgttttcccagccgtcggtcttggtgtcaacaccgaaatacgaaagatatgttgaagcattgttgtacatcgtgacataagcgtaattgaattcaagcgcatttatgctctcgtcgcccaccgtcaaaacagtctttctttttaaattgaaaccggtattgtcaagaaccgtcaaagtaattccgacagcgagaagaagcccgataactatgcagaaaacagtaaatattgggaaatcttttttctgcttgttctttgcgtttgccatagataatcatccatcctaactttttttgtcgtatccgagaaaagaaaccgcatacggttttttacacggaacgatttgcgttatacgcaacttttcatttcatatattatactatttttttttcagattgtcaagttatcaggctttttttgtacacgttcacaagtctttttatacattttcgccactttgacgatgaaagcctgtccttttcggtcaaaattcaagtcatatgattttaaagggacagtaaaaacgtatgtttttaactgcccctttataaaaaaatccgcacaaccgtccggtcgatccgtaaaaaacggacagtgacacggccgaacaaacctgtcagaaggcaggtggggtaaaatcgctcttatgttttgtgcttccaacgtcccgaccaaagtcggggaggcctgcatacccgcataagaagtcgaaatcccttaatcaaggtgtaggttttatacaaaaaccgtgtcggaacgcattgcgcagaaatttttgtcaaattttatcagcgttcttttcgaaatcagtcctcggagggaatgtcaaaatcgaaaagacccgcattgtccgctttcgcttcgaaaagtttgataacggtattgaattcgtcctcatcgtcaaccgtaaccagagcttcttcgtcttcgccctcgtttacgactttcagaacgatatattcgctttcttcgttatccatctgatccttttcaacaagagcaagatagagcgtaccctcggactcaacgccgtcgataacgacaaaatcggtggtgttgccgtcttcgtcggtcagagtaagtatgccgtcgttttcgcaaccgcaatcgcagtcatgctcatgttcgtgttcatgctcgtgttcgcagtcgcaaccgcagccgcactcgtgcttatcttccatgttattgttctccgttcgtttattttgtaattatattgtacaccaattatgcctgcttgtcaagatatttgaatccgaaaaaaatttttccgatttgtcgaacacgttgcaaaaatacagcgaatatggtatactatgccgagaaagggatataaaagatggaatacgattatattatatgggattttaacggaacattgctcaacgatgtcggaatatgcgtggactgcctgaacacgctgctcaaaagtcatggcatgagcgaaaaaacggaagaagaatacaaaaaaatatttacgtttccgataaaagaatattaccgccgagcgggctttgattttgatgttacggattacgacacgctggcgcacgaatggacggattattatcgttcgagggctgaccttgaactgtttgacggagcggaacaaacgctgaaaacgcttgcaaacagaggtcttaaacagataataatttccgcatccgaaaaaaacacgctttttgaacagacaaaagcactcggcattgacggttatttttccgagatgctcgggcttgacaacattcatgcgcgctcaaaagaggcaacagcaaaagattggagaaaaagacacccgaaagcaaaagcgatatttataggagacacaacacacgacaaagacgtggcggacgcgataggcgcggactgtcttcttatcccgaacggacaccaggcaagagaaattcttaaaaaaacgggagcgacggtctgcgaagacataaaagatattcccgcatttgttcttaattgataaagggcttgactttaacgctataaagtgttataatatgaaagcagaccgttaaaaggagaaattgacaatggctttcaaattcactgaagaatcggacagattctttgatgctatactctctctcaaaaacagagaagagtgcaaaaagttttttgaagatatatgcacgataaaagaaatacaggatttgcagcaacggattacggttgcaaaaatgcttgacgaggggcgcgtttacagcgagataaccgaaaagaccggtgcgagcgccgcaacgataagccgcgttaacaaatgcctgacatacggcagcgacgggtacaagaccgtgctcgaacgtctcaaagaaagcgaaaagaaatgatactttcggacattcacgttcatacgactttctgcgacggcaaaaacagcgcggaagaaatgatttccgaagcgataagcaaagattttgtttccctcggattttcgggacattcctatacatcttttgacgacggttggtgtatgtcggaagaggataccgaaaaatatatcgaaacgatactttcgctacgcaaaaaatattcggggacgatagatattctgctcggcacggagcgggacttttttgcggacgaagacaggcatacatacaactatattataggttcttcgcattatgtcaaagtcgggaacgaatatctgacggtggataaaagtgccgaggaacaaacaaaaataatcaacggttatttcggcagggacaccttcgctttcataaaagcatattatgcgcaggaagccgaaataatcaagaaaacaaactgcgacgttatcggacattttgaccttgtgacaaaattcaacgagggagggaaaatgttcgatgaaaactcggacgcatacaaaaaaatcgtttaccaaacacttgaagaacttgttatttcaaaacctatttttgaagtgaatacgggtgcaatgacaagaggatacagaacccgtccctaccccgccgattttattcttgactatgtttcggttcacgattgcggacttgtgcttacctccgattgtcacaaaaaagcgttgctcggaggctttttcgacgaaacggaaaagcgactgcgcgagaggggcttgaacaacatttttgtgctgacctcaaaaggttttattcccgtaaagtaaaacaaatttcgagtaaaagatatcggggctgtaaagaaacgcgagtttcttacagccccgaatgttaatataatcggtttcggcaatacaaaattttttccctgccgacgaaaaagtacctcaaaaaagagaaacgtccgttcctgaacggcgaacggactttctatataaaaaattttacaggaaaattgaatcaggcattgataagggcaagaacgtggtccccgcaggtcagcataagaacactgataagggcaagcactattccgaccgtttttacgggcgtcagtttttccttgaacaggatgaccgaaagcgcgacgctgataacaagtatcgcggcatcctcaacggaatatgttacggcgttgccgagaacgggaagaatacgcaaaacaagttgaagaccgaccgttgaaacaacgcaggtcaaaaacagaaagataacggattttctcgttatttcgaactcacgcgcaaagcgtctgccttttttgaatatcagccagacaacggcaaagacagcggaaatcagatatgttattgcgatgagttcggtatgctcgttcggatagatgttcgaatgcaccgaaagcagcgagcagtatatgccgtttgaaagaaagattatcagacagtaaatataaaactttttggaagtcgttctctgacggaagccctccgcattgaggaaaacaaacgccacaagcataactccgacggcaactatctgtattaccgtggggactttggactgaaagaacgaaacaaaaacggggattatcagcgagccgaacagcgacgaaacggtggcaaccgaatacgaacctctcgaagcggctttgataagaccgaaattataaagtatgagcataacggcgttgactgccgctataagaagagtcatcgggctggttgacagattgaaacccgtcgaaaccatgtttataagcgcggtaacaagtccgtaaagtgcggaaaaaactattgcggcgcacgaagtgtctcccgggaagtggtccgaaaacttcttcgaaaaaaacgcctgcaaagcaaagcaaacggacataatacccaacattatataaatcatttcacatacctctttctcttcggcggatatatgataccatataattgtgtcttttcggtgcaagttcaccaaattgacagaaagatttttgtgtactttttgtggagcgactttttttcaaacgattgaccgcggctcttgaaaaagccgaaaaaaaatagtataatcagtataggtcgagtttgttcagactataaatcaaaactgtcaacggagatttgatatgaaagaatttttcgcaacccccgacgtcaacgcatcggcggtaaacacttttttcggagaaagcctgaaaaaagacaatgaaatacatgccatgagcatttacaccgacaaggagaaaaaactttcttttgcggcagagccgtattcacttgacgacaaaagagaaatatattcgctttccaaaagtttcacttcgtgcgcgataggtgctgcatgggacgacagacttatcgacctcgatgaaaaacttgttgatatttttcctgacaaattgccggaaaaagtgagcaaaaacctttcaaaaatgactgtcagacattgcctgacgatgacaacgggacatatcgcctgcgttatgagcgagattgtctttgaagaagatcccgcaaaagcgtttcttgcgtgcgatgtaccgaaagaaccgggaacatattttgtatataatacgggcgcgtcctgtatgctcgggttgatactcgaaagaaagacgggcagaaaactctttgactatgcttacgaaaaaattctgtctccgctcgggataaaaggcgcaacttggtccgaatgtgcgtccgcaacaaacgagggcggaatagggcttcatatcagttgcagagacatagaaaaattcgggcttatgctggcaaacggcggagaatatgcgggaaaacgcattctttcgcaggaatgggtcgatatggcaggtgccgcgcaggtctcaaacaaagaaaacggagacagcggaacgggcaactggacaagcggttacggttttcagttctggcgcaccgcgcatgacggttatcgcggagacgggctgaaagggcaactctgcatggttatgccgaagcataaggccgttgtatccattgttgcctgcacaaaagacatggaagcggaaatagcggacgccgttacacttgtggaaaatttgctcggcaaaagcgatgaaacgtttgatattcccgattacagaccgtcggcaacggataaagacatttcagattttgtcggaaagaccgtgcttttgaatccaaatccgatagggttgacttccgcaaagttcgaaaaaacggatacgggaatagtcgtaacgcttttgaacggcaaccgtgcgcaaacactttttgctggaaacggctgttgggaaaaaagcgaacttgaactgcccgcaataacgccgaaaattttgccgatgatggtttcaacccgacccgaaaaagtccgcatcgcgtcatctttcacggttgaaaacggcaaacttgttataacggcgcgaaatctttcaaacccgcacacggtaatcgtcacggcagaaaaaaccgacaaagaggttaccgtacatctcgacacggtttggttccccgaaatgctttccgataaggttcgtgttctgaacggaaaaatcgcggacagataaagaggttttgcatgaaagttctcataaccggcgcaagttcgggaataggcaaagaacttgcaagaagtttttcaaagcgcggggcttcgcttatccttgctgcaagacgaaaggacaagctcgaagaattaaaaaacgaactcggcggagatattgaggtcgttatatgtgacctttcgaaaagaaaagaagttttcgcactttatgaccgtctcaaaaacagcggcattgatattcttgtcaacaatgcgggattcgggcttgtttccgactttctgtcatcggatctcggcgcggaactcgaaatgattgaaaccaacgccgtcgcgccgcacatactgacaaaacttttttaccgtgattttgttcggggaggaaaaggaagaatactgaacgtcgcctcatctgcggcttttatgcctgcgggaccgtatttttcgacatattacgcgacaaaagcctacatttactctctgacccgcgccgtggcaaacgaagcaaaggcacacggagtctgcataagcgttctgtgtcccggaccggtaaagacggactttgacagtcgtgcgggggtcgcaagcagcctgaaagggcttgactgcgccgatgttgcggagtatacggtaaaaaaatttcttaaaggaaaggaagtcatcatacctggagcaagcatacgtctgctcaaattcacgacaagatttctttccgatagattcgctgtcacgctgacagcaaagcagcagaaaaaaaagataaaataaacgctgacagcaaaagcggagcgcccgaaatcgggtgctccgctccttttgttttatgagttcaatcagccttcatctttaatgaaaactatagttgcgtcagaatccttgaacgtcagtttaccgtcggtaacggtagcgtcctgagactcattgtcgatggttatcgtaacggtgttttcgtctttaattgcgaatgtgccctcttttgactcattttcaccggcagcctcaacactgagtgaaacttttccgtcctttccgaattcaagagttcccttgaatccgaaagagtcaagaagatcggcggaaacactcacgcccgatgtctccatagagtccatcttccattttgttcccgagaaattatctttcgtcccgcaagccgcaatgaggcaaacgaagagagaaagaacgagaacgaccgcaacggctttgcttgctgtctttttcatttttttcttttcctttcaaatatttattaaatggcatatgccttttaatccatatgtttttcttttccttttaataacctgcctcgacaagacgcggacaggtcttgtgtcccttgtatgcggcgatgtattgaatcatccattgataatactggtcaccaaagccgcctttcataggttcaaggtcacggctgtattcgggcgtataaagatcgacgaactgtccgttcggctgacgctgcgcaacccattcgttccaccatgtcagaatgactatcttcggtctgtacttaaacgcctgcttccactgattgtagaaagtaacgccgtgctgtcttgacgtcgcggacgggtaggacatatagtttgcctgagccgctgcgcaaacgcagatctgctcataatatgtattgcccgttgtggtatctgttatcggtgcacggggattgttgacggtattattcaggaaactccaattctgagtttcggaattttgaagtccccacatggttctgtaattaaacttctttccgagtaaaatagcaccggatggggtattatactgcgcggcccaatcggtctcgacctcaactcccgttgtaccggtcccgagcataagcggttttgcaagcccgtttgcatcgacgcgccagtaaacccaaaggtccttatatttatcaagttttacgatgcttctgtataactcgttgcagacatcccagccttcaacgtttctgttccagaaaacgacatacggggtcttcaaaccctcggcacgcattttaaggcaggtatcaagcagaaaaacggtgggttttacgccgtaaagatcccagcctgtcattccgctgttgccgagaatgtctttcttccaactggtaagaacattcgtattatcaatcactatgaagtcaacgcccgcatttgcaagttgcgtcatatgggttctgacaacattttcgtccatattcgaataatagccgagcgcgggttcggaccaataatggaaatgattggtcggaccgtaatttccctgccccgcaagtatcttcgaaaggtcataggttacgccgaagttgtatgcttttgcataatcgtgccaggtagaatagttgatgcctacaagatcatctttgaaagttatgtcaagaccgtattcggattctttgtaatcgggataaagactcttgacatatttcacatagtcagactcttcaacgggtttgtcaaactgatcgcttataacgatgtctctgcccgtgccgcgaacaactgttccgtcaagcgtctgccagaacggaacgacattgattgccgtgtcgaacattgaagacgggacacccgccaaaacatatgtcataaagaatgcggaactgtcggaaatatccgtcggtttgtaaaccgttccgtcatttgcgcagacagaagaatacacggtcttcaaatcaatgcgctgttctttgccgttgacggaaataaagaatccggcagaagcgtagtatgcgctgtcaacggttgtgataagtctcagatccgcagactcggaagaaagcgtaacgtcctctttgagttgggctttgacaccgagtacaccgccgtttacaaattttgcataagcgttgcctgtcgaagccgtatacggaacggtaagagccgcatcttcgaaccaacccgcaaaaactttaccgtcggaagtcggataagtgcccgccgtcttatacggagcaacgtcgtaagtttcgccgttcgcaagcgcggcagtcggaagaaagcccgcaagaagtccgagcataacaaaagcgactgcgatgcgcaataaactttttttcataattgtgcctctctttcgcagggataaaatgtgcgataaaaattaaaaccaaggattccaattcgtctctttgttctctccgccgtcttcaagcgagggcatttgagaagtcgttataacatctgccgtttcaacgaattcaatttcaggtcttataaacatagccgagaatctccttattatataatttgtatacttattataccgcaatgcaaagattttgtcaataagtgtctgtacgaaaaacatttgattttaatggtcgaaatcaacaaaaaaacagacgcattttcagcgtctgtcacatttggtataaaaactgcaagcgtataagccgagttctgttcggaaaatttcttttccgctgcgatcatctatctcgaacacacgttaccgtgcgcctccagctacctttaagacacgatgggcggcgtataagtcttttctgcggtattgctccggatagggtttacacaaacagacggcgttaccgccgtcccggtgggctcttaccccgccttttcaccttaaccgattgctcggatgttcttttctgttgcactgtcccgggagttgcctccggcggacgttatccgttatccttgcccatgggagctcggactttcctcagggagaacctttcggcgcatccccgcgatcgcaccgcttgcagtatattatcttcttatgttcggtctttattcacgcttcaccaagcgtttgctccgtccgaaccggggcgcggcggaaggtctttcccgtcatcttcgccgaaatattcgtcctgaacgtcgtccaaatcgacaagtcttctgcgaactctgtggtatctttttgccccgggaacgatttttcccgttttaatgtcgtgacgtcttttcatttctttgaatctcggcaaaagcgcgggaatacaaacggcaatgccgaaaagaagcgcaccgaatccgaaaataacaagagttatttttgaatcccaacctctgtctttaagaatgaaaaacggaaaaataacacccaatacgatgaacaagacgatggaaaacgtcaaagcccaaacctgtccctgtttcataaagcaccttccgtgaatgataaaatctcaaaatcaacgcagagcaaaactctgtattgaatattatataacaaaaaaaacggattgtcaacagatgacttatttttttgcgataagaatgccaaaacaaaatacgttacaaaaaaatcataaatattcagatagaattttcctgtttgacaatgcaggattttgtatatttttaacaaacttcacattcgaattaaaaaatacagcttgacaggcttgacaagcgatttaaatatatggtataataacccgcttaatgacaatgaaaatgggtgtttgtgcccctttgggcggtcaaaagcggtttttatgtgaaatcagaggctttaacagcgatttcggtgactttttttcaaacatagggcaaagcctgtacgagcagaaacattgctcggttcggtcacggaaaacatctgttttttaaggaaagccaacgccgcgaaaactgttatgggcgcaaaaccgtgatttcgggtgtccgaagaaaacgttgtttaataattttggttataagataaatttgaacggagttgattttaccgatgacagcaaatctcgatcccagagaggtcggcgcgcactggtcaacggatctcaaacccggtcaactgcaaagagttgacttttccaagatccgacagatccaggccgttcccaacctgatcgacattcagctcagatcgtacaaatggttcgttgaagagggaatgaaggacgttctcaaagattcctccaacatcatcgaccatacgggaacgatagttctcgattacattgattatgcgatcgacaaagagccgaagtattccgaggcggaatgcaaagaaagagatgcgacctatgccgcacccctgcgcatcacctgccgtctgacgaacaaagagaccggcgagattcaggagcaggtcgtgttcttcggcgatttcccgcttatgacggaaacgggaacattcatcatcaacggtgcggagcgcgttgttgtttcccagctcgtaagatctcccggcgcatacttcacaagagaagtggacaaaaccggtaacaaactttttgccggcaccgttatgccgaacagaggtccgtggattgaatatgaaaaggacgcgaacgatgttctgtttgtaagagttgacaagggcaagaaattccccgtaacaacgcttatcagagcgttcggcatcgacaccgacgaaaagataaaagaaacattcggcgaagacgaatgtgttcttgcgacgcttgaaaaagaatatgcaacgaagaaagatttcggcgtatccgaaactccgagaaatcaggcgctcaaagaactttatatgaaactccgtccgggcgaacccgcaacggtggacggcgcgatagcacacatcgacaatctcttcttcaatgagagaacttacgacctgacccgcgtcggcagatataaatataataagaaactttctcttgcgggcagaatcacttcccgccccgcttcccgtcccgtttgcgaccccgtcagcggcgaaataatcgttgacgcaggagaagttatcacgagagagaaagcaaaagagattgaagccgcaggcgttttcgacgtttatatcgtcgttgacgaaaaggaactccgcgttttctccaacggaatggtcgatatgcttgaattctgcaagcgcaacggctatgagttcacgagagaggaacttgaacagaacggcgttaccgaatgggtaaaactcgacgttctccgcgaaattctcgactccgcatcaaagaaagaagagatacttgcaacggcaaaggcaagaattgcggaactcattcccatgactatctgcaacgaagacctctttgcatcgataaactatatcctcggtctgaaccacggcatcggtgtggttgacgatatcgaccacctcggcaaccgtcgtattcgttccgtgggcgaattgttgcagaaccagttccgcatcggtttcagccgcatggaaagaacgataagagagcgtatgaatatgcaaaatatcgaaacgctcactccgacaaatcttctgaatacccgccccgtcagcgcggcaatcagagaatttttcggttcttccccgctttcgcagttcatggatcagaccaacccgttggcggcaattactcataagagaagactttccgccctcggtcccggcggtctgacaagagaccgcgcaagctttgaagtccgcgacgttcactacacgcactacggaagaatgtgtccgattgagacccccgaaggtccgaacatcggtcttatctcctacctttcgagttatgcgcgcatgaatgtgtacggctttatcgaagctccttatcgcaaaattgaaaaaagaaagaacgccgacggcgagatcgaatgcttcgttactgatgaagttgaatatatgaccgcggatgtggaagacgcatacgttgttgcgcaggcaaacgagcctcttgatgaaaacggctgtctgctgcacaagagagttgcggttcgttacagagacgagataatggaaactgacagagcaaacgttgactacatcgacgtttcgccgcgaatggtcgtttccgttgcgacatctcttatcccgttccttgaaaacgacgacgctatccgtgccctcatgggttcgaacatgcagcgtcaggcagttcctctcatcaaaacggaagcacccatcgtcggaaccggtatggaatacagagcaggcacggactcgggcgtttgtatccttgccaaaaacggcggtgttgttgaaaaggcagatgcgcgtgaagttctcgtaagaaacgatgagggcatcctcgacagataccttacaaccaaattcctccgttcgaaccaggcgacctgcatcaaccagcacgtcatcgtcaagaagggtcagagagttgaagcgggacaggttcttgcggacggtccttcgaccgaccacggcgaactttctctcggcaaaaatatgcttatcggcttcatgacatgggaaggttacaactacgaggacgcggttcttctgaacgaaaaccttgtaaaacaggataaatacacttccattcatatagaagaatatgagatagacgcgaaagaaacgaaactcggtcccgaagagatcacgagcgacattccgggcgtcggaaaagacctgcttgcgaaccttgacgaaaacggtgttatccgtatcggagcagaggttcacagcggcgacattctcgtcggcagagtttcgccgaaaggcgacaccgagcagaccgcggaagaaagacttctccgcgcgatattcggcgagaaatccagagaagtccgcgatacttcgcttaaagttcctcacggtgaaagcggtatcgtagttgacgtcaagacattcacaagagaaaactcaaacgaactttcaccctcgacaaataaaattgtccgcgtataccttgcacagcgcagaagaatctctgtcggagacaaaatggcaggccgtcacggtaacaagggtgttatttcgagaatactcccgcaggaagatatgccgttccttgaagacggtcgtccgctcgacatcgttcttaacccgctcggcgttccttcccgaatgaacatcggtcaggtgcttgaagtccacctcggcagagctgcggcggaactcggttggaagataatgacgcccgttttcgacggtgcgaaagagaccgagatctcgaaagcgctcgaatttgcgaagataaccagagacatctatccctgcgaagagatagagaacaaagcggtattcatggaagtcgataccgaaaagggcggcaaagaccttcaaagaatcgacaaagagtggatagcggagaacaaggaagagttcgacagacttgttgccgaaaagaagataaagataatcgacggcaaagtaactcttcgcgacggcagaacgggtcagcgtttcgacaaccccgtaaccgtcggatatatgtacttcctcaaacttcaccaccttgttgacgacaagattcacgcacgttcgacaggtccttactccctcgttacgcagcaacccctcggcggtaaagcccagttcggcggtcagcgtttcggagaaatggaagtttgggcgcttgaagcatacggcgcggcttacacgttgcaggaaatgcttaccgtaaaatcggacgatatcatcggccgtgtaaagacgttcgaagccattgtaaagggaaagaacgttccgaaagcgggcgttcccgaatcgttcaaggttcttgtaaaagaacttcaatcgctcggtctggaagtcaaggttctcgacaagcagaagcaggaaatagacatttccacgtcgcttgaagacgatccggacgattacagacagatccgcgacgataagaaagaaatcgcagaagcaatgggcgatgaagacgaatatatgacggagatcgacgacgacggcttctttaccgaagacctcgactcttccgatttcctcgatgacgagtttgcgtccggtcattcggatgacgacacgtttgatttataataaggagggcaacggataatgacagatgaaatgaacattgccgaaaacggcgtcgaagaacagaatctttacgaagacgctctccgttccgccgaaaaagagatcgaaaaggataacgtttttgaatccataaaaataggtctcgcatcccccgaaaagatccgttcctggtctcacggcgaggtcaagaaaccggaaacaataaattaccgaacccttaaacccgaaaaagacggtcttttctgcgagcgtatcttcggtcccatgaaggactgggaatgccattgcggcaaatacaagagattccgttacaagggcaaggtctgcgaacgctgcggtgttgaaatcacaaaagcaaaggtcagaagagaaagaatgggtcacattgaacttgcggctcccgtttctcatatctggtatttcaaaggaatcccctcgcgtctgggtcagatgcttgacattcagccgcgtcagctcgaaacggttctttacttcggaaaatatctcgtaacggaagtcagcgacgcgattcccgcatccgaacttcaaaagaaacagactctttccgaaaaagaatacgttgagatgaaagagcgttacggcgatgagttcaaagccgaaatgggcgcggaagcggttaaaaaactgctcaaagaaattgaccttgaagaactttccgcttccctgaaaaaggaacttgaagagtccgtaggtcaaaagagacttaaactgctcaaaagacttgaagtcgttgaatcgttcagactttcgggcaaccgtcccgaatggatgatactcgacgttatcccggtaattccgccggatatccgtcccatggtccagcttgacggcggcagatttgcaacgtccgacctcaacgacctttacagaagagttataaacagaaacaaccgtcttaaaaaacttctcgacctccatgcgcccgaaataatcgtccgcaacgagaagagaatgttgcaggaagcggttgactccctcatagacaacggcagaagaggaaagcccgtcagcggtccgaacaacagagcgctgaaatccctttccgacgtgcttaaaggcaagcagggacgtttcagacagaacctgctcggcaaacgtgttgactattcgggacgttccgttatcgttgtcggccccgaacttaaaatctatcagtgcggtcttccgaaagaaatggctctcgaacttttcaagccgtttgtaatgaagagactgaccgaccttgacaagaacctgaacatcaagagcgcgaagaaagccgttgaaagagcggaagactgcgtttgggacgcacttgaaaacgtaatcaaggaatatcccgtaatgcttaaccgtgcgccgacgcttcaccgtctcggcattcaggcattcgaacccgttcttgttgagggcagagcgctgaaactgcacccgcttgtttgtacggcgttcaacgcggactttgacggcgaccagatggcggttcacgttcccctttcggcggaagcgcaggcggaagcaaggttccttatgctttccgcaaacaacctacttcgtcctcaggacggaaagccggttgcggttccgacacaggacatgatcctcggttcgttctatcttaccatcgtccgcgacgacgaagcgggagcatgggcggtcgagaaagacaagaacgactctctcatcgtcaaacttgacgaaaacggcgaacccgtcaagagaggtaaatcgttcagaaacgttgacgaagcaatggttgcttacgatggcggcgcaataggcattcatgcacccgtcatgatccgtatggaaaagaccgtcaacggcgaaaagaaacggaaaaacgttctgaccacggtcggacttataatcttcaacaatcccgttccgcaggatctcggatttgttgacagaagcgaccccgagcatgaattcgaccccgaaatcaagttcgtggtaacaaagaaaactctcggcaagatcatagaccgttcaatccgtgttcacggcataacaagaacctccgaagtgcttgacgcgatcaaggcacagggttacaaatactccacccaggcggcaataaccatttccgtttcggacatgatagttccgcccgagaagcagagcattattgcagaatccgagcagaaagttgcgaaagtcgagaaactttacaagagaggcatgatttccgacgaggaaaaatacggtcagatagtttccatttgggacagcacgacctctgcggttacgaagaagttgcaggagaacctgagcgaaaagaacccaatcaacatgatggcggtttccggcgcccgcggctccatcgaccagatccgtcagctttgcggtatgcgcggacttatggcaaatacctccggtaaagcgatagaagttcccatcagagcgaacttccgtgaaggtcttaccgttcttgaatacttcatctcttcgagaggtgcgcgtaaaggtcaggcggacacggcgcttcgtaccgcagactccggttacctgacaagaagacttgtcgatgtttcgcaggacgttatcatcagagacgacgactgcggcgcgacgacgggcgtttgggtttccgaaatcagcgagggagacgaaaagatcgagtcgtttgaagcaagacttctcggcagattccccgttgacgacatagttgacccgaccacaggcgaagttatagttgcaaaagactgcgaaagaccgatgaccgaagcggacgcgaagagaatttccgcggcgggcattacaagagttcaggttcgttccgttctcggctgccgttgcaaacacggtgtctgcgcaagatgctacggtgaaaaccttgcaacctccgagaccgtaaacgtcggcgaatccgtcggaatcatcgcggcacagtcgataggcgaacccggtacgcagttgacgatgagaacgttccacaccggcggtgttgcgagcggcggcggtgacatcacgcagggtcttcccagagttcaggaacttttcgaagtacgtcatccgaaagttatggcgatacttgcggaaatttcgggtacaatcgcgttcagccaggtaaagaacgctgtttatgctactatcacgaactccgaaacaggcgaagagagccaggttcttatcccctacggcgcacgtcttaaagtcaaagagggcgacaccgtggaaaagggacaggagctgacttccggttcttccgacccgcaggatatactccgcatcaagggcgaacacgccgttcaggaatatatcatcgcggaaattcagaaagtttaccgcagacagggcgttgacatcaacgacaagcacattgagataatcattcgtcagatgatgcgcaaagtcagagttgttgaccccggttcatacgagatctttgcggattcgataatagacaagtccgaacttcttgactacgagaaacgttacgaagaagacaaggcagcgggcaaagacgtaacgcccatcaccgtttctcccgtacttctcggtatcaccaagtcggcgcttgcaacagaatctttcctttccgcagcatcgttccaggagacgacgaaagtcctcacggaagcggctatcaagggcaaggaagaccaacttatcggcttgaaagaaaacgtaatcataggcaaacttatccccgcaggaacgggactcgaaagatacagaagagttcacgttgtcgaagaggattaagagaaaaccgaaaagttttatccccgaaaggcatacgcctttcggggaacttttttgcgcagaccgtgtatatccgaatttttgcagagagataaagactcaatattgtctcacagcgaagcgaaaacttgacaacttgaagtgtttgtagtataattattatgtatgcctatggcttgccactccgaagcggagaaaagaccgcttcaaaaacaggaacacaaacggaggcgcacaaaatgaaaaagataatatctctgacgattacagtcatacttttactttcaacgctgttttcttttgtttcattcgcaaatgcggaacttgaaaaaggtctgcaatccgaagcatatatcgtaacggacgccgcgacgggacagatactgtatgcgaaaaatcatgagaaacaggaaacgctttccggcataacaaaagttatgacggcggcaatagcgcttgaaaaactcgaactcgacgcaaatgcgacggcaacaatctccgcggtcggaaacgatgttgtgccgagagacacgataaatatttcgcttgtcgaaggtgagacagttgatgtgaaatcgcttctgcacgccacgcttttggcgggtgcaaacgatgcggcgaatgttcttgcggaagcggcaagcggttcgatcgagaattttgtaaagcaaatgaacgaaaaggcaaccgcactcggctgcaaaaacacaaagttctataatgcaaacgggctgacgtcggacacggcacaaaacaatgtgacgacggcttacgactatgcacttatcatgaaatatgctatggaaaacgcatatttcaaacagataataaaacagacgacatatactataccggaaacaaacaagagtgccgcaagggaaatatcgacgtcttacaatctgctgaaaaagaacggtttttacgaatattcgacaggcggcgccgtcggctactcaaaagcgtcgggctataccgcagtctcgtccgcactgaacggagacaaagaacttatatgcgttgttctcaactgtccgcagggagaagcgcgctttgcggatacgcaaaaactctttgattacatattcgacaattttgaatattcaacacttacgcaggacgatattcggtcaaaaacagttgatgtactctccgaagacggcacgcagataattgcaaaggcaacactgactttgccgggagagataaaggttcttctgcacaaggatatcgcaaaagaaaatctgataataacggacactacccccgaaagtttcaaagcggaagcggagaatcagtcggtaacgataacagcaaattcggacttgatgttcagtcccgttgcgacgtcatatctgcaagcgtcaacggaaattctcgcaacgcccgaaccggtgacagcgatctcggaaaccgctcccgaatcgaaaaattcgttcggaagcgttgttctgacaatactcaaagttataggaataatcattcttgtaattatcgcgggcgttatagttttcgccgtctatgcggtcgtttcaaacaacaagcgcagaaagcagagagcggagcgcagaagacgcgaacgcgacggtgagccgacggacgaagaagaaagaaacgaaagacctcaaagaagaggaaacacgcttgcaagaagaaacggacggtcgtccgaaagacgaaaataacttatgcaatacgataatataagcgaggtctacgacaaattcaacgacgacttcgattacgaaa

SEQ ID NO: 1049 - DNA, 24795 bp, Unknown
  16S sequences of unknown bacteria
ggctctgatatgccactggcatatcagagccgcgccgccacttcgttaccccttgcacaggggagcctttggcttggtgtggcgagtactactttatcatcaaaaagccgccccggagggcggcaagagggccgttattgcagatcggccagatactgctccagccgggcttccagctgggcggcggtatccgccaggatggcgctggggtcggcggcaaggagctccgcgggcgtgcggctgccccaggtcataagcacggtgggcaggccgagatttttgccgagggagatatccacctgggaatcccccacataagcgacgggacgggcctccagctcgcggataagttcctgggcgagggtggggtccggtttgagggggaagccctcccgctggccccaaatggcatccagcatgccgtggaaggtactttcccgcagggcatccgcctggggctggggcttattggtgataacagcggtaagaacgccctgggcccggagtctttgcagcagctgcgggatgccggggtagatgatgccgggtttgcggcattcctcggtgtagatgcggtcataagcggcgagaaccttttgccgcagttcctcggcggcaccggcggggcaggcccggccgatgaggacgcgcataccattgccgaccatgccgttataggcggggatggggtactgcggaaggccgttttccgccagggcgcggttgcagctttctccgatggcggggacgctgttcagcagggtgccgtccatatcaaataagatcaaaggtctcatgccatattcctccagtattgatgctatgccaatattatatcaccaaaccacttgacctgcaatgcagcatgatgtacaataaagccgcacaaaccgggagtgcgctgcggcgctgagatgggcaaaagcccgaatccctattacctgatccggatcataccggcggagggagcgtttaccaaagcggagcttttccgctgcttctttgccggatcgtccatcagggacgatctcatttttttggaggaaaactgtatgaaaaaccaaaacacacgccggctggtggagagtgctttgatgatcgccatcggcacagtcctttcggagctgaaggtgggcagcctgtgggcctttggcggtggcctgaccatcggcagcatggtaccgctggtactgatcagccaccgctggggcattaaatggggcacctttaccgcctttgtttacagcctgctgcagcttatcctgggtgtggataatgtgcagtacgccaccagtgtgggcatggcgattgccattatcctgctggactatatcattgcctacaccgtgatcgggctttcttcaatgttcggctccagtcggccggccatcattggcggtgtggtggtgacgctgggactacgcttcctgtgccacttccttaccgggtggatgatctgggatgcgctgtggcccaacgagtttggcatgacctccgcggtgtattcgctgtggtacaatggctcctacatgctgccggagatcgtgatcaccgcgatactggcctgcattctggtgccgtggctgaacaaagccttccccgccaagaaataaccctgcggctgatacaaggccgccccgccggcggcgcccccgaagggggcgccgcaccccgcccggaagggcgggagcccggtgccgaaagcaccgggcagcggggcggtctttttgcgccttgcagagggtggcggagggcaattttgcaggcttgcggcccgtaaaggggcccgcgaaggaggcgggactggcggggcgcagcccccggcggcggagccgccgctgcggacgaagtccgcaaaaaccgcccggagggcggtttgggctgcgccccgggcccgcgcctttcgcgggctatccgccgtaatctgccgggccgggattttcggtgcagtagaccgcttcgctgatagcccggaataccgaggcaggggtctggccgccggcgcggccgccctcctggaacaccaccaggacatatttgggctccccggcggggaaaaagcccccgaaccaagcatggacgatctcctcgccctcctggtaccggccggtttgggcggaggcggttttaccgccggcaccgcagtagcggttagccgcccggtagccggtgccctcctccaccacgcttaccagcagggcgcgcagggtctcggcggtttcggtgttcatcacccggatgggctcaccggcaggatcactttgcaggattttgccgtcaaagctcctgcccgcgaaaagggtgggctgcaccgcatagccgccattggccacggcagccagcatcacagcgacctgtaccggggtggcggtgagcctgccctggccaaaagagaggttggcgagttccccgggagtggcctgcgccaatgttgggagcgacccagcggaagaattgacgccctccgccaattggctcccggccccaaagcccaaccgctgggccatccgcagcagggcctgggcaccggtacgctggcccagctccacgaagtaggggttgcaggaaagctgcatggcctgctgtaaatccagcgttccgtggcccgcccgctcgtggcagaagtaggagtgatctcccaggcggtagaatccctcgcagcagtagttctccggcagctccacctcattttccagggcagcggccgccacgcacaccttaaaaatggagccaacattccaggcggcggtggcccggttcagaagaggactgtctgctgcctccagtgccgcggccacatcggtcacatcgtaacccgggaagctggccatggcgcggatggcaccggtttcagcttccagcagcaccacagcaccccgacccagcactgcgccttcccgctccacaatcgtttgcaggtccttatccagcgttaggacaatgccggccgtgtgttcggtgggatcgctcacctccggggcctgcccggtggcctgccgccaggcatttaccgtgtagcgcacagtgatctctccaccccagcgggtcaactgctcctcgtagccggattcaatgccgcagatgccgcggccttcaccattgatatagccgatgatgtgcggggccaactgatcggcgctgtaacgctgcgggacctggagggcggtgatgccctctccagagatggggaaatcactggggagaagcaccgggcggccgctttgcagcaggggatagatctcctcgaactgttccgccgaaaggccttgccgcagggcggtcatggccgctggggtggggtccaccgccaagaccgttttttcgctttcattcaccagtgggcgcagccggcaatcgtagatattgccgcgcgccgtaccggccgaaagggtatagcggctctgcgccgcggcggtttggcggtactgttccccctggccaatgacaaaaatgcgcagcagcaccccgcacagcgccagcagcaaaatgacatgtacccacagcacccggcgggccaacgaatttctcatacccataggcgcaaaagggcgccgcggtaatcccgggcgacctgcgccggagcatgagtgatgcacagtgcgtcaccggcctgccgacccagggccacccgtttttccccgttcatcatggtaaagctgagcagcgcttcctccaccccgcgctgcgtcacctgcccggcggggacggcgcatcccgcccgctgagcgtcattaaaggggctgtgggtgacggtaaggatgggcttctcattctgcatcatgcgcagcaaaagcggcgtgtaggggccatagggggcatcacagcggcggtcatccccatagtaaaggatatccgccaggccgtacagggtacgctggcggcgctcactttgggcatctaacaataggatattctcccagttgttttcccggatcacgcggcgcagcagctgcttatcgccgccgttgccggcaatgaccgccgcgatgccctgttcccgcaggctgccggccgcgcccaccagcagctccggcagatgccggtcattgaggtgcccggcgtaggcggcaatgacgggatatcgctcccgcagggcccggatcgcctcagcgtcggcttcccgcaggggctggggggacgcctgcggcggagcgggcgccggcagggtggccaggtgggccggggtgatctccttttggcggcagtagtcctcccccttttgcaggaaggagaccacggtatcggccccgcgcagcgcatagcccatggcatactccgcgatgcactgattgagacggctgtcctccgcggggtaaagctcccgctgcagctccggccaggtctccctcagctcaaagacggtttttgcgcgggccagcttggcgatgcgctgagcgcagaaataatcgtaggggtagccgctggccgcaatgacgatttccggatgatagcgctccaccaatttgggggcgttcagatacaattttttgaggaaggactgcacgcttttgcggtactcccccaccccgtggtcataatccggagagagaagcgggcaaaaggtaacgccctccagctgctgctcctccatctccttttccacggtcagatttttgccgcggcggtggctgtacccggcggtcacgatggtgacctcatcgccgcactgctgccagccctgcgccaactgcaccgcccggcaatccccgcccgatgagggcagcgccgcgtggtggtcaatatacaggatcttcatactgatttcctccgtttgatgcgattgaggaaagtatgggatgcccccggcaggataatcattgccgcgggggaaaatccatccgctgccgtattgcaaccggcggccgcagcctgtataatcataatgaaaaatgacgaaccaaccccgaaggaggccccatggagctgctgattgtgaccggtctttccggcgcgggcaagacccgcgtcatcaatgcgttggaggacatcggattctactgcgtggataatattcccccggcattgctgggcggctttgccgatctgtgctactccccggcggcccaccacggccgctccgccattgtgatggattcccgcagcgggaagatgttccgtgagctgccccacgccctggaggagctgcgctgccgccatatcccttaccgtatccttttcctggaggcgagcgccgaggtgctgctgcgccgctacaaggagacccgccggagacatccgctgctggatgaatgtgacggctgcctggaggacgccatccgggaggagcgccgcctgctgaagcccatacgggatgccgccgactatatcattgatacgacctccctttcgcccagccagctgcgcgggcgcatcgtgaccatctttgagggagagacgacccccatgctcatcagctgccagtcctttggcttccgcaatggtctgccgcaggacgcggatctggtctttgatgtgcggtgcctgcccaacccctactatgtgccggagctaaaggagcatgacggcactgaggggccagtgcgcgactatgtgatgaacgccccggaaagccatgagatgctgcaaaagctggaggagctgctggccttttccattcccctgtaccaaagggaaggcaaaagccagctggtagtggccgtgggctgcaccggcggccgccaccgcagcgtggccatcgcctgccagctggccgcctacctgcggagccttggctaccgggtggagctttctcaccgggataaggacaaccggcggtaaaggactgttttgccgaaagaaggatgccgatgcggaggacagccggcggaggagccgggagatccggaacgcgccgggcacctatgccgaaaaacacggacggaggataccatggtaagaccgatttgcaaggatgagatgtttctctcgcaaaaagcgaagcccgcggaggaaagcgacctgccggtggccggggacctgctggagacgctgatggcgcaccatgaggaatgtgtgggcatggccgccaatatgatcggcgtgaatcggtgcatcatcgccttccaggatggggcgggctataccgtgatgctgaaccataaaattctgcagaaaagcggggcttatgaaaccgaggaaggatgcctttccctgacgggtgtacgccccgtaaagcgctggaaaaggataaaggttcgctggcaaaatgaaaaactggagatccgcattaagacctataccggctgaacagcggagatcattcagcatgaaatagaccactgcgaggggaacctcatctgataaaatgaagcgtggcgacagaaaacctgcaaaaatatttttacgctacccccttgacaaatgaccggcgggagtgtattatcgtgctaacataccaaagcaaatggaaccggaagggaggataacacaatgacaagctaccgcgtaatgggccatagcgcttcctcttgttgttgcatactgaactcccggacatccaagatggccaggcgcttttagtatgccgtaaagcgcctgcacacagcgcaaaatgtgtggataagagccattcctgccgggagcttgcaaaagcccccggctttttgttttaccaaaattgcgagaaagacggtggagaagctgaactgggaatttatgatgaaggtgctgccgctgtaccgggaggccctgtggctgacgctgcggttggggctgtgcggtacggcattggccacagcggtggggttgctgtgcgcggctattcagtacgagaaggtgccggtgttgcggcagatcgtggcgggatacatagaactgagccgcaatacaccgctgctcatccagctgttttttatctactacggcctgcccaaaatcgggataaagaccgacccggcggtatgcggcgtggtggggttggcgttcctgggcggcagctatatggcggaggcctttcgcagcgggctggaagccattgagcccatccagcaggaaagcgccctgagcctgggcctgacccgcggacagaccatgcggtatgtgatattgccgcaggccatgagtatcagcatgccggcctttatggcgaatgtgatcttcctgctgaaggaaaccagcgtattcagcgcggtgagcctgatggacctgatgtttaccgccaaggatctcatagccatgtacgccaaaaccaccgaggcgctggcgctgctggtggtgtgctatctgctcattctgctgccggtttctctgctgggcagctggctggaaaggaggctgcgctatgcctgatttgggactggaggtactgctgaagggcaaaaacgctgtcaggctcctggggggactgtgggtagcgctgcgggtcagcctcatctcggtggccatcagcatcccgctgggaatcctgctgggggtgctgatgaccaaaaagaatcggctgatccgggcgatcctgcgcatctacctggagatcatccgcattatgccgcagatggtactgctgttcttagcctactttggcacggcgagagcctttgggtggaacctggatggcgaaacggcggcgatcattgtctttgcgctgtggggcaccgccgaaatgagcgacctggtgcgtggcgcattggtatccatcccgaggcaccagtacgaaagcgccgaggcactgggactgacgcgggggcaggtattccgctatgtggtgctgccgcagacggtacgccggctgctgccgcagtccatcaatctcatcacccgcatgataaaaaccaccagcctgattttgatgatcggcgtggtggaggtgctgaaggtagcgcagcagatcattgaggcgaaccggacggccagccccaatgcggcctttggcatttatcttacggtatttctgctgtatttcctggtgtgctggcccatcagcctgcttgccagaaaactggaacgaaaatggaggtaacaggcgatgtcagactcattgctggaaataaggaacctgaccaagcgctacggtgaaaacaccgtgctgcgggatctgagctttacggtacggaggggcgaggtcatcgtggtgctgggacccagcggctgcggtaaaagcactctgctgcgatgtatcaacgcgctggaaccgatccaggggggagaaattctcttgggcggcgaggtgatagaccgcagcccggcggggctgcctgccctgcggcggcgcatcgggatggtgttccaaagctacgagctgttcccccatatgacggtgatggaaaatattctgctggcgccatgtaaggcactgggcaccaaaaaggaggacgccaaggcggaggccgaaacactgctgcgccgggtaggcctgtgggaaaaacgggacagctacccacgggaactgagcggcggacaaaaacagcgggtggccattgtgcgggcgctgtgtatgcatccggaggtcctgctctttgatgaagtgacagcggcgctggaccccgaaatggtgcgggaagtgctggatgtggtgctggacctggcccgggagggcaagaccatgatcatcgtgacgcatgagatgcagtttgcccgcgccatcgccgaccgggtgctgttcctggaggacggcaaaatagcggaagaagcggcaccggaagaatttttcgccgcgcccaagaccgagcgagccaaaaagttcttaaagacatttgaatttgatgaagtcaagccccatagggattgatataaagactataaaaaggagaaattacaatgaaaagcacaagaaaatggatcgcagccatcatggcagtactgatgctggtactgatggcagcctgcggcaatggcggcaacgcagccaatgaaaataaagcagggtatcgcacactggaggagatcaaggcggcggggaccatcaatatcggggtattctccgataagaacccctttggctatgtggatgagaacggcgagtatcagggctacgatgtgtactttgcccggcggctggcggaggatctgggtgttaaggtgaatttcatctccaccgaggcggccaaccgtattgaatacctcaagaccggcaaggtagatgtgattcttgccaactttaccgtaacccctgctcgggccgaggaagtggacttcgcgctgccctacatgaatgtagcactgggcgttgtttctccggaagggcgggtcatcaccacgctggaggactgggatgagaacgatgagatgatcgttatttccggcacgaccgccgagacctacctgaccgagaattatcccaacatcaagctgcagaagtacgatacctacgccaatgccaagaacgcgctggaaaacggcaacgcggcagcctgggccaacgataacaccgaggtgctggcctatgccatgcagaaccccggctatgtggtgggcatccccacgctgggcggcaatgacaccatagcccccgctgtgaccaagggcaacaccaccctgctggattggctgaatgaggagatcaaggcgctgggtgaggagaagttcttccacgcagactatgaggccaccctggccgatacctacggcctggactatgaggatgaactggtggtagaaggcggcgtcaccgccggctaagcgcacaaaaccaaacctgcataaaaacacacccgtctttctccggtaaggagaggggcgggtgtcgttatatttacaggtgtttttccaggccgcttttttgcaggccacggagggtgagatagataagatagccatagaccggcaccagcagaagcttgagcggagctttggccactgtccaggcccaaaagtttttgcccatatagaaggagagccagaccgcattgagcagcaagccccacaggatgctgaccgccgcactggccgccaggcaccggggaaaggtcacgggcttgcggtacagcagcaggccgtaggtaagcccccgcagcgccgccgtaagggtaaagcccgggaagaacgatagcccggaggtccccaccgcggagcccaaaaggtcggcggcagcggctaccccggcgccccaccaggggcccagcgcccaaccgcacacggcactggccagggtttgcagacttacgcgttctgcgccacccataaggtagacgcaaaacacacgggtgaacagaagatccagcgccacaaacagcgctgccagcaccagctttttcaaagcattgttacggttcattcagggggatccctccttcggggtcatggggttgcctggggttcgggggcggcggcaggctcttcatccacaggctcttcggcgggccacagtccggcatcatcccacaggtggcggaagaaatccttccgcaggataagcttggagtaattgaatttctgatcaaccaggcggttcatgctgctgacatagtagtcatcgctgccggtgtcaattagggaggtatagtgatcggtggaggcattatagcagccaaaggcggtcagccagctgtgatcctggaagatgaccggcgaggaggtatcgctcagcatatcggtgcccatcatcagccgggaatcatagggcagatcgaatagattgctgaccgtcggcaggatatccaggctggaaaccggcttatcaatgacgacggagccctccatatcggcgctccagatgaggaagcagctttggtaaagggagaactgatccagctccctgcccgccagcgcgttcagggattcggtatccagaccgtaggggtagtggtcgggcgccagcatgatgacggtatccttatcatggccggtttcttcaagcttttgcagcagcacgccgatggctttatccagctcgatattgcaggcaaggtaggcacgggcggcctccggcaggtcaagttcggcgaccgcctcctcattgcgcatggccatggcgtttccgaagaaattatactccagatgcccgctgaccgtcagataataggtcataaagtgctcatcggccagcacggtatccagcgtggcattcatcatatccacatcggattccggccacatgaccttaatgttcagtccgttgcccacgcccttatagtcgtagccaaggttcgggtgggatttatcgcgggaataataggtataggtgtggtcgtggtaggcgcgggtggtgtaacccatggccctaaactgattgccgaaggagaagggcagccagttggtcgacgattcggtcaagctccaggtaccggtaacggggatcatccccaaaaggttcacatattcgccgtccagcgtggaaacgccccaaatgggattatagaaattggtgaactgaaagccctcgctccacagcttgtagagatttggagtcaggttgggatcgatggcatatttccacaggctttcgcaggtaaggaagatgagattcttccccgcaaagtagccggtatactcatttttggtgctgggggtcactttggcaaagtagcggtacatctccgccaatgttttgtcctcggtcgcttcggctagcgccgcaaagtcgatctccatcacctgcttttcagcttccggctccggctcaggttctggttccggctccagttcctccaccgccaccgccggcatggggccaaagatggcattgcgtgcctcgatgcggaaggtggtaagcagcccaaagcggctgaccgaaagattgctgataaaatcggtggtatacaggcggctgacgctcatagcaccgccggtatccagcagggccccgccggtggtgatgatttgcagcgccagcgctgcgataagcggccacagcagctctttccactgttcatggccccaagcaatttgctttttgccctgccagaggagcagcgcaatgggcaccagcataagcagcagcgcccaccagcattgtaatatggtggaaaagatgacgctggcaaactgcgccacctgccctgccccgccgactgaaaatagtgtgaagtagaccttgaagatggcataatacaccacctggcccatgtagaagatgctgaagatcccccacagggcggttacaataatacggcccgccttgggagaaaaggccttgcccagcagggccagcaacaccccggccgccagcgaatagccgaaggtatataaaaggcccttgggataatcaaagccgatggtggagatacgcagcaccagctccatccacagcaccgccaccgggaagaaccacatgccccgccaagcggcccaccgggatgttttctgcggctgggcttcttctaccggggaggtaatattcggttcggtgactgtcatttgttatcacttccattctgatccaaagtcgccaaatacttcctaatttcgtattttttcgttttattatagcacagccttttcccgctgccaacaagtaatatctgtattcctgcgcatactatccctgctccattccatctttaataggaggtacccctatgaacagctattttgaccagcagtgggatcagcaactggccggacggccgcaggcgctggccgcctttacccggctttcccccgccgcacaggagcgcattgtgggctatgtgcaaagctgcgataacacccacgaggcatcccgccgcatcagccggatgctggcgcagctggaggcaggcgaatacacaccgtccgaggaataatccccacaaaaaagccgccgcggagagccttttcgctttcctcggcagctttttacttatttactggcgccccgccagcttgtagtcatcactgaagctgaaataaggacaggccgtatactggtgctgcaaaaacaacaccatctcgtcctcatccaggttcatctcgcacacatagcagtccatttcgtcatcgtactcatagtgggcgcagaattcgcagctgccgcccggcttttcggtctttcccgccatggctgcgcctccttacagctcgcacgcggtaaagctgccatccgcattgacggtaacggggtggtagctgttgccggaatacttgaggatggtcttgagccgcgggcgctcgttttcgctgtaaaagacgaaggaaacgccctcccggccggcgcggccggtgcgcccgatgcggtgcaggtagtattcgttctcattggggatctcataattgaaggcagcatccacctgctccacatcaatgccgcgggcggctacatcggtggctaccagcacatcaaattcattattacggtacgcccccatgatgcggttgcgcgcggcctgctccatatcgccattgaggcacttggcacggatacccgccttctccaggtgggtcaccagactgacggtgccgtacttggtgttgcagaacaccatgctgcggcggtattcctcccgcttcagcaggttgataagcgtttcgatgcgctcccggccgctgcacttgatgcagtattgggtgatgcggggtttactttccgccaccggctccactaccagctccacagggtccagctggtatagccagccgatatccatgacctcacgggaaatggtagccgagaacatggacatctgcttggtgcgcggcacccggtccaagatccaccgtacatcctggtagaagcccatatccagcatttcgtccgcctcatccagcacgatcatctcggtgcggtcgatggcgacattgcgccggcgcatatggtccatcagacggccgggggtagccaccacgatctgcgggttcttccggagggcgttgatctgcggctgcatggactgcccgccatacacggccacgatggaaaagccggggatatatttgcccagcttctgcagctcctcggtaatctgcaggcagagctcccgggtggggcacaggatgaccccctgcacatagcctttttccggctggatgcgctgcaccatcggcacgccgaaggcgcaggtcttgcctgtaccggtgggggccttggcgatgacctccttgccggccagtagctccgggatcgctttctgctggatctcggtcatctcggtaaagcccatctccgctatggctttcttcatctcctcgcggatgggcagttcctggtaatttgttatcatgctctacttccttttcctttttgaccctctgcaagctcccggtgggggcgcagcccgtttcggctccgccgaaacacacgagctccgctcgtgtcgcccgccctctgggcgggcggggctgcgccccatgccggccttctgctgggtcttttcgttttttatctcgtccgggagctattatagcatcttttgcgcctcttttcaatgtaaatcccaccgaatcaccgcgcagccaccccggccgtagtatgccaatgaacctttccgaaaggagtgacatgatgagatactgcaataacggcggctgcatgggcgcccagcccggctatgcccctgcggggatgaaccgcacccgccgcatcatcgatagcgaatatcccattgccatggcctatgtaccgtggcagcgctggggcgaaacctacgatgccgagaaagcactctgccgggggaccttattcccggcgctggatctgccgtttaccggctgcgactgtgaaaggggggctaaccgtggctgaaaataacctctgccagctgacaagggaagtccagcggcagacctttaccgcactggaatgccacctgtacctgaatacccatccggattgccaggaggcggccgctgcctttgccaaagcctgcgaaaagctggatgccgcccgtaccgcctataatgaggccgccccgctgaccccctgtgccgcggcgggcagccgtaactggagctggggctgcactccctggccttgggagggttgaatatgtggaactatgataagattttggaattcccggtcaatatcaagcgccccaacgccaaggccgcacagatcatcataagccaatacggcggacccgatggcgaattgggcgccagcctgcgctacctttcgcaaaaatttgccatgcccaaccgccgggtcgccggtctcctcaatgatattggcaccgaggagctggctcatctggagatgatcggcaccatcgttcaccagctcaccaggaatctctccatcgaagagatcaaaaattccggcttcgcaccctacttcgtcgatcacaccgttggcatctggccgcaggccgccagcggcatgcccttctcctctgcctccatgcagtccactggtgatcccatcaccgacctgagcgaggacatggccgccgagcaaaaagcccgcactacctacgataacatccttcgtctcatcgatgaccccgatgtcattgcgcccatccgcttcctgcgggagcgggagatcgtccattaccagcggtttggcgaagccctccgcatggtgcaggatgaccttaattcccgcaatttctatgccttcaatcccgccttccgcggctaacctcctccatgcaataaaaagagcctccgtccggtttccccgggcggaggtcttttccttctcttttattcttcagccttgttatctggcaatatgctcagcccagtcgtcacccatccgctccttgatgtagcagtcgatgacttccgcagccctgtcaaagccgatcttagaagtattgatggtcagctcatagtagcggctgtcgccccacttctccttgcagtagaagttatggtacagcttgcggctcttgttatttttctggatcatcatttccgcgtcctcattggaaacatggaattccgtcgccacgcgctggatcttttccggcatatcgccggtcacaaagatgctgatgaccccccggtagccctttaggatggagctgccgcagcgccccaccacaatgaagctctcgccggatttcgccttctcccgcaggaagtcaaattccatataggcaatgacatcctccggggagttgctgtatccatctatggagcgggtgaacagccggttgcggggcttttcgtcatactccttcagcttctccaggttcaggttcttttccttggcaataacctcgatgatagtactgtcgtacaccggcagcccatatttttcacccagcatatcggctatcaggtgtccgccggagccgtattcccggccaatagtaatgatgacctgctgcttttcgtgttccatactgtcctccctctctgcttagaaatatctcagcttgatgacgatcatggcaatgcccagcacaataatggtcgccgggatggcggtcttgcagtagcggccccagcttaccgggtaaccggccttagaaaccaccgaggtacccactacattggccgaagcaccaatgggggtggcgctgccaccgatatcggtaccaatggaaagtccccacgccagggtggaaagatcggcgccggtggtggccgccagtgtctttattacaggtaccattgtagcagcaaacggaatattgtcaactaccgaactggccaccgcggagatccacagcacgatgtagaccatcgccaggatgttgccgccgcacagcttgccgataaattccgcgatcatcaccagtacaccggtctgctccaggccgcctaccaccacaaacagtccgatgaagaatagcagggtctggtagtccacgccgcggatgatctccttggcatccttggcaaagcagatcagtgtcagtatcgtgatcgccacaccgataagcgccacggtcaaatgggtctgggcatgggtcaccagcagcaccaccgcgcacaggaagatgacgcagctcaacacaaattccttcttatcagtaatggcttcgcttggatcaggataatgtaccgtcagcccggcattggccgccgcgctggccgtcagctccttgcggtaagccagcgcgtagaacaccacgctcaccaccagggcgatgccggcaataacgccggtattggtgataaaatcggcaaagctgtaacccagcgcagtcccaacgatgatattgggcgggtcgccgcacatggtggcggagccacccaggttcgcgcagaaaatttccgccagcaccataggcaccgggtcaaatttcaacagctgagaaagctcgaccgttaccgccgctaggaacagaatgacggtgatactatcgataaacatggccagtacggcgctcatcaccataaaggtaataagaataggcattaccttatattttaccgccttggctatggtcaggcacagccagcggaaaaagcccgccttggccatgccctccaccatcaccatcataccggccacaaagatgatggtctcccagttgataccgctggagctgctctctccggagctgatccagaagttcccggtgatgatggtttttaggttcagtgtttccattatcgcctgcgggctcttcatgcatacaccaaagacgatgatgagtgttgccgcggcgcaccccagtgtgatgtaatgccgcggaatcttatccagtatgatcagtgcgaacatcagcacaaagatcacaatggcagcaatcgcttccataatctctataccccttttctcataaactgtattcgccgcttccggcgtctttcagctccgttaatataacatactaaatatgaaaagggatatctcaaaaaagtctacccatatttccaaaaaggaatatctcttttttcttccgtgcttggtttccgttaatttacggcagttttgcgcaactatttttaatgaaaagcatcaaattgcgcaactatgacaaaattttatccaacttgtcccattccaaaaaaacatcgctttaccctgctatccgttttttgtcttgctttatagcgtatatgctatcaataaatttcgccgtccagcgggaattccttctcttaatatatatcatttcatttatatattataaccatcgctccccacagaaccgccagcagcactacattcaccgccgtaaaaaagagcatatattttccggtcctggccccatccgccgcggcgtacagcttgtaggagatcagacttgccattgaggcgatcagggtgcccagcccgccaaggttcacccccagcagcagcgccgggtaatcggcggtaaagccggaaagcagcatggccgccggcacattgcttatcacttggctcagcaggatccccaccgtcatttccctccctgccaccagtccggaaagcgcctcgctaacggtcggcagagccttcatattccccacaaaaacaaagaaaaacagaaaagtcagcagcaggctgtaatccacacgccgcagcagccgccggtcggcaagcagggccgccagcaccgccgcgcccagcgctattccgtaatgcagcacacgcagcaccgaaagcagacataccgcgaataccgctccccacagcagcagcccccggcggtccggccggttcaggcggatatcagccgcgcccaacggccggcagggcaggcacagtaccgccgcactcagtagcaccaaagatagacccgttaccggcgccatcagccgcaaaaactctcccagccccatccccgaaagggaatagagatacaaattctgcgggttgcccaagggggtcatggcgctgcccaggttggccgccaccgtttgcaatgcaataatagggatattgaatctttcagtaccggtctgggcggtcagcatcagcgtcagcggcacaaaggtgatcagcgccacatcattggtcatcagcatcgccgcaaaaaagcacacccccaccagtacggccgccagccgccgggtatccctcatccggcgcagcagggcagccgtcactgcatcaaatagtccggcctgtcccagcgccgctactgccagcatcaaggccgccaaaagcgccagcacacgccaatctatatagcccagataggccgctgagggcctgaccaaaaaggcggacaccaccgccagcaccagcgatacagccagcactgggtcctttttcagttttaataaaatttgatgtttcaccatgtccacggtccttctccggcgttttgtcagctgcctccccgttttctaaacggcacagggggcggcctgcggccgccccccataaaacagcgattcctccgccgttatttcagcttttccgggtacagtccgtcggccgtcagcgccgccatggccgccgccaccttttcgtggtcctcccggtaggtcaccccgtaccacttgttatgtaccggcagcaccgtcacctcggcgcagccctcgtgcagcagatcgcctatcatctccggcagcaggaactcgctctttagcgggtcctccatgtgctccagaaaatgaataaaccgcggctggaattcctccatcagctccggcgggcaaccccaacagttcatcgaaaccggggtctgcgggtcatattccacttccgcttcccggctcacatcggtaatgcgcccatccgccgtccagccgatcttcagccgctcgtcaatatcagtcagcttgccgtttgcatccaccgtgcagacgccgcgcgccaccgttcccttatcggagagggtgtttaccaggcggtagcccgccatgcacagctgcagcttaccattctcctcgtgcggcgcggtcaaaaagccgtacagctcctcaaaaggctccgggccgtagtagtcatccgcattgatgaccgcgaagggctcccgcagcatcccggcgcagcacatcaccgcatgggcagtgccccagggcttctgccgcccctccgggatggtataccctgccggcagatcggtcatgcgctggtaggcatattctatcttggccgcggtatgtcgccgaccgatgcgctcctcgaagatctcccggttttccggtttgatgatgcagatgacccggccaaagcccgccttcatcgcatcgtggatggaataatcaatgatgagctccccatgggggccgaccggttcagcctgcttcagcccgccgtagcggctgcccagccccgcggccataatgacaagtgccggtttctgcatatcatcttctccttttctggtattctgcccggagccagtccgccccgcaggtcggcgccgcctgcggcggcgccgacctgcggcctccgaccgcctcgcccacccggctatgccgggcgggcgcccctgcggggcgtttcggccctgtgcgggctcctgctgccattatagcaaactttctccccaaatgccacatcattttgccgcccggctaatatatatgccaaaaaagggggggcttgccatgcgggaaacactgtgggtaccggtggtcgcggtgctggggccgctcatcggttcggcggtaggggtgctgctgcccagccgggaaagcctgctgcaccgcctgctggcctttgccgccggaaccatgctcaccctctcttttttggagctcatcccggaaagcctttccgcctgctccccacctgcctgcgccgccgggttagcggtaggggtctttggggtgctggcgctgcaccgcctcctgcccgccgtcccaaacgccccctctgccccccgccgtaccgccctcctcatggtcgccgccattatgctgcacaacctcccggagggcatcgccatggcagcaggcagcgaaaaccgcaccatgctgctcatcgccgtcgccatcgccacccacgatgtcccagagggcatctgcacagcggccccttatctttacgccactcaccgccgcgcaaaggccttttggctctccctttccacctgcctgcccaccctgctgggctacggactggggcggctgctgtggcggcaggtaccggcctataccatgggcatggtcaccgcctgcatcgccggactgatgatcaccatcagctgcgaagaactgatccccgcttcccccggcggcagtgatcgcttgtccgccatgcctgccctgatggcaggcgtcatcctggtgctggtcctccggcagctgctggggtagtctctgcagaatccaagatacgggccgcaggcccggcggctccccgcaaaatgtttcacgtgaaacatttgttcgcttttgcgcgatagaactcccccgggaaacagcacagcctcccggggggatttttagtcgtcgtatacatccagcgggatatcctccaccagcaccttcatgatgccgccgcagaccatgccttcgctttccgccacatcgccggtcatatcaatatcaatgaccttataggtgccggtaccgatgatgtccaaagcgtcccgcagaatggccgcctcactgcatccgccgccaatgctgcccacgatgcgcccatcggggtaaacatacatcatggcgcccatgccgcgcggggtggagcccttggtttccaccaccgtgaccaacgccaccggctcctgcacctgcatcagctgctccaccaccgaaagatccaggtcggaggtattgatggcacggttcatgccgccgtgcaggcgcttgtactcaatgacctgggagaggatcgaaatggcgatctccgccggggaaactgccccgatggccagcccgataggagtgcagatttggcccaggcgctcctcgtccaggccctcctccttcagcatatccaaaaggccgcggacccgccgccgggaaccgatcatgccgagataggcaggctcccgctgctggaacagtgcccgcaggcagttggcatcgtgccggtggccgcgggtgataaccacaacaaaatcgtagggggtgatgtgcagcttattgatcgcattctcaaagctgtcgcagataacctcccgcgccagggggaagcgcccctcattggcgaaatccatgcggtcatccaccacggttaccgaaaaatcgcacctggcggcaaactcgcacaggggctgggcaatatgcccgccacccaggatgatcaggcgctcccggggggtgaggggatcgataaagcaattggcgttctcctcgtcatcaaagccgtattccggccgcagggagccgtctggctgcttttggcagcggcacacggtgcgggaaagggtggtcagatcgccctgctgccccttaaagcaggttttaacactgatggggcgtccattatggacctccagcagtgcgaaatagtaggcgtcgcgaatagacatggcagaattgcctccttgtttttcagataaaataccgcttttatcatagcatttcacggcatcggtgtcaattggcagggcgttgccgtaagagcgggtttgtggtatactaagaataagatattacagctggacaagcccgcgccgggcctcccctcccccttgcggaaccctgcccatccgcactatacatactgtatttttaaccgcaattatccaatatgatattactttccatttaggaggcccctatgccgcaattacccgccgccctgcccgggcagctattacaatggtacgatgaaaaccggcgcatcctgccgtggcgggagaagcccagcccctaccgcacctggatctccgaggtgatgctgcagcagacccgggtggaagccggcatcgcctacttcgagcgctttaccgccgcactgccggatatcccggccctggccgccgtggaggagcagcagctcctcaagctgtgggaaggactgggctattacagccgggcccgcaacctaaaaaaagccgccatccagctgatgcaagaacataacggccagctgcccgccgattttgcggcactgtgccgcctgcccggcctgggagagtactccgccggtgccatcgcctccatcgcctttgatatccgtgtccccgccgtggacggcaatgtgctgcgggtggccgcccgcctcatgaacgacgcccgcaacattgaggataccgccgtaaaaaaggaattccggcaaatcgtctgggaggtgctgccgcagcaccgggtcggggattttaaccagtccctgatggagctgggcgcgctcatctgcctgcccaatggccgccccctgtgcgagagctgcccggtgcgggatctgtgccagtcctgcgccgccgggacgcagcttaccctgcccacccggcagaaaaagccccgccgccgcaaggaggaaaaaaccgtactgctgctgtgccgcctgggagaggtacagatcacccagcgccccgcagacggcctgctcgcctccctgtgggaattccccacgctgccgggcctgcacacctccgccgaggttgcggagctgctctccgtccccaccgaagccgtgaccccgctgggcccggccacccacatctttacccacattgaatggcagatgcagggctaccgtgtggaactgccgcccaaggccccgctgtggggcggatgcatttccatccccgtggcggagcttttcgcaagctatcccattccctcggcctatgctgcctacttaaagaccctgcggtgacccgctgccgcggcagcgcccccgccaaatttccacagggggctggccacggcgggcggccgcggcgctccgcgccgcaccgggcgcccctgcggggcgcccggcagcccggccaggggccgggcaggccgcccgccggagccaacccctcgtaccaaccatccttccccgtcccaaggaggaccccaccatgtcatcactcacctgcccctattcccggcgctgcggcggctgccagctgcttgccatgagctacgaggaggaattggctcacaagcaggagcttacccgccggcacctctcccgctttgggaaactcctgcccatcctgggggctgcaaacccctgctactaccgcaataaggtggaagccgccttcgggctggaccgctcccggaaggtcattgccggcacctacgagccccgcagccaccgcattgtcgatatcaacagctgcctaaacgaggataaaaccgccaccgccatcatcgtcaccatcaaaaagctgctgccttccttccgcctcgccccctacgatgaggacgcccgcaccggcttcctgcgccatgtattggtgcgccgcggcatccacaccggggaggtcatggtggtgctggtgaccgccagcccggtgttcccctcccggcagaactttcttaaggcgctgctggccgcccacccggagatcaccaccatcgtgcagaatgtgaataaccgccgcaccagcgtgctgctgggcgaccgggaacagacactctacgggcccggcttcatccgggataccctgtgcggtatgagcttccgcatctcaccccggtccttttaccagatcaaccccacccaaaccgaggtgctgtaccgccgcgcgatcaaagccgccggcctgaccggcaaggagcgggtgctggatacctactgcggtatcggcaccattgggatgatcgccgccgcggacgcccgggaggtcatcggggtggagcagaatcccgccgccgtccgggatgccatccgcaacgccaaggaaaacggggtggaaaacatccactttgtggcggcggatgccaccgaatggatgcaggcggccgccgcggaaaagctctccattgatatcctgctgatggacccgccccgcagcggcagcaccccggaattcctctccgccgcggtaaaaatggccccccgccgcatcgtctacatcagctgctgcccggaaacccaagcccgcgacctggccctgctgcaaaagggcggctaccgcgtcaccctcctccagccggtggatatgtttcctcacaccgagcacatcgagacggttgtcttgctttccaagggcgaggtcgactcgaaaaagattcgggttgagttctctttggaagatatggatatgt

SEQ ID NO: 1050 - DNA, 9252 bp, Unknown
  16S sequences of unknown bacteria
ctcacagaaaggtgtcataatgaaaaaaacaagtttcttcgacaagggcgaccttgattttcacctgatacagataaacgtccgggagtcgatcgccgggaagttccgtccgttcggcaggcgcgactcgtgcgagatagtgtacaagatcgacggctgctcaacgcagattttcggaaatacgaagatcgagctcgtgccggactgcatctacttcataccgaaaggctcggtgaactcacagacgatatacgaaaagggaacgataatcctcgcgtcgataaacatcctcggcgacacggacggctcggaatttccgcccgagataatcaacctcgagcccgggaacccgtacaagaagatgttcctcagcgccgaggaggtctggcgacagaagaacccgggatactatctgcacacacacgccatcctctcggaaatcttcgccatgatcgtcgccgaccgcgagaagcagtatatgcagagcggaaaatacgcgatgatcgcccccgccctcgaacacatccgcgcgaatttcagggagaagatattggtgactgacctcgccgcgatgtgcgggatttccgacgagtatctgcgcttcctcttcaagagctgtgtcggtcagacgccgctcgcgtacataacgacgctccgcctcgagagcgcgcgggagatgctgcggaacggattcgtttcggtcgcggaggcggcggaggcgaacggatttgagaacccgggatacttcacgaggctgtacaaaaaacactacaattccctgccgagcaggattgaccagatagaaatagagaaaccattctgtttcctcgaaggagaacaagaaaatgactgaaagaatcaaaagaataaccggacggaccctcgccggagaaatgtacgtgaagccggtacacatcgatttcgacagggaggatctgttccttgacgaatccgcgcgggacgtgaagcgcctgtgtgaattcatactcgcgcaggagccgatgctgaatgaagattccgccttcaccgggttcttcaacttcgacggctcggtcgtcggcgacgcgttccaccgcagcgggcacagagcgaccggagagctgatacgcagcttctacctgaagagcgtcgacaacctctcgacgaacgaatggcagcacgcgacagcggattacagaaaagtactgaaaaagggcatctccggcatacgcgcggagatagccgattcgctgaaaaagcacacagcccccgatgagatctcgttcctgaccggtctcgataaggtcgcggagacgatgatcaggtgggcggagaaatgctccggaaaagcggcggctctcgcggacgtcacgacagaccccgacgcgaaaaaacgcctgacaaagctgtccgacgcgctgaaaaaagtccccgcgaacgctccggagaccttctatgaggcagttctgtgcatttacatctgcttctccgcagacccggacagcttcggaacgctcgacagatatctgactgacttttaccggcgcgacaccgcggcgggaagactgacgcgcgacgaggcggcggagtacttacaggagctgtacctgatggttcaggcggcgacgccgaagagcggcttgttcacccgcggcggcgagtcgcatttctgcatcggcggatatcttccggacgggagcgacggtttcaacgaggtgtcgcggctcataaccgagagccttcttgatcttccgacctacatcccgcagataacgctcagatggacgaaaaagctgtcgcatgaggacttttactggatgatggacatggagcgccgcgacccgcacaagcgcatagcgttcacgaacgatgagaagcgccttgagtgctacgtcggcgtctgcggattcccgtacgagcgcgcggtgaactacacgatggtcggctgcaacgagccggcgtttctgggcgcgataaccggaagcaacagcaagggtaacatcctgaaatgcgttgagacgctgttccacgacagatcggaaagtatcgtcggcgcgaaagacttcgatgagttctaccgcgtgttcgaaaaggtgatgttctccgacctcgaccggatatacgaatacgacgacaagtacaattcggtgcgcgcgagggacgttaactacatctcgagcctcttcttcaacgactgcatagagaacgcaaggagcctgacacgcggcggaggagacgtcgtcatagcgtcgccgatgcttctcgggataacgaacgtgatagactcgctgattgtagtgaagcagttcgtgttcgacgagaaagcgttcacgatggcggagctcgctggagcggtgaaggacaactgggaggggcacgaggatatcctgaacctgataaagaagcgcggcgtcttctacggcaacgacgacgagcgctcgaacatgatcgcgcagagactgtatgacagcttctatgactatctgaaggataagagaaacctgttcggctaccattttctggtcggcgacctgctcgggtacaacgaacaccaccgctggttcggagagaagacgcgcgcgacgccggacggccgtcattcgggcgacctgctgaagttcggcatcggacagagcgagggacgcgaccatgagggtctgacggcgctcctgaactcgatagcgaagaccgaccgccacgcgatagcctgcggctcgacggtaacgaacatctcgatcgatgagaatctcataaagaatgacgcgaactttgaaaagacggtcggcgtcttcgagacttatttcatgaacggcggcactcatttccagctgacctacgtctcaaaggaagatctgctcgacgcgaaggtctgcccggagaagcactcgaacctcagagtgagagtcaccggcttctcggattacttcaacaacctgaaggaaagcatacaggacgacatcatcgcgcgcaccgagcacacgaaataaacagtacaaaaaagcaggcggcgccccgcaacggacgccgctcttgttattcattttcgttcgagttgattcatcgtttcgcttgtatccgcccggaggatttctccctctcttcccgttttgcgtacacgggagcgtctgtcatcagactcagcgctgcctcatcgcgtccttcatactcttcacgtactcgccgacgtgctccggcgcgttcttgccgtacttctcgaggatcttgattatcgcggagccgacgatgacgccgtcagctatctccgacatcttctccgcctgctccggcgtcgagatgccgaagcctatcgccgccggaatgtccgacgcgcgtctgaccgccgtcatcacgtcggtgagatcggtctttatctcgctcctcgttccggttacgccaaggcttgagacgacatacaggaagccctccgcctcccgggctatcatgccgatcctgtcctccgacgtcggcgcgatgagcgatatcaggtcgacgccgtacttatgacatatcggcgcgaactcatccttttcctcatacggaacgtccggaaggatcagcccgtcgatcccgatttcccggcaggtcgagatgaacctctccgagccgtacgagaacacgacgttcgcgtaggtcatgaacacaagcggtatcgtgacgtcgcgcctgagctccctcacgagctcaaagaccttgtcggtcgtcacgccgccgctcagcgcgcggatattcgcgccctgtataaccggtccctccgcggtcgggtcggagaacggaatgccgagctcgatgaggtcggctccgttttttacagccgccctgacagccgccgcggtcgtctcaagatccgggtcgccgcaggttatgaagcctatgaacgccttgccgtcccggaaagcgttttttatcctactcatggatatcctcccctctgtatctcgcgatggcggcgcagtccttgtcgcccctgccggagatcgtcactactattatcttatccttgtccatcgtcggagcgagctttatcgcgtgcgcgacggcgtgcgccgactcgatcgccggaatgatgccctcggttctcgcgaggtactcgaaggcgttcaccgcctcgtcgtcggtcaccggcacatattccgccctgccgatgtcatgcaggtgcgcgtgctccggaccgacgcccggatagtcgagccccgccgagatcgagtagaccggcgcgatctgcccgtactcgtcctgacaaaagtaggatttcatcccgtggaatatcccgagccgcccggtgttgacggtcgccgcggtctcaaaggtgtcgataccgcgcccagccgcctcacaaccgatgagcttcaccgactcgtcggggatgaagtgatagaagctgccgatagcgttcgagccgccgcctacgcaggctatcaccgcgtccgggagccgtccctccttttcgagtatctgcgactttatctccttcgagatgaccgcctgaaaatccctgacaatcgtcgggaacgggtgcggccccatgaccgaaccgaggcagtaatgcgtgtcgtcgatgcgtttcgtccactcgcgcatagcctcggataccgcgtccttgagagtggctgttccgctcgtgaccggaatgacctccgcgccgagaaggcgcatacggtagacgttgagcgcctgacgctcggtgtcctccttacccatgaagacaacgcactccattccgaagagcgccgccgcggtcgcggtcgcgacgccgtgctgtccggctcctgtctcggcgatgaggcgggtcttgcccatcttcttcgctaaaagcgcctgtccgaggacattgtttatcttgtgcgcgccggtgtggttcaggtcctcgcgctttaagtatatcttcgcgccgccgaggtcttttgtcatcttctcagcgtaatacaatctcgacggacgaccggcgtaatcgttgaacagctctgtcagctcgcggttgaattccaggtcattcttgtagtgatcgtaagccttctcgagctcgatcaccgcgttcataagcgtttccggtatgtactgaccgccatgtataccgaaacggcctttcgggttcgtcatttttcagttcctttctgttttctgtcggcgtctttaacagcattcatgaaagccgccatcttttcttcatccttgtgaccgtcggtctcgattccggagctgacgtcgagcgcgaacgggtgaagcgtcataacggcgtctcccgcgttctccggcgtgagccctccggcgagaaaatacggtcttgtcatcatatcggcgaggtaccagtcaacgcgctttccggttcctccggttccagaatcgaggagcaccatgtccgccgcgctcgccccggcacggagtatgtctgtctcgctgtcaatccggaacgcttttataacaggtctgtcgataacttttctgagctcccgtatataagcgtcgtcctctccgccgtgaagctgggcgatatcaatcacgccgtcccgcaggagttcgacgataaatgagatatcggcgttcacgaacaccccgaccgtctttatccgccggtcgagcttttcccttatctcccgcgccctttcgggactcacatatctccggctcttctccgcgaacacgagaccggcaaagtccggattcagcctgttcgccgcgccgatatcctcgtcccttgtcagcccgcagaatttcacctttgtcatatgagtgacctcagctccgcgagcttcgcctttctgtcggacgccctcatgagcgcctcaccgatcagcaccgcgtctacatgggcgtcatacagccgcttcacgtccgcggcgtccgaaacgccgctctccgagacgaagacgatgtcgtccgggacaagacttctcagctttccactgtttccggtgtcgaccgtgaaatccttcagattgcggttgttggcaccgatgacacgcgcccccgcgccgaccgccgccgcgatctccctctcgtcatgtgcctcgacaagcgacgagagcccgagtgaatccgcgacaccgatatactctttcaactgttcagcgtcaagaattgagcagataagcagcaccgccgaggcaccgagcagcttcgcttcatatatcatgtactcatctaccgtgaaatccttcctgagacaaggtatcccgaccgtgtgcgcaatctcttcgagatatttgtcgctcccgaggaaccactccggctctgtcagaaccgagacgcaatccgcgcccgccgcctcgtaatcccgcgctatgtcgagataagggaattccggcgcgatgagccctttcgacggcgacgcgcgcttgcactcgcagataaatgacatcccgggctttttaagcgccttttcgaaaccgaagtcgcctttcggcgtattttccgcgagccgccttatctcctccggcggaattttgcccttcgcggcttcgcaccgcgcctttgccgacgcggcgagcttgtcgagtatcgtcattggctcaccttaatgaagttttcgagcgtttcgagagcctttccggagtcgattatctcaccggcgagctttattccgtccgccatattatcggctttgccgccgatgcagagcgacgctccggcgttcatcagcacggcgtcgcgcttcggtcccctctcgccgccgagtatcgcgcgggttatcgcggcgttctccgccggtgttccgccgacaagctccttcttctcgcagcgggtcagaccgaaatcctccggcgaaattgtgtacgacctgaaccagccgtccttgaactcgcagaccttcgtcggggcgctcatggatatctcgtcgagcttgtcctttccgtaaacgaccataccgcgcctgacacccagatcgatgagcacctgcgcgagcggttcgacgaggtattcgtcgtaaacgccgagcagctgcgtcttcggacttcccgggttcgtcagcggtccgaggatgttgaacacggtgcggaatccgagctcctttcttatcgcgccgacatatttcattgacgtgtggtatttctgagcgaagaagaagcagatgccgaccttgtcaagcagctcgcggcacttgtcggggctctggtcgatgttgacgccgagcgcctcgagacagtcggcggttccgcactttgaggacgccgcacggtttccgtgcttcgcgaccttcataccgcccgccgccgcgacaagggctgaggtcgtcgaaatattgaagctcccggcgttgtcccctccggtgccgacaatctcgaagaggtcatagtcgctctcaaccctcaccgcgtggtcgcgcatcgcggcggcacagccggcgatctccgaggtcgtctccgctctcgcgctctttgtcgaaagcgccgcgagaaacgccgcgttctgagtcggtgtcgtctcaccgctcattatctcgttcatgaccgtatacgcctcatcataggtaagatcctgcttgtttactatcttggctattgcttccctgatcatttttctcttccttatctgtctttttcaaagatttatgaaattttcaagcattctcttcccgtccggggtcattatcgactcggggtggaactgaacgccgtatatcgggtattccttgtgctgtacagccattatctcgttctcgtcggtaagagcggtcacggcaagctcgtccggcatcgtcgccgggtcggctatcagcgagtgatacctcgcgaccttcaccctttcgggcaagcccatgaacagcggggtgtcgttcctcagcgtgacctccgactgctttccgtgcatgagccgcggagcgtatgtcactgtcgcgccgtatgccgcgcagatcgcctgatgcccgagacagacgccgagcgtcggtatcctcttcgcggcagtcttcgcgacctcgacgatcaccccggcgtcctccggtcttccgggaccgggagagaggattatcttctccggcgcgagcgattctatctcatccaccgtcatctcgtcgttccggatgacctttatgtccggttctatctccccgatcagctgatagagattgtatgagaaactgtcgtaattgtcgataagtaatatcacagctcttcctcctgcgcgtatctgagggcgttcacgaccgccttagccttgtttatgcactctatgtattccttctccggcaccgagtcggcgacgattcccgcgccgctcctgacgaatacctttccgttcttcttgtaagcaatgcgtatcgcgatacaggtatccatgttcccggcgaattctatatacccgatggctccgccgtatatgccgcgcttgttgttctcaagctccgctatcagctgacacgcgcgtattttcggcgtgcctgagagagttccggcgggaagcaccgcctcgatggcgtccagcgcgtcgcgatcctcccgtatccttccgaccacggtcgagccgatgtgcatcacgtgcgagaaccgctcgattgtgtgaagtctctcgaccttcaccgagccgaactcactgatctttccgaggtcgtttcgcccgaggtcaacgagcatattgtgctccgcgagctccttttcgtcgcctaaaagctcacgctcgagcgcctcgtcctccgcctgcgtctttcctctcggcctcgtcccggcgagcgggaaggtgtggagcaccccgtcctccagcttcacaagcgtttcgggagaagcccccgcgacttcgacgtccgtccccgaaaaatagaacatatacggcgatggatttatcgtcctgagcatcctgtaggttccgagcagactgccctcaaattcggcgctcagtcggttcgacaggactatctggaatatatcgccctcgcggatatgttccttcgccttctctaccatcttacagtaacgcttctcgtcgaagagcggcgtcacctcgccaaggagccttccgggagcttccttcttctcctcgccgttcacgagaaggtcgcgcatatgctcgatctccatcaccgccttgttgtacccggtcttcgggtcggaaaggttcatgttggcaatgagaattatcttctgcttcgcgctgtcgaaggcgataaccttgtcgaagagcatgaggtcgacatccttgaagttctcggtgtcctcgacctcccgcctgaccgacggctcgcggtaaccgtagtagtcatacgcgaaatacccgacgagacctccggtgaacggcggcagatagtcgagcctcgggctccggtactctctgagaatatcccgc

SEQ ID NO: 1051 - DNA, 32759 bp, Unknown
  16S sequences of unknown bacteria
tggagcgggtgaagggaatcgaaccctcgtattcagcttgggaagctgatgttctaccattgaactacacccgcgtgaactgaacacggatgatcttagcacatccggccgaaaaaatcaagaggggagaaagaaaaaaacgagacggattcgcaaggatgagaagcagccggagcgaaccggcatccgtgtcccgggaactcgcggatatcgggcaattcttaaaaattttccgctgttgtgccgttgacattaaaaattggaacgtgtatactggtatccgttgagcggcgccagcgtaagcccggatatttcgggcctgcgctgtttgtttttctgaaccccccggcgcctgctctaaggtttacagcaaaggagcagacagtatccatgctaagagaactggcaaaatccatccgcgaattcaagcggccgtcgatcctggcgccggtcctggtatcctgcgaggtgatgctcgaatgcatcatcccgtttatcgtggcgcgcctggtcaatcagatcaagggcggctgcagcatcgacgtgattttgtggcacggcctggtgctggtggtgatggcggggctgtccctgacattcggctggctggccggcaccgcctgctccaaggcgtcgagcgggttcgcccgcaacctgcggcgggatctgttcagcaagatacagacctattcgtttgaaaacatcgacaagttctccacttcctctctcgtgacccgcctgaccaccgacgtgaccaacgtgcagatggcctacatgatgatcatccgcaccgcgatccgctgcccgctgatgctggtgttcgcattcgtcatggcgttcgtcatgggcgggcagatggcgttcattttcctgatcgtggcgccgatcctgggcttcggcctgttcgcggtcatccgcaaggtcatgcccctgtttaaaaaggtcttccataaatacgacgtgctgaataattctatccaggaaaatatcaaggggatacgggtggtcaagtcctttgtgcgggaggactatgaaaaagaaaaattctcagccgcggcggaggatgtctgcgccgatttcacgagggcggaaaaaatcctggctatcaacaatccgcttatgcagttctgcctctataccgtcatggtgttcgtgctctccttcggctcttataccatcatcaccagccggggcctcgacctcgacgtggggcagttttcctcccttctgacctacagcttccagatcctcagcagcctgatgatggtttccatggtgtttgtcatgattacgatggcgagcgagtcggccaagcggatcgtggaggtgctgcgggaggaaagcgcgctcgccagccctccggacgctgtcaccgaggtgttggacggttcggtggattttgatcacgtgagcttcaaatatgctgagaaggctgagcggatggcgttgtcggcgatcgacctgcatatccggtcgggggagacgatcggcatcatcggcgggacaggctccgccaaatcctcgctgatccagctcatcccccgtctgtacgacgccaccgaggggacggtccgggttgggggtgtggacgtgcgccggtacgaccttgaggccctgcgcaaccaggttgcggtcgttctccagaaaaatgagctcttctccggtaccatcaaggagaatttgcgctggggtaatccggacgcgaccgacgacgagatggcggaggcctgccgtcttgcacaggcggacgagtttattcggcagttccccgacgggtacgacacccatatcgaacagggtggcagcaacgtgtccggcgggcagaagcagcggctgtgcattgcccgcgcactgctgaagaaacccaagatcctcatcctcgacgactccaccagtgccgtggataccaagactgacgcactcatccggcaggcgttccggtcctacatacccgagaccactaagatcatcattgcgcagcgcacggcctcggtggaagacgccgaccggatcatcgttatggacggcggggcggtccatgcggtcggcactcacgccgagctgctcgaaaccgacgatatctaccgggaagtctatacctcccagaacaaggcgtgtgattcgcatgcggaataagaccgcctccaaaggcacactccggcggctgatgaaaatgctgttcgccttctatccggccgccatgccctttgtcgttgtctgtatcgtgttcagcgccgcggtcagttcgattcccgcagtgttcatgcagagaatcatcgcggtggtggagaccacctggcagagcggcgactggagcgcggcggcgggcccgatcctgtcgagcgtcgggctcctggccgtgttttacgtcctctccctcctgtcggcctttgtcttcagccggatgatggcggtgatcacacagggatttctgaagaaaatgcgggttcgcatgttcagcggcatgcaggacctgcctgtccgttttttcgacacccacaatcacggcgacgtcatgagctattataccaacgacatcgataccctgcgccagatgatctctcagagctttcctcagctgctgatctcggccgtgacggtgctgacgattttcagtatcatgctgtattacagcgtatggctgacccttgtggtggtggcaggcgtcgtcttcatgctgttcgttaccaagaaggtgggcggcaactcggcccgctattttatccggcagcaggtatccatgggtgaagtcgagggctttgtggaagagatgatgaacggccagaaggtcgtgaaggtcttttgccacgagaaagacagcatcgcggctttcgaccgggtcaacgacgagctgttccacaatgcggagcaggcgaacacctatgccaataccctgggccccattctcaataacatcggcaacgtgctgtatgtgctggtggcgctggccggcggcatcctgctgctgaccggggcccccaatctggcgctgtccgggatggccttcagcatcagcatcgccgtcccgttcctcaacatgaccaagcagttcgccggcaacatcaatcaggtgtcccagcaggtcaacgccgtggtcatgggcctggcgggagcgcggcgcattttggatctgatggacgagcggccggaggaggacgaggggtatgtcaccctggtcaacgcccgggaaaaagaaggaaacctggaagaatgcgccgaacgcaccgatctatgggcctggaagcatccccacagcgacggctcggtcacctacacccgcctgacaggggatgtacggctgtatgacgtggatttcggctatacaccggagaaaaccgtcctgcatggcgtcacgctctatgccgaggcgggccagaagatcgcgttcgtcggcgccaccggggcgggtaaaaccaccatcaccaacctcatcaaccggttttacgatatcgccgacggcaagatccggtatgatgggatcaatatcaacaaaatcaaaaaagcagatctgcgccgcagcatgggtatcgtgctgcaggacaccaatttgtttaccggctcggtcatggacaatatccgctacggccggctggatgccacggatgaggaatgtatgaaggccgccgccctggtcggggcccatgacttcattacccgtctgccctccggctaccggacgcccctggccggaaacggcgccaacctttcccagggacagcggcagctcatcgccattgcccgggcggccgtggccgatccgcccgtcatgatcctcgacgaggcgacgagttccatcgatacccggaccgaggccattgtccagcgcggaatggacgccctgatgcagggccggacggtttttgtcatcgcgcacaggctatccaccgtcaaaaacgccgacgtgatcctggtgcttgaacagggacggatcatcgagcggggaagccatgacgacctgttggccgaaaagggaaaatattatcagctgtacaccggtgcctttgagctggagtagaatctgaaaaaacggcgggatacccggtctcttgaggagacgggcatcccgctgttttctgttgcggataagggggagctatatggaagagaagccggttcggacatcgtcccaccaaatgaaaaaacagggcacccggccgggctgtccggcttgtccgtgccctgtgggatacggtcctgagaccgatgagggacgggaaaccgcggatgcccgagcctgcgcagtaaatgcaatcatttgaattgcgggcccttggaacaattttcatttgaaatcatagtatgtatggaaaggaggcagaagccgtgaatcaagaagaattgcaattgtacgaggcatttggatattacgcgacggaggagttgttttggagcctggtctatctcaacaacgcggccttccacaccccactcaaggaagacagcaaaaacaaactcataagcctcaacaaaacatacgcgactatcatttcgggcatctatccaatggataagtgtcatgatctggttacggccatggcaaaccataaccagctgtttgtccagtatgtggaaacgctcatgcagggcgacagccagaccaatgtcatccggcaaaaatggaaggagaacggcctgaaaatcgccaatatcctcaatcgcatgaatccctactggaaggtggcggaatggtcggccatgatcgggcatgaagccgatttgctggaatcgatcgccacgagcctgaaaataaaaaattacacgacatttgtcaatatcgtgccaatctgccatcggttagctgtcgacatgtgccaatatatgtgtacgggtatcgcgaaccagggacagcgtacatagtgggaaatatccatgcgggccggccagccatgagttggccggcttttgccatgcatatcgctgcggtaaatcacagaggatcgcctccggtttaacacaaatctaattgacaaaaacttttgggaatgcgatactggatttggaaaaaactatcggcaggagggatgcgcatgtccacacaggaaaccgcacggaaacgttcgaaagatccgtcgcgccgcttcaccaagccggaaaaaagctggatactgtacgactgggccaattccgtctacgccaccaacatgatggccgccatcttcccgatttattatgccaacatcgccggggatgccggagacaaatggtggggcatcggtgtatccgccgcctccctgatcattgccgtgctgtcgccgattttcggttctatcggcgatttcaaggggatgaaaaagaagcttctcggcgcctgtctcctgctcggcctcgtctttacggcggtgacagcctttacgggggattggaagctgatgctcgttgggtatgtcgtctcccacatcggcttttccggggccaacgtgttttacgattccttcctgaccgacgtgacgacgagggaccggatggaccgcgtctcctcctggggctacgcgatgggatacctcgggggcagcaccattccctttgtcatctcgatcgtgttcctgctgctgacggatttcagcgtcacggcggtgaaattttccatcctgctgacctgcgtgtggtgggcggtgttttccatcccgctgttaaaaaacgtcaagcagacgtattatgtggagacgccgccgtccaggctggcgtcggccgccatgcacaatctgtggcgcaccatgaaggacatcgcccgggacaaagggctgctgctctatctggtcgcctatttcttctacatcgacggggtcgggacagtcatcaacctggccaccaattacggcgcgacgctgggcctcggctcgaccgggatgatcctggcgctgctcgtgactcaactggtcgcggtgccgttttccatcttgttcagccgtctggcctccagggtgggggcgctgcggatgatcgccgccgccattggggtgtatgtcgttatctgcggcgtgggcttcttcatggggctcaatgtggagccgtatcagatggaatacacggatgccgtggacagcgccgcgggcgagacggcggaagccgccgcgctatcggaccgggaccgcaaggcctttgaagccgtggttaacgacatcaaggaaaacggcaagaacgccctgtccgccgaggatcgtcccgcggccttctggtcggagggggaggacggcccctccggggtattcggggacgtgctggcaagcctgaacgatcaggatgggacatatgccttttcctccgcggatgcccgggagtgggcggccggggaggtgacgcggatgcaggcccagctcgcccccttcattgcggacggcggcaagcaggatgcctatgcgtctgcgctccggctgtccagcctgctgttctgggtcctcgccttcctggtggggacggtacagggggggatccaggcgctgtcccgctcgtatttcggcaagctggtgccgcctgaacgctccaatgagtatttcgggttctacgacatcttcggcaaattcgcctcggtgatcgggccgatgctgtattccctgttctatatggtgaccggccgggcgtcgatcggcatcatcagcttgctggtcctgttcggcgtgggcggcgtcctgctgctggcgggacggaagcacctgccggacgaccgtgccccggaaaacgccgcctgaacaccgatgcgatgcacgtaagacgtgggggagggccgatgatgacgcccatcgttctattcgatctttacgataccctgctcagggaacggtcctttgattttggccgggggctggatatgctgtatgagaccggattccacaccgtctgttcccgggaggaactcgccgcgtacgcggccgcctttctcccggcttatgaggccagaaaaaccggccatacggagatagccttcatccaaaaggactatcccgcctattgccgccgtttcgggttccggctgccccttccggacgaagaggtggaatatgcggtgctctcccgtatggaggaggtggagccggaggatggggtggaggacgcgctgggggttttggccggccggggagtccggatgtacgtgctgaccaacagcatatttctcgccccctctcaggagcgcctgctgcgggagcacgggatcgcccgcttttttgaggcggtgtttgccagcgccgacatcggccggcgcaagcccgcgcgggcgtttttcgagtatgggatcggacgggtgctgcgggacaatcccggagcctcccggagggatctcgtgtttgtcgggaacgatctcgccgccgatatccggggcggcctcgcggtgggactgagaaccgtgtggtacaacgtggcggggcggcccgcgccccccagccttcccgccgcggtgattcggtcgatgcgggagctgcccggcatcctataggagcaacccccgggcctttggcccgggggttttgtacccgtatttggaaaaccggtgcgccttacttgcagccgcagccgcagctcttgtcgtcgaccttgggcgggaagaactcgtccacggggaagcacatcttcttgaacaggtcgcaggggttgtcgctcgtcgggcagcactccttggagggcatgcagaaatcgtacaccggcatgagcatctggacgttgcgcacgagctgtacgatggtgaagatcccgatggtcacgaggacgagcttgccgtcccgtccgtcgcagaaatggccgccgtaccgttcgcagatgcagtcggggatgttgcagcagctgcagcagcagtcgcacttgcagccgcagtcgcacgcgtccaccacacgggcggacaggatgatggggtcggcgatctggacgcagcagcgcggcatgttgcgggcgggcatttcctgctggtcgtgctggttggggacgaactcgctgcagaagaccttgacgttgccttcactgccgtacaggatgacctttttctggaagacggagacgccgcacacgatggtgcaggggacgccatgaccggaatagacctcgagctggatctcgaagaagaaggtcaggtcgcaggaatagtacccgcggttgaaaggcagggcttcgacgtcgatgtaggtggtgatgacctccgcttttttggcgcggacactgaccgcgtgatcgatgaccatctgatcccgctcggtaaagtaaacctgcaggtcctccagacagtctttgtcggagcaggaatcgtaaacgcgtccggcgtcgacgcatacggcttccttgcagccggcatcatggatgtacttgttatcaggcataagaaatcctcctgttcgttgataggggaaccctggccgtccggcggttacccttcattgtcatcatatgaatcggggataaaagggtgacgccgattcgcggcccaagggccaaaacaggggaaaaaagaacagaaaaacaggcgttgtccatcctttccggacaacgcctgtctgccgcccgcctcctctatggcggtgaagtcaacatgtcggctgtgtcgacatgctgctgggggaataccgaatcgcggcggcacgctgccgcccgcctggcgttctgtccccgccgactcctgataaagtgtgttttcgaggcgtctgccctcgaaaacatggatcgcaaacccaccacgggtttccgtgcagccgtggttttatgtggaggccggtaccggatcggacggaggcgccgcccgatcctccttccggtaaaggagcttgagggctaccggggtgacgatggaggaaaccataatcaacaaaatcacggcggtgaagtagaccggcgggatcaggccgacggcgaggcccttttgcgccacgatgagcgcgacctcgccgcgggtcatcatgccgacacccaccttcagggaatccgtccaggagaagcggcaggctctggcggccaggccgcagccgacgattttggtcccgagcgcgacgagcacgaacaggatgctgaaaaccagcatggaggcgtcgaccccgtggatttcggttttcagcccgatactcgcgaagaagatgggactgaagagcatataggagctgacgtcgatcttgcgcgcgatgtaatccgaatcgcggatgttgcagaaaatgatgccggcgacataggccccggtgatatcggcgatcccgaaaaagtgctccgccgcaaaggcgaacagcaggcagacggcgaaaccgaagatcggaatgcggcggcgctgcgggtagcgtttgtcgaaccatttgaacagccagtagagcaggatgccggctcccgccgccgccagaaaaaagaggccggtgttgagcacgacggtcagcggccggacggccgggttcttaaagccgatgacgaaggtgagcagcaggatgccgagcacgtcgtcgatgatcgcggcactgagaatggtggtgcccaccttgcccttgagcttgcccatttcccggagagtttccaccgtgatgctcaccgaggtggcggtgatgatggtgccgatgaacaccgcctcgaagaaggcgtccgagccgacggggctgaagccgtacaggcaggagtagagcagaaatcccccggcgagagggaccacgacgcccatcgccgcgacgaacagggcgaccggcccggtccgcttcatttccttgagatcggtttccagccccgcgacgaacatgagcatgatgacgccgagctccgccatctgagagaggaaatcgctcgaatcgaccaggtgcaggacgttcgggccgatcagcaggccagcgacaatttcaccgacaacctgggggatatggattttgcgcaccagcagtccaaaggatttggcggcgatgatgatcacggccagatccaggaaaaaatcgatattcaacgacggggccctctttctttcatggggatcttgcattcacaatttcttcatatttatcgtaagccccatatggaagaaaatcaagggaaatttcggcctaatttttatcaccatccagccgtttttttgtggtgtcttttgcgggattcaggccgtatggctgctgcgtatggcctggagctcccgatcgttttggcgttcccacaccgattgcctgcggaaagccgacatggacatccgcttctccttctgaaagaaccgggcaaggttctgggcgctggaaaagccgacccgcacggcgatctctttcatctgcagttcggtgaaacggagatagaagcagacctttttcagccgcagctccttgacatattgataataggtcatgcccttataggcctggaaccagcgttccacctgttttttgtaagtgcggaaatgctggcagaccgcctcgagcgtgagatcaccgtcgagatgggactcgatatactccagcactttctgcaattcctcgcgttcctgctgcggccggcgctgcatctgcatctcgggcgtctgcatgccgtattcgtaatactgattttccagcatccggatgatatccatgaaataggagcgggtccggcaggaccaataccagtcggcgcggttggcaatttcgtacgcgcagctgcgggcgcagcgtatgagcaggcgcatcatatcctcactgacggagatgcggttgcacgtcaagtcgtctgaaaggaaggggcgcagctgaaagaacgaatgcttctcggccagggattggaaatgcgggtgccggagggtttcgagggtgaagctccggttgagaaaggcgggacggaacagcagcacgaggccttcgcaatgaatcatcctggtgcaggtcagacggcgccgctcatgcaggcagagcacgcacggcgcgttcatctccatcggttcgccgtccaacagcgcggtcagctttccccgcgagaggatcaggagccggaaaagccggtgcggctccacggcttgatccgccctttcgatgggcaggaccgtcaaatggtcggacgtgggccatgtcggtatcggtgtggtcgtagtcatgatgattttccccctgtgcgttgtttccggacgggttccccatagccgttcggatgtcgtgtttggaaacgtttttgatacggatggaaaccaatgcatccgtggttttcggtaaaatagacctgcgttcaacaaaataaccaaattttctcaaatctgtttcgggattggaagtgaaaaggttgaaaactcagacaccccgccgcctaaaacgggtttgggactttgcaaaaccatatacacccctgtttctgctggcagagctctgtatcctcgtcacctatgcggtgtcgttgtttctgccccagaatctgctgaggctgaccgaccaggtgctcatcggcggtgagcacggccttctcccggagatcatccggaattatgcggtcctgttcctgacggcgatcgttttcaacctgatctatgcgtatacgtggcagacgctgcagaaccgctatgtcgtcgatgtgaagaacgccgtgtttgaaagggctgtccggtcgagggcgtctttcctcacccatatgaacagcggcgacatcatgagccgcatcgacggggacagcgagcagttcctgcacgtcatccagcgcaacctgttccatttcgtcaattcgatcctgctgtgtgccggcgtcgtcgtcatggtggccaggatcaatctggtgatcgcgggaatgctgattgtcgcggccgcgctgccgatcgtcatgacccggttgtgcggccgtctgaccgagcggtatgcccgggacaggcgggaggtcaccggcgcctttaccggccgcctgttcgagatcctgaaaggtttccgggagatccggctcctgtgcgcggagcgctgggcctccagccaggttttggcgccgctgcgccggctgattactctggggaaccgtacccgctgggtggattttctggtcggcagaggcatctatctggtcaatttgatcgcctccctggtcatttacggatacgcggcgtggcggatttatcgtggggagatgtcggtcgggcaatttctggcggtcatcgattatgtcgcgctgatgcacaagaaattcaattggatgctgcggatctatctcgactggttttcgcgccgggtcagcctggaccgggtaagcgaggtgctggacaccgaggaggagcctgccggaggacgggcccttccggttgtggaagaggtgacgttcgagcatgtgacctttggttatgaggagaaacccgtgctgtacgacgtctccttctccattcggaaaggggacaaggtggcggtcgtcggggcgagcggggccggcaagacgaccatcatggacctgttcctgcggctgtatgacccatggtcgggttctgtgcggatcaacggggaggaggccggagccttttccctggcggatctgcgcagccggatcggggtggtcagccaggatatccgcctgtttgaaggaagcgtgagggaaaacctgctgctcggacggcaggggaccgatgaggagctgtgggaagccctgcgccgggtgggccttgacgagctgatccgcagcttgccggcggggctcgacgaacggatcggcgggaacacccgcgggctgtccgggggacagcagcagcgcctgatgatcgcacgcctgctgctgcgccgcgtctcgctgatcctgctcgacgaagcgacctccgcgctggatgtggacatggaggagcaggtcgcggaggagctgatgcacctggacgaagacatcacggtggtggtcgtttcccaccgtttctcggccatccgtggctgcggaaaggtcattgtgataaacggaggggagatcgaggcggtgggctcccacgaggaaatgcgggcgaagtcggtcacctaccgccgtctgttcgggaaggagggggcggcatgagacttggccgttgggagattttccgccgaattaagccctatgcccgggaatcccggtggctgattgtcgtcatgctcctgtgcagcgcggcggcggtcccggtttccctggtcaatccggtgttctttcagatccttatcgacgacgtgatgcgggagcgccagatcgcggtgttttaccaggtggtcgtggggctgctggcggtgtatctctgccgcctgctgctgggagccgtggagctgggggtgagcaaccgcctgcttaaccgtttcaccctgtcgctccgcacggatatctggaatacctacaagcggctgcccctggctacttttgagaaagagaagccgggcaactggaaaatgcggctgatagacgatgtcgacggcctcggcagcttcatcaaggatcaggtggtcgattacctgttcagcctggttacggtggccgttaccctggtgctcacgctgcggatgagtccgctgatgaccctgctctgctgtctgaccatcccgctcgtcttccttctcaacgcctggatcgggcggggaacgggcaaggtcaacgaggatatccggggggtcagccaaaactacacctcctttacgcacgacgcgctgcaatactggaaggaaatcaaaatacagaatgccgaggacacctttatcggccgttaccgggcataccgcaagcgcctggcggagctgggataccgctggatccggtactggctgtacgcggagatattcaacgatttcaaggcaaactacctgaccaaggtgctcgtgtacatcatcgggtcgtttttcgtcatccgcggccggatcacggtcgggcagctcatcctgttcggagagtacttctccatgctgttttcctccctggacgcggtcagcagccgaaacgcgcagctgcggaccaacgccccgtattacagccgggtatttgaaaccctctccctggcccgggaagcggacggcgaaaatgaacggcctctgctgggcgaggtcgaggccgcggatatccgctacggctacacgccggaggagccggttttgcaggacgtgtccctgcggttggagccgggcggctacaccgccctggtcgggcacagcggctgcggcaaaacgacccttgccaagttgctgctgctcctttaccatccggacgcgggttccatccgctacgacgggcgggaggcttccgagctgcgccgccgcgtgctgtaccggcataccggcatggtgatgcaggacagctacctgttcaacatgagcatccgggaaaatctcctcatcgccagggaggacgccactgaagcagagctgctcgacgcctgcgggaaggcgagcatccgggagtttgtggagggccttccgaaggggctggacaccgagatcggggaacggggcgtccgcctgtcgggcgggcagcggcagcgcttggctatcgcccgtgcgctccttcgtgagccgcgcctgctgctgttcgacgaagccaccagctccctggacaaaatgtcggaggaccgggtcaacgaagccgtccgggaagccgcggggcaggccacgttgctggtgatttcccataagccgtccgctgtcctgcgggccgagcggatcgtggtcatggatgacgggcgggtcatcgacgcgggaacgcacgacgaactgcgtgcgcgcaacagcttttaccgcaaactggcaaaggacgaaggaggaattggatgaggcgggagaacgcatacatactggagctctgccgttttcaggacgcggatccggaaaggctccgggattggatggcgcagggcctggattatccctacatattaggccacctccttttcaaccggatggggggagcggcgtaccacacccttcagaatgccggcctccttccctcggtcaaccgggaattccgcggcgcgctggaggcggtctatgagcagaaccggctgcgcaccggcagttaccgccgccttctcggccagcttggagggatgctccgggacgcgccgtttccatacgccctcctcaagggcgggctgctggtcagccggtatccggacgggctgcgcacctcaaacgacatggacatcctcattcaggcacgggacattcccgccctgtccgaccggctgcgggaaagcggcttcgagcagggggttctgcgtgccggccggttccgtccggcgacccggcaggagatcatctcttcccggatgaaccggggcgaaacggtgccgtttgtccggaaagtggatctgccggggatgccttactgggagatcgacatcaatttcaccctcgattatcaggcccgggacagcggcgccgtggagcggctgctcgaggggaggcaggcgcggatcgagacggcggaagcgccgctttataccctggcgccggccgatttcctgctgcatctgtgcgctcatctctataaggaggccagcatctacaactgggtggagatgggccgggatttgtcgctttacaaattcagcgacctctatctgctgctgagagaggacctggacgaggctctcgccgcggaggtcctggaacgggcggaggcctgcggcctcaaaggggagtgtgccttttccttctatcacacccgcgcgttcttttccatgcgccatccggtcctggacgggctcctcgagggcctgaagccgtgggatatggaacggctgggcgagatctatcgcccgtccgacgggagggtgttccgccatgggatgccgtttgacgagtggatgttctgcggcgtccgaaaggagaagctgtatgaagctgcaaatgcgaccgcatgagactcccggccttctgatcaccttctgcgggctggacggctgtgggaaaaccaccctcatccgcaggttgacgcggtatctggaagagctggaggtgccggccttcctgaccaagcagcccaccgacgcggtgcggcagtcggagattttccgcacgtatatggacacgccggcccacgatgcctacgattaccgggcgctgtccctctactgcgcgagcgaccgggtacagcattccaaccgggtgatccgcccccgcctcgagcggggggaaaccgtggtcagcgaccggtatttttattcctgcctggccaatctgagagccaggggctatgagcaggaccgctggatttacgagatatctgccagcatcccgaagccggatctcgcctttttcctggatgtagatgtggataccgccatccggagggtgcggtcccgcgcgagtgaacgggaccggtatatcgacgtgccgctgcagcaccgcctgcggcgggaataccgggaaatcgccgccgagaacggggggatcccgatccccactgatcgcggggaagaggagagctttgaccgggtcaaagaggcggtggccggggtgctgcggtatgtttgaggggctgtacggtttgtcctgcgtggaaaaccaggtgctggcgttcctgcggcagcaggaggtcgatgtggcgccgctgtactataacagcgccgtcccgctcaaggagctctttttcttcatggtcatccaggggatgagcccagtccgcttcgaccgggtggggcggatccaggatgatctgcgcgccagggggatgctggccttcgaaaaacgggagcaggagctatccgcctggctcgagacgttgtcggaacagacggagcgggaggctgtcttgatcctggtcaccccggaattcaccaaaagcgtcctgatggcgcggggcttccgggacgaccattatgtccggctgctccccgagggggaggggtgggccgtcttcaacgatatcccggacaaatcggtgatgctgaccggtaccgagctgcgggaggcgtatgcgggaagtggatttcacctgtgcttgcgccgtgggttggacagggaggaacgccggcggttttggaacggccgcatcttcaaaccggaaaatcacgtggatttctggttctatgaacaggatctcgacgggatccccgacgtcggcagacggctgcgggacatgatcgggatttataagcagctgcgttaccggatcgcggcttattacgaggactacgggttggacatggcgttcatgcggaagatggaacccgaaatggaacgcatctatgcgttgtcggagtattatcatctcaaacgcacggttccgccctcacagttttatacccttctgcaagaaatcgcccggatggacaacaggctcatggcggaactgcggagccgattaggaggatgaagatggataaggtagaacaacaggtcaacgacgtactgcggcggtactgttggtgcgactccccggaaagggagcagcggctcaaggacgatttgggaatcgacagcctgcggctggtggaggtgctcgtggcgctggaggaggaattcggcgtcaccctgaaggaggcggatctggatcccgaggcgattcaaacggtgggcgatgtctacgcactcatggagaaataccggttatctcctgcctgaccggccgggatatacgctggggctgcggtgaggataaaggaggatttgaagatgacgctgtatacctatctgcgcgagcgggccagggaacatccgaacaggatcgtgcgggatgaaacgcggtccatgaccttcagtaagctgtttgaggaggcggaagaaatcggcaggacgctgtcgggccgtctgtacggcatcctctgccgctcggatatggacacagccctcctgctgctggcctgcctgtcggcgggcaagaccgccgtaccgctgtcaccgcgatacggcagggcccatgtggaaaagatccgacgggcggcggggctctcctgcatcctgaccgagcagggaccgctcacggtagggattccgtcgcctgaggaagagacgctggaggggatacggatgatcctttatacatccgggacgacgggcgtgcccaagggggccatgctggccgacgacgggctgctcgtgaacctgctcgcggtggaggggtatttcgatatccggggccagatccggatcgcccggccgctgtaccattgcgccgtcctcatgggggaattcttcctctccctggtcaaaggggtggatatcgtgtttgacggcggcgatttccagccgctgcgcctgctcgacgcgatagaggaggacgggacgacggtgctgtgcggcacaccaacccttttctatctgctgtgcggggcggcgcgccgccgcggccgggtgctgccgctgcatagcgcggccgtcagcggggaatgcatgacgccgagcgtggccgtacggatgcgcgaggccatgcccgaaaccgcgatataccatgtgtacggcttgaccgaggccgggccgcgggtcagctatctgccacccgagctgttcgacaaagcgcccggctcggtcgggacgccccttccctgttgggaatataccattgaggatggggagctgttcctgctgggagaaagccggatgaagggatattaccgctgcccggatgaaaccaggcgggcgctttgcggtggctggctgcacaccggcgacatagccgataccgacgccgacggccgcctgtatatccgttcgcgccgcgacgacctgattatacgggccggcatcaacgtatatccgcaggaaatcgagaacgccttgcgcgaggaggacggcatcgtggacgtgatggcctatgggaaacgcgatgaggtggtagggcagcgcatccacctggaagcagtggccccaggcatgacgagacgggagctatgggaactttgccggaagacactgtccccctaccaatatccggacgattttgagatcgtggaccgcctgccgcgaaacgcttcgggcaagctgctgcgcaacaggggtgagagacagggatgaacatcgaagctcaggtgcgcaggctgctcggcgagaccgtcgggccttatgattgggagaatgtgccggcggatgaggacctgcgccgcgacggcatgaacagcttaaactgtatcagcttggtcgtggcgatcgaagaggccttcggtatcgaggtcccccctgagaggctggggctccggtatgtcggcaccatcggggacatctgcggcctgatccggaatatccagcagggaacacttcggccggaataggcggaaatttgtcaaaatttccacttttttctgtgaaattatatcacataattttctggaaaacaagagggattcgaccaaatattttccattaaaacagcgtataaaatccaaatttaatgggaaaagcataaaaaaatagtcaaaaaccagaaaaatggttttgaattcggttaggcatattcacattatttatataacagggactggatccggtgtagatcccgaaaagccgcttttcctttcaatagaaggcggcttttttcctcgttctaaaaatttgatccatcggatttttctatttttataatgtgataaaaattcactctatttggtgtgggtttttctggagaatgccgccagacgccggccgatggaagcgaattccgattttgttcacgtattttccacggaatgtgctatactggataccgtcaccaaatagcatcagattaggaaaagggagcgggcgaggcatgatggaattcaaccgggagaccatgtttcatattgggctgacaccagcgcagggggcggcgtatgccatcgtcaccggtgacccgggacgggtggagtccattgcccggaggatggagggcgcctgctttgaagcgcagaaccgcgagtataccacctggtcgggccggatcgggagcgaacgggtgctcgtgacctcccatgggatcggcgggccgtccaccgccatctgtgtagaagagcttgcgcgctgcggagtgaaaaccctgatccgggtgggtacctgcggcggcatggccctgtccgtgcagggcggggatgtggtggtagccacgggggccatccggatggaggggacctcccgggaatatctgccggtggaattccccgccgtggccgattttgaggtgacgggtgcgctcgccgccgcggctggaaaatgggacagggcagtccatatcggcgtggtgcagagcaaggattcgttttacggccagcacagcccggaagagtcgccggtggcctgtcagctccagaccgcctggcaggcgtggctcaagggcgggtgtctggcctcggagatggagacggccgccctgtataccgtcgcggcggcaagagggctgcgggcgggttgtgtgctccaggtcatctggaatcaggaacgggaaaaggcggggctgccgaacccgcgcgcggccgaaaccgacgcggcggcggggatcgcggtcgaggcgcttgcccgtctgatgaaatagggtcatacgcacagttttgggagttgcggggagctggaagcttgtgctataataaatcgttatgttgagaggggggacgcgcttgatcgtactggggatcgatccgggctacgccattgtgggctggggtgtggtccggtatgagcggggacggttcgctcccctggattacggcgcggtgctcaccccggcgggaatggacttttcccgccggctcgagatcatatatgatgaactgctcgccctcatcgaccgggcgaagcccgacgccctggcggtggagaagctgtatttcaaaaacaaccagaagacggctatcgatgtggcccaggccagaggggtgatcctgctggcggcgaaaaagcggggcgtgccgttgtatgagtataccccgttgcaggtcaagagtgcggttacgggctatggccaggcggaaaagccccaggtgatggagatgacccggcggcttctcgggctgcgggaggtcccgaaacccgacgataccgccgatgccctggctatcgccatctgccacgggcagatggggggcacggccctcaagcgcagcatcgtcgccgggcggcggacatgatggaggaaaaaggagccaggatatgtattacagtgtaaggggcgacctcatccacgcggatcccaaaatggcggtcatcgaatgcggcggggtgggctataagtgccatattaccatgaacaccgcccggcagctcccgcccgtggggcaggaagcaatgctgtataccgtgctgaacgtccgggaagacgcactcgagctgttcgggtttgccagccagggggaactcacttgtttcaagcagctgaccgccgtgtctggcgtggggcccaaggtggggttggccatcctttccgagctgtcccccgaacgggtggccctggcggtggcggcgggggatttcaaatccctgaccaaggcccagggggtgggcgccaagctggcccagcggatcgtactggaaatgaaggataaagtgggggctctggcgccttccggcgggatggagctgccggaggcaggtgtgccgggcggtgtgagcgcggcgggaaacgccgctgaagcggccgccgccctgacggtgctggggttcacccccggggaagccgccgccgccgtggggcggctggacagcgccctgccggtggagacgctggtgcgggaagcccttaagacgctggggaaacgctgagatggataggattcactgtccggcctgcggagagcccatgaggcggggctgtctggatgctgccggtcagcggctgctctggtatgagcagacggacgaggaaccgcccacacggtgggaacgcctgaaaatgaagccggcgctatatattggaaactgggaaccaccgttcggcggggtgctgcagccggatgtctggtactgtgaaagctgcaatctcatgctgtttcgtccttgtaacagccggagaccccggtgaggaggatcgcctgacatggaaatggattacgaaaaccgtatggtcgcggcggaatacctgccggaggacgaaggggacaatccccttcgcccccgcaccctgaccgaatatatcgggcaggagaaggtcaaggggaacctgtcggttttcatcgacgcggccaagctgcggggggaggcgctcgatcacgtgctgctgtacggcccccccggcctgggcaagaccaccctggccgccatcatcgcgaacgagctgggggtcaatttccggattacctcgggccccgcactggaacgggcgggggatctggcagccctgctgaccaacctcgaccagggcgacgtgctcttcatcgacgaggtgcaccgtctgccccggacggtggaggaaatcctctatcccgcgatggaggatttctccatcgacatcatcaacggcaaagggcagggcgcggcgtcgatccatctgcccctgccccggtttaccctgatcggggccaccacccgggccggtcagctctccgcgccgctgcgggaccggttcggggtgatcctgcgcctggagctttatactccggaggagctggggcggatcgtggagcgcagcgccaagatcctcgacatcccctgtgaccgggacggcgctctcgagatcgcctcgcggtcccgcggcaccccccggatcgccaaccggctgctcaaacgggtgagggatttcgcgcaggtgatcagcgacggcaacatcagcgagaccgcagcccggcaggccctcgaccgtctggaggtcgacgagctgggcctggatatggtggaccgccggatgctgctggccatgattaagcattataacggcgggccggtggggctggacaccctggcggcggtcattggggaggaggcggtgaccatcgaggacgtgtatgaaccctatctgatgcagatcggcttcatcaaccgcaccccgaggggacgggtggtgctccccgccgcctatgcccatctggggctgtccgccccggggcagggcctgcccgagcagatgaacctgctggagtaaccgtctgccgtgcagccttctatgcggtaagggggattgtatgaaaaaggccaatcggaaaacatggggctggattgtcgcggcggcgggagtcctggtgctgggcggctgcgcctgcggcctgatccggagcctgcgtcccggcctgcctgcggcggcgcccttcaccctgccggaggaggactgggtcgagtggcaggagggaggcggtaccccggtggtgctcaagagcgccatccgctggaacgacaccctttactacgcccttcccggagatcgccggacggtggttctggaagagccgctggcccgggtggatcagggcctgccgtggttcgaggacttgttttttcgggaatacctgcagcgggtggggtacgatgacaagggcgagttcctgtaccgggggatcgcccatggctcccttctctacgccacccgggaggccgccgaacggatttcctcgcccaagcagacgctgaccggcctgtatatcggttacgaagcggacgcgcggatcaccgatccggcggacatggaaactttgcggcggctcgagaccatacagggaaagaccgtccggtacaaaaccgagagcagcgccgcgtattcgtattcgatctcatatatgtacaatgatctgccgctgctccactgggaagcgaccatcgcccggatcgacgggcaattcgtgtatgtgaaaagcccctggacggcggtccggtatggagagctggcctcgccgtcgcccgcggcggcatcgaaggactatagcgagggcgtcgccatcgcggatccggagacggtccgggcgctgctggatatccgggtggacggggaacccgttttcgccctggagggatggcagggcaccgccctttgagcgtaacatccgcctgttgtgggacgggccggattttacatatactatagagcacataccgtatcttttgtgggaaagaaggagtcaagtgtatgggaagactgtttggaacggatggcgcgcggggcgtggccaataccgagctcagctgtgagaccgccatggccatcggccgggcggcggcgatggtgctcgccgaggcggagcatcacaagccgaaggtggtcatcggcaaggatacccgtatttcctccgatatgctggaggcggcgctggtggcgggcttttgctcggtgggggccgatgtgcttctgctgggtgtgctgcctaccccggcggtagcctatctggtcaaggcttacggcgcggacgcgggtgtgatgatctccgcctcccacaatccctgcgaatacaacgggatcaagattttcaacagcgagggctacaagctctccgacgccctggaggaggagatcgaggctatcgtccttgacggggccaaaaccccgccctgcccgaccggcggggacatcggccgggtgtcctcctgcaagaacgcggtggacgattatgtccggcacctgctgtccgtcaccgatgtcgacctgcgggggatgcggctggcggtggactgtgccaacggctcggccagtgccacggcccgcaagctcttctccgccctgggggccgactgcgtcttcctgagcgaccagcccgacggggtcaatatcaatgaaaactgcggctccacccatatcgagcagctggccgactttgtcaaaaagctcaaatatttcgccggcgttgcctttgacggggacgccgaccgctgcctggccgtggacgaaaagggcaacctcatcgacggggacaagatcatcgccgccctggcggtggatatgaaggacaagggcgagctccccggggacgcggcggtggtcaccgtcatgtccaacctcgggtttttccgtttctgcgagcagaacggtatttcgccggtgtccaccaaggtcggggaccggtacgtattggaggaaatggtgaagaacggctacgccatcggcggcgagcagtcggggcatatcatcttcctccggcacgccaccaccggggacggccagctctccgccgtcaagctgctctccatgtgtcgcgaacgggggcagaagctctcccgcatcggctccatgatggagcggtatccccaggtgctcatcaacgtgcgggccgacgcggagcagaaggcccgctataccgccgacaccgccctggcggaggaaatccgccgggccggggaatcccttggccgggacggccgggttctggtgcgggtctccggcactgaacccctcatccgcgtgatggtggagggaaaagattttgaagagatcaaccgcctcgccgtcgaggtgggggagaagatcaaggcgggcatcggcgcgtagggaaccctgccggaccgcccaaacgggaaggaaacgacatccatgagggccgctgtacactggaaagattacgaactgctggatgcctcgtccggggaacggctggagcggtggggggagatcctcctcatccgccccgacccgcagatcctgtgggataccccccggaccgacccgctctggcaaaaagctcatgcccgttatcaccgctcggggacgggcggcggccattgggaacggctgcgcccgctgcccgacgtgtgggagatcggatacgacgctccggagttgggtcttgcggggttgcggttccgtctcaaacccatgggcttcaagcataccggcctgttccctgaacaggccgtcaactgggagcggatggccgtcctcatccggggagccggccggccggtcagggtgcttaacctgttcgggtataccggcggcgccaccctcgcctgtgccgcggccggggcgagcgtgacccatgtagacgcctccaaggggatggtcgcctggggccgggaaaacgccgcgttatcggggcttgcggataaacccatccgctggctcgtcgacgattgcggcaagtttgtcgccagagaacagcggcgggggaacacctacgacgggatcgtcatggatccgccctcctatggccggggccccggcggcgaggtctggaagcttgaggagcagatcgacggcctgatcgcgcagtgcgccgccctgctgtcggacaatccattgtttttcgctgtcaattcctacaccgccggcctgtcgccgtcggttatgacctatatgctaaatacccgcctgcttccgcgtttcggcgggggaacacaggcggacgagattggcctgccggtgatgtgcggaggcttttctcccccacgggtgctgccctgcggggccacggcgctgtggctttccgccggtgcatcggacaagccggatgaaggaggtgaggggcatggatatgcttcaggcggcagacgtgtattttcagtatgagtatccggacgagccgccccagaaggtgctcgaggggatcgatctaacggtcgaaaagggttctttcgtcgccctgctcgggcacaacggctgcggaaaatcgaccctcgccaaacatttcaatgccatgctgctgcctacgggcggcaccgtgctggtccgggggatcgataccacggacgaagagaagaagtatgagatccgcagcacggtggggatggtgctgcaaaacccggataatcagctcgtctccaccatcgtggaagaggacgtggccttcggccccgaaaacctcggcgtcccgccggaggagatccgccgccgggtggacgacgccctcaaggcggtggggatgtacgaataccgggagcacgcgccccacaagctgtcgggcggccagaaacagcgggttgccatcgcgggtgtcatcgccatgcagccggaatgcatcgtcctcgacgagccgacggccatgctggatccccagggccgccgggaggtcatgcagaccatccgggcgctcaaccgggaacgcggtatcaccgtggtgctcatcacccattatatggacgaggccgtgcaggccgaccgggtggtggtgatggacgagggacggatccttatggacggcacgccccgtgaggtgttctcccgtgtggacgatctccgcagggtcgagctggatgttcctcagcccaccgagctctgcgccgcgctcaaggcggacgggctgcccctgcccgacggggtgctcagcgtggacgaatgcgtagaggccctgtcgatgctgttcgatctccggccgtcctgacggccgccgccccatccctatactttgtggacccggaccgaacgccttgtttcgccgggatccgttggaggctgacccatgccggttctcgaaacacaaaacctgtcctttgtttattccccgggtacgccgtttgagaaaacggcgatggccgatgtgtccctgagcgttgaggagggggacttcgtcggcgtcatcggccacaccggctcgggaaaatccaccctggtgcagcatctgaacgggctgctgaaacccacctccggcaaggtgctgctggagggccgggatatctgggccgagccaaaaaagatccgggacgtccggttccaggtggggatggtcttccagtatccggaacatcagctctttgaggacaccacctataaggatattgccttcggcccgaaaaatatgggcctgtccgaggatgaaatcgacgcgcgggtccggcgggcggcggctttcgtagggctgaaagaggagctcctcgacaaatcccccttcgagctgtccggaggggagaagcgccgggccgccattgcgggggtgatggcgatggaaccccgggtgctgatcctcgacgagcccacggcgggcctcgatccgcgtgggcgggacatgatcctcgaacagattggcgcctataaggaagagaacgacaccactgtgctgctggtttcccacagcatggaggatgtggcgcgcacggcgaagaaggtgctggttatgaacggtggccggatcgccatgtacgcccccacggccgaggtgttttcccgggcggaggagctcgaagccatcggcctgtccatccctgccgtgaccaaggtgttcatgcgcttgcgggaaaagggctatccggtcggggacaatgtctataccgtcgggcaggccgagcagaggcttctccctctgttgaaaggggggagcgcaccatgctgagcgggatcaccatcggccagtatttccccggccgctccctggtccatcggatggacccgcgggtcaagctggtgctcactttcgcctatatcgtggcggttttcatcccccgcaactgggtggggatggggctggcggcaggcttcctggttttttcagtggcgctgtcccgcctgccgctgaaactggtgtggaaaagcgtcaagccgatcctccccctcgtcctttttacgtcggttatcaatatcttctttgtggacggcggcgacatcctggtggattggtggatattccacatcacggtccggggggtggtcacggcggtattcatcgccctgcggatcgtctgtctgatagcgggcagcagtctcctgacctacaccacctcgcctaccaccctgaccgacgccctggaacggctgatgaagccgctcaagctgctgcatgtgcatgtgcatgaaatcgccatgatgatgaccatcgccctgcgcttcattcccaccctggtggaggagaccgacaagatcatgtcggcccagaaggccaggggtgccgacatcgaaagcggcggtttgatgcagcgcgtccgggcgctgatcccgatcctgatccccttgttcgtctcctccttccggcgggcctacgagctcgccatggcgatggaatgccgctgctatcacggcggggaagggcgcacgaggatgaaacagctccatatgctgccgcgtgaccttgtgtgcctgctgatgatggcggggctgatcggcggcctgatcgtgctcaatatcctgctccctgcggtgctgtgaggcggcccagcatcgtatgaccgcccgaaagctccggggccgcagcccctttttgtatagaggatggttcaggagtccacggtggggaggctttcctaaaaagaaagccgactgggttacctgggggggatccccttggcgcctctttgcctccgttctcggcgaagagaaaggaggtggccgcgcatgggataccctaatcggattaacagcgcatggtatgcgcggacataccgcaacaaaaatctggtctgcggaccaccttcttttggccgagctttagctcgtggcccccaaagaaggcaaacgtgctcttttcatttgccggttttctttttacgaataccggcggcagcgttatcacctgaaccaacccataccatcagggctgcggcctgggttcgttccccggcagagggggtttatccctcatcttgtccccaaacaaagaaaagtgaggcatgccatgacccggctcctgctgacattgcaatatgatgggacccgctatcacggctggcaggtccagcgcaacgcccgtaccgtgcaggaggtcctgcaggatgcggtggagcggatcaccggtgtgcgctccggcatcacggggtgcagccggaccgacgcgggagtccatgcgcttatgttttgctgcgcgttggataccggcagccctctgaggggggagaggatggcccgggctctcaacgcctgcctgcctttagatatagccgtgacaggctgccgggaggtggcaccggacttccatcctcgctatatggcggcggggaaacggtatcggtaccagatttggaacgctccggcccggaatcccttttatgccgggtacgccctgcatcgtgcggcccgtctggatgaggaggagatgaaccgtaccgcctccctctttatcggcacccatgatttttcggctttctgcgcttccggaagcggggtagaggaccatgtgagaacggtccgcctggcgcaggttgaccgggaaggggacctgctccgtttccgggtggaagcggacggtttcctgtatcatatggtgcggatcatggccggctccctcctcgacgtgcaggcggggcggctgcgcgagtcccatatcctcgaggcgctgcgcacgggcgaccgctcactggccgggtttaccgcgccgccccacggcttgtttttagaggaagtcttttatccggagggggtactcgaatggccaaaaaacaggatctgaaaatcacccggcggaagccgaaggccggacgggatccggggacaaaggagctcccccccgagctggagggtctgcccccgctttcggaacaggagctggaaccggttctcctgccggcaaaaaagcggaagcaccggcacccggtagcccgggcgatcgtccgcctgctgctggtggcggcagttttgacaggcggcttcgccgtgtggaaaaactgggacaagcttgcccccgaagcgctgctcgattggatcgatatgaaactggacggtgcagacaagggcgacggcttcccctatgccatctcgggcgataccgtcgtggcgatgggacaggccaagaacaacctggccctgctgaccgacacctccctgctgtttatcaatgaaaaaggcggggaaatcgcccgacggagccacgcgtatgcccgtccgctgctgaaaaccgccggttcctacgcgctggtggcggagcggggcggagggcggtatcaactggaaacccggagggaaacggtcctcaacggcaagctggagggccgcaacatcctcgcggcgtccctccaggaggacggccgctttgccctggtaacggatacggcgtcccagagttatcaatcggagctggatgttttcgaccgcaaggggaatgttctcttctcctggaaaagcccccgcctgctcctgaccgatgtagcactcagccccgacggcctccatctcgcggcggtgggggtgacggcggaggccggcaatatgcgttccacccttttggtgttcgatctgacgcagaaaagcgccgctccggtggaatacagcggggacggtctgatgctcttcggtgtcacctatttctccggcgggacggtggccgccgtcggagataccgaaatgtgggtggtcaaacccggcggcaccctatatgaaaaacatagctacgaagggctcgaaccgaatggatacgcattcggtgaagcctcggcgggcatcgtgctgcggcattcgggagccagcgagggcgggaggctgctggtggtgaatgcctcgggggatatggcgtatgcagcggagttttcggggactttccgccatttgtctcccggcggcgatgggttctggctgctgacatcggccgccctgcaccgcgcagggccggccggactggacgggcaggcggatatggagcccgacggccggatggtggtggattacaagcaaacgcccatggtgctggggctgaccgctctgacgccggttgacatgccgcccgcttcttgagcggccggcagcgggaaggaggcttccgatggggtttctgctcgatgggctgattgtgctgctgtttattgtattggcggtgctttggcggagccggccggtttcctcggcgcttttttcgctcctctctattgtgctggcattgtccgccgcggcagtgttcgcgtcgctgttttcgttcccgctggcggagaatgtgttccgtccaccggtcagccgggcggcggcgtatgatcttgccgacctgttttccgcgccccacctggagaccggggaggcgacggtgcaggcgctgtcctttgaccggatgctggaggaaggacctgccccttttacggaggtcctccgaaaatacgggaccaccctcgaggcggtgcgggacgcgtacgccctgtctccggaaccatcgaccgtgctgtataccgtttgccgtgggatgtccgacatgctgggctgggtcgtcctgttcggggttttgtggatcgtgttcgcggttctgatccgatgggggacccgccggatcgaggccaacctgcgcccgcccaaacggctcaggggccttcgccggctgtggccgctgctggcagcgctcgtgagcgccgtcgggatcgtgtggggcgccgccctgatcctcgagcgggcggtaccctatttggagccgcgtaccctgctcatttcccgggacatgctcgacagtgcccaaatttatacaattcttaatcggattaacccctttgcctggttgtacttcagatgaatccatggtataataagggacagcgccggctgcgtttttgacaggagaggctgaaataggcggcgcggcccgaacccgtttggctggcgccgggatagcggaaaagccaaagggatcgcggtgtgtgaatccatacaaccgcggccgcagcggccgcggagaggggtgggacaaatggcatatattctggatggcgcggccatactagtggtgcttcttgcggttttcatcggctaccatcgcggttttgtccgttctctgatccagctggtgggcctcattgcggcggctgtcgtagcggcggcgctcagtaccgggatcgcggcgctggtttttgacaattttatcagtgacggcctgactcagacggtgtcctccaaaatacagaccgccgacaccgcgaccgcagcggagagcctacagcaggcgctcgaggagctgcccggcccgatttccaatgccctcgcccaatacatcggcacgcctgagcagatcgtgtcgggtatccagggttccctggacggcagcgccgaggcggtcgcctcgaccgtggtccgctcggtgatccgcccggtcgcggtggcgctgctgcgcttcctcgtgttcttcgtcctctttatcctgctgatgatcgtggtggggctggtcgccaggctggtaaacggactgttcaaagcaccggtgctcaagcaggtcaatggggcgctcggcgcggtgatcggcctgatccaggggattctgttcctcttcgtcg

SEQ ID NO: 1052 - DNA, 6441 bp, Unknown
  16S sequences of unknown bacteria
cgcgctggacaagaagggcgcgccgcagccgatgatgccggcgcgcagcatccatgtgttcgagtcgctggacatccatgcgttttctcatcagaccagggcgttcctcaagatccaggatggctgcaatcagttttgcagctactgcatcattccgtatgccaggggcgcagagcgctccatcgcgcctgcgcaggccgtgtccatcgcccgcaccatggccgagcacggccatcaggagatcgtgctcagcggcatccataccggacgctatgggcgtgatcaggggaccacgctgctgcagctgctcaaacagctgatcgatgcgacgcccgaacaggttcgttaccgcatctccagcatcgagatgaatgagatcgatgatgcgttcatcgcctacatgaagcaggagccgcggatcgccagacatctgcacatcccgatccaggcggccagcgatgaagtgctcgccgccatgaaccggccttatgacacggcctggttcgcacagcgcatgcgggatatccgtgcgcagctgcccggcatctccatttcgaccgatatgatcgccggcttcccgcaggaaagcgatgatcagttcgcgcaggcgctcgaactggtggaaaaagaactgcgcttctcattcatccactgcttcccttattccagacgggatcatacccgcgccgcacagatgcccggacatctgccgaatcaggtgaagaaagcgcgtgccgcacagctgggcgaactgtcagagcggctgcatcatgcctatatggagaccttcctgggcaagcaggcagatgtcatcatcgaacggcaaaaagagggcatgctgtttggatacagcagcgaatatataccggtgtacattccttggacgggggatgagatgccgaggagagcatatgtgcgcctggacggcttctgccgtgaaggcatgcacgcaagtgaaatggaggtaatctcatgaaactgaatcagctgttcggatcagtgccggccatcgagatcggcggtctggccatcgattcgcgcaaagtgaagcctggagatatgtacttctgcctggaggggatggtcaatgacggccacgccttcgctgcagatgcggtcaaggcaggcgcggtgtgcatcgtgcatgccaaggatctggacgagatgccggaaggcgcggtatatgtcaaggtcagcgatgtgaacaaagtgctcaatgaggttgcgtcccgtttctacggcaatcccagccatgtactgaccatgttcggcgtgaccggcaccaacggcaagagcaccgtgaccaacatcatccagagcctgtattcacatcgtgcgccatgcgggtatatcggcacgatctcgatctcctttggcgatgtcagacgcgagccagatctcacgacgccggatccgatcctgatccactccacgctggcggagatggtggatgccgggatgaaagcgtgcgcgatggaagtcagctcgcacggccttgagctgcgccgggtggaatctgtcgattttgacgcggccgtcttcaccaacctgacgcatgatcatctggacttccatgggaccatggagcgttatttcgccgcgaagctcaagctgttcacctcgctgaaaaaagatgcgttagcggtcatcaacgtcgatgacccatatggccgcaagatcatcgatgcctgtacggtgcgcaccgtgacctatggcgtggagagagacgcggactatcgcgcagatgacatccatctgggcgtggaagagacgtcgtttacgctgatccatgagggaaaggaatatccggtcaagacgaatctcgtcgcgctgttcaatgtctataacctgcttgctgcgatcgccgtgctggcggagtcggtcatgccgctggaggagatcctgccttataccgggcatatccatcaggtagccggccgcatcgagcgcatctgcgaagggcagccgttcaacgttatcgtggattttgcgcatacgccggatggcatggagaagatcatgagctatggccggctgatcacgaaagaaggctgcaagatgatcgcggtattcggctcggccggaaagcgcgacacgaagaaacggccgatcttcggcgaactggctgaccgctattgcgatatgatcatcctgaccgaggatgacccccgggatgaggatccccatgcgatcgccgatgagattcgcagcggcatccaccatacacagaatgtgttcatctccgatcgctacagcgccatccgtcaggccatcgagtcggcaaacgaaggcgatacgatcctgctgctgggcaagggcgatgaggatttcatgtatcatgagaacggcagagtgccctggaaaggcgaccatcatgccgcccgagagtgcattcgtcgctattatctgggcgagaacgggactgatcatgaaaaataacgcattttaaaggtaaattaatgaaaaacgattgcatttcactgtgtttttatatataatgttgatgtttgctagtgaagggagggtgaatcatgccaaaagttgtattgaaggaaaatgaagttcttgatgatgcgctgaagagattcaagcgtcaggtatcaagaaacggaacccttgctgaagcacgcaaaagagaattttacgtcaaaccaggcgtacgccgcaagctgaagtctgaagctgcacgtaaggctcgccgcggaaaataatcagggggatggaaaggtctgcagagatgcggatctttttttcatcgtttttcgatgcgccgcatatactcgagtgaggtgctgtatgtgataacgatgagtgaaaatcaactgatgatcgaacagtaccggcggatccgccgcgctcaggaaaacgaggtcgaagtggagatgccggaatatgtgctgacggtggagggcagcgggctgaccttccagatgatgacgaaggatgagatcctgctgcagggcaggctggactgtctgcgggtatctgcctatgaggaacgctctggggcatgactgctgggagctggacatcccgctggaggtctttctcgaacgcgccagggtcaatgcgctggagcttcagcatatccgggtggtgaaccagcgcgtccgcttcatgacgccgctgtttcagcgcgccaaggtgcgccgtgcgttcaagggggccgtcctgatcacgacgagcggggcgtccggcttcctgctgcgcaatttcagccgaccctcgcgcctgctcagcctggcttgcgcgctggcagtgtggggcgtgctctcctcattcgtcttcgatgtcgatatccgcggcgattcacaggaggccgaggacggcgtgcggcaggcgctgatcgggctgtatggcgaagggccgctgtttggccttgacgccgatgaagcagagggatcgctggaagagcggctcagccatcaggtcaaatggatggaggtcgagcgcgaaggctcacgcatgatcatccggttcacttccgccaagcacgcacagagcgaaacgctgcgggatgacgacctcatcgcccagcgagacggcatcattgccggatttgacgttcagcacggagagaagcgcgtggcgctgaatcagtcggtgaaaaagggcgatgtgctcgtttcctcgctgatggccgattcccgagggaatgcggaacatctccatgtcaaggggcgggtgtttgcctatacatgggaggaggtggagctggaggctgaacgaagcgcaatgcctcagccgctgcagtttttctccatgctgctgcaggcgcgtgcccaggtcagcagttcatttttgaaggatgaccgcatcgtatcggaaaacattttgcaattcggtgaaaaagcgggtaaaataaaactggtgattcactatacgctgtatcgggacatctccagtcccgcttaggaggatttgatgcaggaatatttcaatatttcactggaagaatatacgatggaagagatcagcgcgctgtgcggccccaaggatgcttatgtcgacttgctctgccgcgagtttcagacatcgttcgtcatgcgcggaaatgagctgaagatccgcaggatcgacgcagagagcgagggcatggtcaaactggtcgtcgcccgtctgctcgagctggtggaggcgcaggggaacatcagcgaacgcgatgtcatctacctgtgcaagctggcgcggatcggacagctggagcgttttgacgtgcatcagacaaaagcgatcggcaggaccgcccaaggcaaggccatctatcccaagacgctggggcagcgctatctatgccaatgcatggagcgaaacgatatcgtgttcgcgaccggcgtcgccgggaccggaaagacttatctggccgtcgcttacgcggtgaacatgctcaagcgcggcgatgtgcagaagatcatcctgaccagaccggcggtagaggcaggggagagcctgggctttctgccgggcgacctcaaggagaaggtagacccctacctgcgtcctctttacgatgcgctctatgacacgctgggcatggaaaatgtggacaagctgatggaaaagggcgtcatcgagatcgcgccgctggcttacatgcgcggccgtacgctcaatcaggcgttcatcatcctggatgaggcgcagaattctacgcgttcgcagatgaagatgtttctgacccgcatgggctttcgctccaagatcgtcatcacgggagatgttacgcagatcgatctgatccgtcaaaaggacagcggactgctcaatgcgcgcaggctgctggaggggatcgagggcatcgcgttcgccgagctgaccgcgctggatgtcgtccgccatccgatcgttcagaagatcatcgagcgctatgaagccgcggaacaagaggacctgcgaaaaaaagacgaaaagtagaaaaagttgaaaaatggtattgcaatttctgccaggtgatgctaatataatggagcaatcacgccgcgttcggcaagcggttaagccacagccctctcaaggctgtatcacgggttcgaatcccgtacgcggtaccatttgaagataagatccgatcattcgggtcttttttttctcgctgagaaaagagtgttacagttttgatatttacgtaaattgagagataaatatgctacaatgatataggtgatatgaatgagggagaaaaagtatggactgccggaacagtcgaagcgaaaagtgaattaccggcatctggggatgctgattgccgcagcggcggcagcgctcgcgctgatcatcgccgcgatcttcatcgtgatccatatcgtgagcggtgacccgtttcctgaagacgtctcattgaccaaggaagcgggcagcgtgcagacggagatcgatgacgaggcagcgctgaagctgcgctatccttcttttgcggatgaacagctcgatcaggccgtgcaggaaaaggtgaagcagctgcgcgaagcagcggatggtgaagatacagtgatcgattatcgcagcaagacggtgtttgatatatatacttcggtgctgttcaaggtgacgaagacggcggaagacggctcatcgcaggtcagctatgcttcggtcctctatgatggcggacagcagaaaacgctgggcgtcgaggacgtgctgcgcaatcagtttgagcaggatctgcttgatggcaggacgcaggatgagatctgcgccatggagctgaacgaaaacgatgtgacgctgtatttcaaggatggcaagagccagtcgatcgtcttctctgagcataaggaatacatcgcgctgaatgatccgaatattcccagcctgtaccagcatgagccgttggaaatcgcggaaagcccgacgatcgatccggacaagccgatggtggcgatcacgtttgacgatgggccgaatccggccaccacgccggaactgctcgatctgctcaaggaatacaatgttcgctgcaccttcttcatggtcggcaagaacgccgaagccaatccggacatcgtgaagcgcatctgcgcagaagggcatgagctgggcaatcattcctgggatcatcctgatctctccgtgttgagcagacaagagatcatcgaacagctgcagagcacggatgatgcggtgtttaaggcatgcggccatgacccggtgtatatccgtccgcctttcggcgcgatgtcggatacctaccaagacagcgtcgatcgggattcgatcctgtggaccatcgatacccgcgattgggagagccatgatgcgtccaagatcaaaaaggtcatcgatacttatgtaagcgatggttccatcatcctccttcacgatatccatgaggacagcgtgaaggcgatgaagagcgtcatcccggatctgctggaaaaaggatatcagctggtgacggtcagcgatctgtacaaatatggaagactttcctgagacggc

SEQ ID NO: 1053 - DNA, 4667 bp, Unknown
  16S sequences of unknown bacteria
ggccaagcaagaacccgcggcgcccgttaaggaagaaaaagaaacgcccgctcccaaaaaacggggcagaaagcccaaggcggaaaaggcggaagaaaaagcggcggacgtcgtaaaagaaacgacggtcgccgaaggcgtcgcgcccaagcggcggggcagaaaacccaaagccgtgcagcttttgatgccgggcgcgcccgaagaagtgcccgtttctctctccgagcctgaaaataaagcggaaaaaatccttcctcaacaacccgctttcgatttgaccgatttggcggacgccgtttcctctccctcctctccggaagaagagaaaagagaactctccgaaaacgaggcacccgtgtctgcggcgacggaagaaaaagaagaaacttcttcggtgcaaccgcccgtcgtttccgagataaaagaaacgaagaaggaagaaaaaacgcccgaagagaaagaaactatttcgaaagagggggctttgacaataaaacccgaggcgaagatggcgcccgtcttcgatatgacgctgctcttgggcggcgggaaaaaacaggcgcctaaggaggcctctttgcaaaagccgacggcgcagaaagaaacggtccccgcgtctgcgccgcagaaatctcccgatgcgaaagagaacagacaggaaataaaaacggagaaaaagcccgaggcaaaacaggcgaacgcggaggagaaagcctctgccgcacagccctcccgcgaggaaaaaagcgtcgagcgccgcaaagaggaactcgtgctttcgcccgcggcggcacagccgcaggaaacgagaagacccgttcttcccgagtttgcctttttgggcaacgcttcggcaaaagccgcggctgcaaatcagcgccgcaacgcggaggctccgaaagaatctgccgcagaaagcgcgaaagagcttgcccgcagcgtcaacgcggccggcgtaaaggcggaatcgactatcggtaagcaatcggcgcccgctatgcaatcctccccggcaaatcgttccaaagcggaaatttctcccgtttctcccgctccttccgcggcgaagagtccggcttcccctgtccgcgaaacggcaaaagacggggggcagggaaacggcaacggcaattcttccgccggcgcgggaagcagcggcccggcgcgcggcggcagaaggaacgtgcgccgcggcggcagaccgacgcccgccctgcccgaaactcccgaggacgcgctgaaagcggagtttttgaagcggctgcgctctttgggcggcgactatttcgaatattattccgtgtatctgttggagaggtattctttgcggaacggcaggcgtttggaagggatgcgcgtatcgggcggcgagcgcgacggcggcatcgacggcgagatagaactcaccgacaaattcggcttccgcgaaaccatctacatacagtcgaagaactgggatccctcgaaaggggatctggaaaagtgggtggtcggagaaacgctgttgcagcagtttatcggagcggtggcttgccgtcaggcgaaggaaggcaagcagcacagccgcggcattttcatcaccacctcgcattttacgcccgaagcgaaggaacttctcgatacgatgtcggataagttcatcggctacgattcggacgacgtattcgaggccgccagggaatgctcgttcgggcttgtgaaaaaagacggcgagtgggctttggacgaagaactgctttcgggcggcaaagcgttcttcaatttgatgtgactgcacatctttcgcaaaactgagtaaataaacctttacggctctcccggacagcgcgcttcgggcagagccgtcttttttggtttttcggcaaagcgcggaaagttccgtattttttttccgcgaaaattccgtcacggcgcaatccggtcgtcaaagctttgccaaatgaagctcttttatcagcctaccgattttccgcttttcaaaaattaaaaaatacagctttttcggctcgtctttccgatgaaaaaaagagggggatattgacaacggattttaaatgccgtataataataggaaaatgaacgggggaaaagaaatgaaaagactgggagttattctggcggcgtttgtcctcatgggaagcttatcgggaacggcgtgcggcgggaaaacgactgagaagggagaaaattcgatcgcacagggactttacgaatgggaaagagccaccttgatgttttatgaatcggattacgacgaaaacaggaatctttcgggcgtaagaacgaaagtggaagatacctattacgcctttgaaacgggcgtttccgaatggaaaagggaaaatttcgtcagcacgtgcgaaagcattgccgcaaagacgggagagcgtgcggaatatgtgtacgcgggcgaaagctattcctattccgttaaggacggcaaggcggtgtttttgccgatagaagcggataacgcggagatcgcggcggggatcttatcgctgaattatgccccggggattccttacggagcggcgtatgcgctcggatacggagtctgcaaagaggcgggactcgacctgcccgaaatctgttcggacgaagaactcaaagaaacgttgagggcaaagcccgaaaccgccgatttgacgctgccgctgttctattccgacttttcgacggaagaccaaaagcaggcggccagggcgctgtcggtgaaactgtatgaaacggctggcaaagagcgcctggaaagcttgttgaaagaacccgtccgcgcgacgctggaagataaattctcgggatacataaaggggatttgctatcttttggacgcgcccctgccctttgaaatcgggattcccgagtacgaattttctcagacgcagaaatatctcgtcgcggataacgaacgggtgcgtttttccttccgcttcggttacgaggacatcagctataaatatttcgacagctatgcggagctgaaaacttttttgacggaaagtttacccgcctttgagaaagttcgggagctggtcaatcccaagtatgcgaaaaaggtatggtttttaatggacgaaatcgaaacgaggagaatgaatgtagggggaattaccttttcaaacggtttcgtgatttgcggcaaagtgggcgcggtctgtcatgaatacgcccatgcggtcagcgaggactttatgaagcgtacggaaagctattggacgggggaggcgctgcccatgtactgcggggcttctttcggagcgtattacgccgaagaacttttgaacatttatataaaatcggaaatcgaacaagactcgccgtattacgaatactatcaaagcgccaaaaaaatgatctggcagtatccgaccgcagacggcagggaactgagcgatctgttggcgtattgcttcgagagtcttttcccgggcgaatttatccgttggggcacggagccgtacggcggctatcaggctttgcaggagcaggtgggcgcgtcgctgacgaattatctcattgaaacttacggcgaagagaaatatctgaaattatattacggcaaagacgaaacagaagaaagggtatataaaaagactttcgacgaacttcgcgccgagtggtttgaaacattaaaaagtaaatacgaaaaataggaaaggggcaggtattcggctatcggaaatccttgcgcgaaaggagaagaaaaaagcgtttttagatcgatttttttgaaaaaaacggcgcgcaaatttttccgcgaaaacaaaaaaattttgataaaaaggcgaaaaaatctaaaaacgccgcgcgaaaggcttgatatttcttgcgatttgtattaaaatgaataatggtcaaacgagtaggatataaaatccgaaaagaataaagttaataatctcaatggaggaaaaaatcaattatggcaaaaaagtattgctacctcttcacagagggtaatgcgaagatgcgcgagctgctgggcggcaaaggcgcgaaccttgcggaaatgaccaatatcggtcttcccgttcctcagggcttcaccatttccacggaggcttgcacgcagtattacgaggacggcagacagatcaatcccgctattcaggcggagattatggagtacatcgacaagatggaaaagatctgcggcaagaagttcggcgacaaggtcaatcccttgctcgtttccgtccgttccggcgccagagcgtccatgcccggcatgatggacaccattttgaacctcggcctcaacgaagaagtcgtcaacaccatcgctcaaaaatccggcaatccccgttgggcctgggactgttacagaagatttattcagatgtattccgacgtcgtcatggaagtcggcaaaaaatatttcgaacagctcatcgatcagatgaaggaaaagaagggcgtgacgcaggacgtcgaactcaccgcggacgatttgaaggaactcgcttcccaattcaaagcggaatataaggcgaagatcggcgaagatttccccgacgatcccaaggaacagcttttcggcgcgatcaaggcggtcttccgttcgtgggacaacccccgcgccaattattacagaatgcagaacgatatcccttacagctggggcaccgcggtcaacgtgcagatgatggcgttcggcaaca

SEQ ID NO: 1054 - DNA, 17353 bp, Unknown
  16S sequences of unknown bacteria
tccctgcgcattttatatttcatcacgccggcggcttcttccagcgccgcacgtcgttcttctcctttattggatagaatctcttctatcttcccctggccaatgatgctgtatccttctctgcccacgcccgtatcgtaaaacagagaaacgatatccctcatcctacagggggaatggttgataaggtattcgctgtcgccattgcggttatacctccgggaaacacacacctccgtgtgcggaatatctaaaaaatggtcttcattatcaaaagtcagcgaaacctcacaataagacaaaggacgccgtttttcggaaccattgaaaatgacgtcttccatctttgtaccacgcagcacacgggcactctgttctcccagcacccagcgtaccgcatccgcaatgttgcttttcccgcttccgttggggcctacgatggcggttacgccgtccgcaggcacaaggctcaccttgtctgcaaacgacttaaacccaaataggtcgatttgttttaaccgcacacgcagcacccctcatcccactttattgtttgtcgttattcagcctatccaacgcagccttcgctgcattttgctccgcttccttcttgctcttgccccggcccgatccgcattctttgccatgcaccacggcctgtaccacaaaaatccgctcgtgagcaggtccctgctggctgacaagctcatacttcggcacttcggcaaaccttacactgcaaacatgctgaagctgcgtcttataatccgcaccgccgccatgctccatggctgtctccgtcttatggcctaggcactgcaggataaactggcgggccggctccataccgccgtccaaatagatagcacccataatggattccatcgtgtccgccaaaatcgacggcttttccctgccgccagagccttcctctcctttgcctagctgcaaaagtgcgcctagggacagccgctttgccgcttctgccagcgaagcttcgcagacaacattggcgcgcatccttgtcatctggccttcctctgtgtggctctgtttgtacagcttttcgctgatgacaaattccaatacagcgtctcctaaaaattccagacgctggttattttggcccacattgccattgaagctgcaatgggtcagtgcaaggcgcagcaacgcctcgtcctgaaaatggtatcccatcgcctcttcaaaagctcgtagtcgttcctgtcgtttgggcaggacgccttgatattcctctttttggttatttgtttgcttcaatgtagttaaccacatcctgtactgttaccaacgtggtcatcgcttcatccggaatctcgatctgataagacatctcaagctcggttacaagctccaccacgtccaacgaatccgcttccaaatcctctaccagtttgctttccggctttacgttcgccgggtcgatgttcagttgttctgcaattaccttttgtacttgttcaaacataagtataccctcctttggatcacacatccgcgatttccaggctgccctccggcaaagcctggatctcttcccggataatgcctacaacgtcgcccatgcacatctgcctgcattggcggatggcatggtaaaatgctttgctgttagagcttccatgagccttaacaatggccttgttcacacccaacagcggcgcgccgccatattccgtgtaatccatctttttcttaaaatttttcaaagacggcatcatcagcgccgctcccatcttggagcggaatgtagacgtcatctctgtttttaacatactcattagcgcagaggcaaatccctccatgaatttcagcaccacattgcccacaaatccatcagcgactgctacatctgtttctccggataccaaatcgcgcgcttccacattcccggtaaagtcgatcggcatctttttcagcatttgatgcgccttttgtgtcaggtcgttgcctttatgctcttctgcgccattgttgatcagcgctaccttgggcgccttggtacccatgaccttttccatatacacggaccccatcacgccaaactgcgccaaatactgaggcttacaatctacgttcgccccgcagtcgatcaacagcattcccttgcctgctttggtcggcaataccggcgccaatgctggacgcaatatgccgggaatgcgctttacaatcagcgtagcgcccgcaagcacagcgcctgtgctgcctgcgctgacaaatccatcgccttggccgtccgccaaggcgcgcagtgccttgaccacactgctgtcttttttcctgcgtaccgccatgacaggcgcctcgttgttgtcaacgatctctctggcatctacaatatctagccgatccttttcgtattccatgtcttttaagatggcttcgatctcctctttgcggccaaacagagtcaaatgcagatccttcatatccttcagagccaccacgcagccctctacaatcgcctggggcgcattgtcgccccccatggcatctatcatcaacttaatcaatggtcttttctccctttttcttacagttggaaacattatacgccaagaaatcgggccctgcaagttttgctttctcatcccaacaaaaaagagcgctcactgcgcccttttattgttttaagcaaatgtcttacgcgttttgctctctggcttcttctctggtggtcaaaaccttcttattgttgtaataaccacagaacttacaagcagtgtgaggcgccacaggctttttgcactgttggcagatcgctaccgtcaccttcggcgcattggcatgcgtcctgcgtttgtcacggcgggtcttagaagtttttctcttgggtacggccattgttacacctcctcaggcaaatcaagcttgcgcaagatagcaaatggattctctgtattcatctcgcaagaacagtctgtttcgtttctgtccaccccgcaaatcgggcatagccccttgcaatccgggcggcaaagcaagcgatacggcagggctgtaagggccgcctgcctcagcgcttcatccatctgtagaaactctccctcgatgggaaatatttcctcctcttccaaatcggaaatctctctggcaaaccgttcttctattggaactgtgatctgctcgcttgcaggctttgtacatctggcacacgccccggttattgtaaaccgcagcgtacccgtcacagtatacgccccttctcccgtgcagagacagcatccctcaaatgtcgcgggcgcctggctttgatattccgccggcatctgtatctccacagatcctgaaacagcggtaggatggttctgcgccaatccctggcgcaaatcgatcttcaagccaaccactcctttacaacaattatggattatactggcaaagcagtgtgtttgtcaagctttggcctgttttgccaggcgcacggtttctctggcaatcaccaactcttcgttggtgggaatcacccatacctctaccttgctgtctggcgcggaaatcttatgctctccgcgctgctggtttgcctcgtcatccagctgaatgcccagccattccatccccgtcaggatgtcttttctcatcttggcgtcgttttccccgatgcccgctgtaaataccagcgtatctacgccgcccagggccgctgcatacgcaccaatgtacttttgaatgcggtagatgaatacatccagcgccaaaatcgcgcgtcgatggccttctgccgccgctttcgccaaatctctaaaatcgctggaaacgccggacaagccgtatacgccactctccttattcaggtaatggtccatttcctcaatggtcttatgctctttttccatgatgaattttacgatcgccgggtccatatccccgctacgcgtacccatcaccacaccctccagcggcgtcaagcccatggaagtatccatgcacttgccgtccaggatggcgcacaggctgctaccattgcctagatggcaggtaatcatcctgcccttttccgtcccacgcaactctgcagcgcgctgggatacaaataaatggcttgtgccgtgaaatccataccggcgcaccttatgcttttcatacacttcgtacggcaacccatacagatatgcctttggcggcatggtttgatggaagcctgtgtcaaataccgctacctgcggcacaggcatggcctgctggcaggccttgatgccgctgatattggccggcatatgcagcggccccaaatccacgatcgcttccaaatcgtggatgacctgttcatccaccagaacaggatcggcaaacttttcgccgccatgcagtacgcggtggcccactgcatcgatctcctccaatgatttaaccacgccgtgcttagcgtctgtcagcgcttcgagcaccatttggatcgcatcgttgtggtttttgatctccgcatgaatatcggcttcctcagcacctcccttttgctttaggaagctgccttcgattccgattctttctacctgccctttgcacagcacctgctgatccaccatgttgatcagctgatattttaggctggaagagcctgcattgattaccagtacgttcattttccctctccccagttagtttttatccgcctcgttggcttgtacaacggtgatggcaattaccttcattacgtcatccgcgctgcatcccctggataaatcgtttacaggctttgccagcccctgtacaatggggcccagagcctcggcatgcgccaagcgctgtaccagcttatagccgatgttgcctgcgccaagatccgggaagatcaatacatttgccttgccggctacctcgctgcccggcgctttaatctccgttacttccggcacaagcgccgcatccagctgcaattctccgtctatgcaaaggtcagggcgttgctttttcgccatacgggctgcgtcatacatcttgtccgcatccgcatggcgcgcactaccctttgtagagaaggaaagcatcgccaccttcggttccatctcgcacaaatattccgctgtttgtgcgctggaaagtgcaatttctgtcaactgttccgtgttgggagcaatattgatgccgctgtcggcaaagataaaggtgccattgtggcccatggacttgtccggtaccgttaccacaaaaaacgcagacactgtcttaaccccttttttggggcgtacgatctgcaaagcagagcgcaacacatcgctgctggtatggcaagcgcctgctaccatgccatctacatcaccgcagcgcaacatcatgcagccaaacatcaacgggtcgcggattacttcctgtgcgcgcgtacgcatcatacccttatccttgcgcaactcaaagagtttctcagcatagtaagaatatttttctgcgctatcgatgtccatgatctttacgccttccaggctctcgtcgcctgccagtttacgcacttcctcctctttgccaagcaggatgatatccgctatcccttccttcacagccatgccggctgcctttaccacacgcggatcgtccccttccggcaaaacgatcagccgcttacgctctttggcacgttgaatcgttctttctgaaaaagtcatcaagatgtgtatctcccttcaaggttacaaacttacatacaactgggatatgttggaaaccccgatgtattgtacacccaggccccttgggtttcaaggaaaatcctgtgaattttcctgggttttcatttcttttctgttataataccgatatctttgattttgcggcaacggaggatcgctatgcaactatgcgccatcatttgtgaatacaatccccttcatttggggcatgcctggcagatagagcaggccaagcgcaggtttggctctgtggtctgcattatgagcggctcctttgtccagcgcggcgagcccgccgtattggataaatttacgcgcgcccagtgtgcactaaaagccggtgcagacgccgtctttgcgctgccttgtcttttttctctgcaatccgccgaaggctttgcttcgggcgctgtccgtctagccgccggtcttggggctacgcacctttgctttggtagtgaacttgtgcaaacgcagctgctttcccgcctggcgcatctctctcttcacgagccgccggcgctcaagcaggcattgtctgtcgccctctcggatggggccagctatcctgccgcctttcaaaaggctgtacaacagatacttccatctttccccaacgaagcatttttacccaacgccttgcttggcgtggaatatttgaaggccatacagcgctataatctgcagatcacgccctttgccctgccgcgtgcgctgccctattccagcagtcaatgccgctccggcctatcaaacggacagtttaccggcttgccagcgtatacgaaagacgcgcttcaaacacatcctctcgttgatttcaatgccatggaaccctcccttctatacaggcttcgcagcatggatgcctctgcatttcgtgcgctgccctttgtcaccgagggattggaaaataggttgttgcaggccgcccgtcaggccgtcacgctctccgagctgctctctctttgccaaaccaagcgctatccgctttcccgcatcaagcggcttttgtgctgcgcctatttgggcatcacacagcgggatatgcagtctgccaaccgccaaggtcctacttacgcccagctgctggcactcaacccaagcgcgcaggcggtgcgccatgcgctaaagcattccccgcttccgatctgtaccaacgccgccgctctaccggaaaaccaacagcttttcattgaacagcgcgccaccgatctctatgccctactttcccatcagccctgcggcttggattatacggcttcgctatctacccgtccgtaaatgcattccttgatctgatccatctttgccaatgttgtctcgtaccctatttccgcacactgtgcgctcttttccacttcaaactggtctataaaccctacctgcggcgaaatcagcacatcggcttggctaagctggtgcttgttcgcctgatattctaacagatccgtagcacggtacaaaatatcgataagtctctggctgggttctgccggctccgctttatggatgcatacatccgatccaatcacaatatccgcgcccagctctttggcggcatctaccggcacattgtccaaaatgccgccatccacatacatcacgccatcgatccattttggttcaaaaatcccggggatgctcatgctcgcccgcacagcaggatacaccttgccgctattgaatatctttgtcttgcccgcccatagatcacaggccacgcaggcaaaggggatatccatctgatcaaaatccctattttttgtaaacagctgtatcagattctcaaactttgcacccttgaccaaaccacgtctcggaacgacaagatccatcatctctcgggcagtcatctgcatgcaaatcttcaacagcaactccaagtcgccccccgcgcaataaattgcgcctatgattgctcccatagagcatccgctgaccacatctacgggaattttattctcttgcagagcgcggatgaccccgatgtgcgcaaaccccctggcggatcccccgcctagcgcaagccccaccgtgggccttttcttctgctcgctcatatttgtcctactcctttgcataaggtaaaccaaccaacttaataataaggagttcgccatgcgtatcaaacgcacatttccctatctattatccgctgttcttattatactcattttactgtatcctgtccaagctttacagggggcaaaaaacgggctttctgcctttgcacaatccgtgctcccggcgctcttccctttctttgtcgccaccagcctattcaccaagcttggggccgccactgtgctatccaagcgtctacagcctttgatgcgccctctttttggcctgcccgggcaaagcgccttgccggtctttttgtcggttgtcagcggctatccaaatggagcccgcgccaccgcttctctgtttgaggcaaagcagcttacgctgctccaggccaggcgcaccatggcctttgcctccaccgttggcccctctttcgtcttttccatcattgccgcttcgatgcttggtcagcctcgcttggcatggctgctgtttttgccgcatcttttggccgcttttttaacgggccaaatcgcacgtctctgcctccccaacgataaaaaacgtatgcagcaaccggcgcctttgaaaagcattgcgcctgttcctttcaatcgctgttttattgctgccgtgcaggaatccgtaaccgctttactctccgtcggcggctttatcgtctttttctttaccttatccaaccttctgctggctatcggtcttctacccttgctggcaaagctgctttggccattcttcctactcgttggataccctacacagctggctttgccctttctccgtggcctgtttgaaatgacggacggctgtctttcgctctgtgccaccggataccctgctctttcattgttgccattgttgtgcgcgctcataagctttggcggtctttgtatccaagcccagcaggcgctctttctttctccctgcggcgtccggttttccgaatcgctgttcttcaaaacagtacacggcgtacttgcctttgcgctatgcagcgtttgcgttcatgcatttcctgccgcctcggtcacatccgttgccgcagcgccggtattttcctttggtcagcggcttttgctaagcacaggcacgcttggcattgctgcgctttttctcgcactgctatgctgtgctatgagcctgtataccttagcgtttaaaaagcgtaaaaaaaaggcgtgcggttaatccgcacgtctttgtgtttcgcctttgccggatagggattctctgtttttcctcaccatatcgatgtattcttccaaatacccttccacatcctgcatcaagtcctctgcatagcccttggcgccctctcgaacgtcccgcgcatttttctgcgccgcagccaaaatctgccgcgccttatccgtcgctgcctgcacgatttcgtgttcgtccaccagctgattggcccgttgctctgcatcgcgtatcatacgctctgcatccgcctttgcgtctgccatgatgcgcatcttgtcggaaataatccgttccgcctgcctcagctcctccggatatgccgcgcgcatatcttccaggatctcatacatccgttcggtatccacttttttgaacgaagaagaaaacaaggcctttttgctttcttccagctcctcttccagcatatccatacagttgatcaattcgctatccatttggaaagtcctcctcaattactgatgcagttcagcacgtattttatcgtaaatctgcgccggtaccagccctctaatatcctgcccataccgcagcatctccttgacgatgctgctggacagaaaagtccattccggctttgaaaaaaggcatactgtctgtatctccggcgccaagcggtggttgactgtcgccaacatcgtctcttgctcgtaatccaactggtttcttaaaccgcgaaacaataccgacgcacccttctgccgggcaaagtccaccaatagtccctcaaacgcctctacctttacatttggcagcagcgccgtagccgattcaatcatttccttacgctgtttcagggtaaacagcggcgtcttatcgctatttttcagcacggcaacgtataagcagtccaccagcgccgctgccctttcaatcaaatcatagtggccgctcgtcagcggatcaaagctgcctgggaaaaccccgatcctcatgctcttctgctcctgtataaaaggtaatggcccttgtgccgtatacccgtgtcctgccctttttgcatatcggcggcaggaaaggcatctcgtccgttgccgcatgctccaaaacaacgacgcccccttccgccaccaacgacggaaagagccctttcagcgccgcttcgtacaagccgccctgataaggagggtctacgtatacaaaatcaaactgttcgccttttcttttcaagatccggagcgccttttcaaaatcgttgcgatagattctgcactgctcgtccatccgaagcgctttgcagtttttagacgccgtttgtatcgccttggcatcggcgtctatcaaaacagcctgctttgctccgcggctgatggcttccagcgcaatggccccgcttccacaaaacaaatccaatacccgcgcctgcggcaccgtcccggaaagaatgccaaatagagcctctctcagtacggcgctggtcggtctggtgttccgccctgggggcgcctctatgatgcgtccacgtgcgcttccgcctacgatcttcaatctctaggtactcctttgtatgattttactatcattgcattgaatatgcaagaaaatcccacattctaccgttattttgtttgttttttggcacaatcgtaggtataaatttcagtacaaatataatccatttttacatcgtgcggctccggctctaggcggtgcaccatctgtgtctgaaagcagtaccctacccgcaaagcatgcgtttgcggcaaaaatcggtcgtaatgtccgccgccctgccccaatcggtttccatcctcatcaaaggcaagcccgggcacaatgacaaattgaatctcctccagcggtacctctgtaccgcctactggctccaaaatccccatcttattggatacaaataccgtattttcatcccacatgataggcaccatcttctcgccttgcaccaaaggaaacaccggatagtatccgcgcattagcagctgatccatcagcggccaggtactggtttcctctggtgtggaggcatagatcatcaccacatccgccttggaaccctccagcagcatcatggcattttccgctgccatcacggaatattcctgccttacctgtggggaaagtaggctgcgcctttgccgtgcatttttgcgctgtatttgtttatccatcatacatacacccttggtactcgttttgaaaggtccgtcaggatttcgtaggaaatggtaccaagccagccggccatctcatctgcccaaatggcctgatcgccctgcctacctagtaacaccacctctgcgccgatctctgcctggggaatttccgtaatatccaccataaaatgatccatgcagatgcgccccaatacaggagcgcgctgcccgcaaaccagcacctgccccttattggaaagcgcccgacggtatccgtctgcatatcccaccggcaaggtagcaacccttctttgctcgtgcgcagtataggtacggccataccccaccgtttcccccggctctatggtatggatatccagcaccatgcttttccaactcatggcaggccatagatccgctctttccggcatctcttcgctgggcatatatccatataggataatgcccgcacgcaccatatcccgtctcaattccggccttctcaaggttgccgcgctgttcgaaatgtggacgatgggcgtaaagcctgcctgctgaaccattcgctctgcctgctgaaagcggagcacctgcgtatccacaaacgcgtcgtctgctgcatctgccgccgcaaagtgcgtaaacataccctccatcttcacatctgggtaatgggagaaagcctccaaaagcgacggcagctgttcgggcactgcgcccagcctatgaaatcccgtgtcaatttttaaatgggctttggcggccgtgttttccctttccgccgcctgatgcatccaacacagctgctctgcattggataccgaaacggagatgccgcgtgctacgcaaagcgcgcagtcctcctcatccagggcgcccaagaccagcacagggcagacaaagcccgcatcgcgcagctcctctgcctcttctgccgttgccaccgccagccaattcgcgccgttttccagggccgtcctggccaccggtatagcgccatggccataagcgtccgccttaacgaccgccatcatctccgcttgccctgcgttttgctttaccagcgatacgttgtgcgctatggccgataggtcgatctgcgcataggttgctctcatcgtttcattaccctcacatcaatccacagatgataaaatttcctccagcgaaaatacccggatgctgttttctttcagtaacgccgcacatttttccgtatcctctacacggaacataatcaacgcattttcgttgggggtccgcacaaaggaatagagatattccacattcagatcatttttatccagcagcatcaacacgctggccagcccgccgggctggtccggcacctctacggctagcacttccgtcgtagaagcggcaaacccatgctcggccagcaacgccaacgccttatccggctggtttacgatacagcgcataatgccaaaatccgccgtatccgcaatggacaacgcaatgaggtcaatgccgttttcccccaataccttcgtcgcctctgccaaggtgccctgcttgttttccaaaaaaacggaaatctgtttcagtgtcataagctcgccctcctaaaatgttagttgtcaaatttgcgcttatcgatcacgcgctttgccttcccttcactgcgttccagctctttaggcggcaacaggcgtaccttggcgctgatgcccagatagctttgcaattccttggatagcgtggcgcggatcccctcgatatttttcaccgtatcgctcaccgcatccggatgcaactctacctgtacttccattgtatcagaattatgcacacggtccacaacaatcaaataatgcggcataacgcccttaacctttgtcagcacggtttccacctggcttgggaacacgttgacgccgcgcacgatgagcatgtcgtccgtgcggcccttcaagcgtgcaatcttcctatgcgtcctaccgcagctgcacggctccggaatgatggaagtcaaatcatgcgtgcgatacctcaacgtcggcataccctccttgttgatggtggtaataacaagctctcctacctctccatccggcactggttcgcatgtctccgggtccaatatctctaccaagaattgatcttcccagatatgaaggccgtgcttttcctctttgcattcgatggccacgccaggacccattgtttcggacaggccgtaaatatccagcgcatcgatgcccatcagttcctcgatctgctggcgcataccctccgtccaaggttctgcgccaaaggtacccgctctgagccgcagcttatttgtatcgatccccatatcacgcatggtttcgcccagcatcagcgcataggaaggcgtacaggccaaaatgctggtaccaaaatcctgcatcaacatgatctgccgctgggtattccccgaagaggtcggcaacgccgtagcgcctagtctttctgccccataatgcagtcccaggcccccggtgaacaagccatatccataggaaatctgcaccacgtcgtttttcttgccgcctgcacagcccaacgcgcgcgccgtgcattccgcccaggcgtcaatatcatttttggtataccctaccgttgtcggcttcccagtcgtaccgcttgatgcgtgtacgcggacaatctcctccatcggcgcagaaaacagcccgaacgggtaattatcccgcagatccgttttattggtaaagggcagccgccttacatcatccagcgtttggatgtcttccggctttacgctcaaggcatccattttttccctataaaagcggctgttatggtagcatctttctaccgttttttgcagccgcttgagttgcagcgcctgtatttcgctccgcgccatcgtctctacctgaggattgaacatctttttgccccctgcctttctgttatgcaagctttgcctgttccagacccgcctggaacgcctttaggttcagctctacaaacgcaggctttaccccttcccggatcacttgtttcatcgtctcagcgtccatccccatgcactgggtatatacgcccaacagcacgatattggctgccttggtgctgcccagctctctggcaatgcccgttgcatccacaaagatatatcgatccgtatacgcagccacctgttctttgacgtccttcggataggcagctgtgcccatattcaccgcaatagggggcacttggctctcatcgcaaatcagcatgccgcccggctttagcatttccagcgcccgcaacgcttctactggctcaaacgacagcaacacatctgcgctctgcacatcgatcagcggcgaggccacattttccccgatccgtacatgcgtcaccacgctgccgccgcgctgggccatgccgtgcacttcgcttaccttggcgtctagcccttttgcctttgcatattctcctagcagacggcctgccagcagcgtgccctggccgcctacccctacaatcaaaacgctctgtttcatttcgacgccccttccatgcattgttttgggcagagtcctgcgcataagccgcacgcattgcacagggtctggtcaatggttaccttgttccccttacgctgcaaggccgggcagccggtctttaagcaagcaccgcagccaatgcatttttccgcattgatttgcagcgaattcttctgcccttttacaatcatcacacacggccttctcgctataacaacggaaacgccgtcctcatttagcgacgcttgaatctctgcctgcaggcctacgatatttagcgaatccaccacgcggatatgctgagcacccaacgcccggcatacgctttccagcgacagcggctccgtgtattcgccctttaatgttttgcccgtcgccgggttgtcctgatggcccgtcatgccggtggtcgagttgtccacaatcaacaccgtgatgttgctcttgttatagctggcggttgccaggcccgtcatcccgctgtggaaaaacgtggaatccccaataatggccagcgactttctcgcaaaatcgcgccctttggccttttcggccccatgcgccatggaaatgctggcacccatacaaatggtggtatccatcgctcccagcggcggcgtggcacccagcgtatagcaaccgatatctccaaataccgtcagccccatctttttgagcacgtaaaacacaccgcgatgcggacatccagcgcacaatgccggcggacgggggggcagatccttgacatcgggcagagtcggcgcatccacgccctctactacctgctttaccaggtttgcgctcagctcgcccgctttgccaaatacttgatctccaatacattcaatgcccaggctttctacttgacgctgaatgtatggttccaattcctccaccacatacagcttttcaaccgaagcggcaaattcgcggatcttttgctccggcagcggatacaccatgcccagcttcaaaatgctggcatgcggcagggcctccttcacatactggtagcatacgccagaacagatcacgcctacctttccatcgcccgcctcgatacggttcagttcggtagaatcgctgagctttttggccgcttcgatgcgctttagcaagtccaccttgcgtcctctcgcatagccaggcatcataatgtatttggccggctgtttttcgtaatccttctcaaaatttccgacctggtctcccaatgctacaaaacctctggcatgcgaaatgcgcgtagtcagccgcacgatcacaggcatatccagcgtttcgctcagctgcggcgcatatttgaaataatcataacattcctggctatccgccggctccaagaccggtacatgcgccgcctgtgcgatcatccgcgtgtcctgttcgttctggctgctgtgcatacccggatcgtccgctaccgccagcaccaacccggcattaacgccggtataggccgccgtaaacaacagatccgccgctacattgagccctacatgcttcatacagcacatggcacgcttgcccgttaccgccgagcccaaagccgcttccgccgccaccttttcattggccgcccattccgtgtatacctccgggaaagccgccgccgtttcagtaatttccgtactcggtgtgcccgggtaagaggagatgacggcgataccgccgtccctggcccccattgcagcggcctgatttcccaataaaagctgttttgccattgtctcagtccttctttcttagatcctgtacacgttttgccttgccctcaaaacgtttgagcgtcatcgggttgcatagggtgatctgcgtatcgatcaaacagtccgtcttgatagccgcccgcagcttctttttcaacacttccagctccttatactgctccagcaagctcacatctgcgacctctaccatcacctctaccttatccatgaagttctccgtcgtcacgatgatttcataattggcgcctaggccgggagtagagagcaaaatcttttcgatctggctcgggaacacgtttaccccgcggatcaccagcatatcatcgctgcggcccataatcttgtgcagccgcgccgttgtccgcccacacgggcagggctcgtaggttatcatggacagatcgcgcgtccggtaacgcagcaacggctgcgcctgttttgtcagcgtggtgatgaccacctcgcccttttccccttccggaagcacttcctctgtatctggatcgatgatctccacaaggaaatggtcttcattgatatgcatcccgtttttctccaagcattcccccgcaacgcccggccccatcacctctgataggccatagttttccgttacgctcatgccccatttttcctgaagctgcgcacgcagctcctctgtatgcccttcgccgcccaccatggccatgcggattggcagctttctcaggtccacaccctgggcttctgccacttccgccatgtacatggcataggtcggcgtacagatcaaaagtgtcgttccgaaatcctgcaacaactggatttggcgttttgtatttccggaggacatcggcaccactgcagcgcctactttttccaggccgtaatgcagcccaaacccacctgtgaacaggccatagccaaaggcgatctgtgctatgtcctcgtcgctgccgcccgccatcgttaccagcctggcgatgcattcgctccaattttccaaatcttccttggtgtacgctaccaccgtcgagcttcccgtagtcccactg

SEQ ID NO: 1055 - DNA, 4704 bp, Unknown
  16S sequences of unknown bacteria
tcatccgcagcgacgacgatcacgacgatatccgtcacctgcgcgccgcgcgcacgcatggcggtgaacgcctcatggcccggcgtatcgaggaaggtgacctttcttcccttgacgctgacctggtatgcaccgatgtgctgcgtgatcccgccgaactcgccttcggtcacatgcgtcttgcggatcgtgtccagcagtgtcgtcttgccatggtcgacatgtcccatgatcgtgatcaccggcggacgcggcttcagcttggaaggatcctcctccatggcgttgatctgttcttccagatcctcctcctcgatgatgacttccttgtgacattccacattgaactccatgcagaccagctcgatgttttcctcatccagtgtggagttgatggtcaccatcgtgcccatcatgaacagcagtttgatgatctcactcgcattgcggttcagcttctccgcaagctcaccgacgctcatcggtccgtgatacgtgatctccttgacttcgacacgctccttgcgcggtgtgaagtttttctgttttccaccttttccaggtttcctcggccctcttctctgtggtttggccataccaatcacctagcctttcatgtacgattgtatcgttttcgcaaacccctgatcgatgatcaccgcggccttgcggttatattcccccactgccgcatcgatcatgctgccgctttccacccgcatcagcgggacatcatagaaagcgcatttgtcgcaaatcttcttgcgctggttttctccgcagtcatccgcgaggatgaccaggcatgcctggccattctggatgctcttcagcaccgcatcccccatgacgaccttgcgggcgcgcatcgcgagccccagcgtgctctgccatctatgcactcttgcctccgaacatctcccggagctgttcataaatctcctgcgggatctcacactcgagcgaacgggcgaggctcttgcgcttctgcgcaaggtccactgcttccacgctgcgcttgaggtaggcgccgcgtccgttcatcctcccgctttcgtcgatcttgacttccatctgcggtgtgcgcacgatgcggatcagctccttcttgggcagctgctcctgcgtggccacacatttgcgcatcggtatcttacgcatgttatcacctcagttaatcgtaatacttgtcatattcatcaaagtcgatatcattgttgatccagtcgttctcgcgctcttcttcttcctggcgctcgatctctgccagctcctcttccgtatagatcggcttgaactcatattccagattagacggatcgaaggtcggacgacgcttctcttcatcccgatcgttcttcttgcggctcggacggctcggacggctttctccggcatgagatgcgctggcatccgccaatgcctcgaacttggacgtaaattcctgcttttcgcgcaggtcgagtcctttttccttctgctttgccttagcgatgcgggctgcttcctcaaagtcatcggaaggatgctcctccttgacctgcggcttctgcgccggttcctccttaggctcttcctggatcggtccgctcgttttcggcgtttcctcctgcggcgtcatctcttcttccacaggctcatcgttgtaatcgaagtccgcatcctctacgctggcgatctcattgtcctcattgctggaggcgaacagctcctgctggcggcggatgcgctcctcttcctgacggcgcaggtattcctcatgctgcgctgccgcgatgccgcgccagtcgatgccggcctcgttcacttcgctctcggccttgatgtcgatcttgcgtccggtgagcttgaccgccagacgggcgttctttccgcgcttaccgatcgcgagcgacagctgatgatccggaacgatgaccagcaggccgcccttcttctcttcgctggggatgacgccgagcacttctgccggtgagagcgcgttcttgatcagctcgctgacatcctcgctccattcgaagatatcgatcttctctccgtgcagctcatcgatgaccacctgcacacgctgtccgcgcggtccgatgcaggcgccgatcggatcgatgttctcattatgcgaatacaccgccatcttcgtgcgctctcccgcctcacgggcgatcgccttgatctcgatgatgccctgatagatctccggcacttccttttcaaacaaacgcttgaccagcgtcgcgtcggcgcgggatacgagcacctgcgcgcccttggtctccttgttgacctcgatgatcaccacgcggatgcgctccccttcgcgatatttctcattgggcatctgctggttcttcggcatcatggccaaggtctttccgatgttcacgatgcagaacttctcctcgaccgtctcgatggtgccggtgatcatctcttccaccttatcgcaatactcctcatagacgatctgcttttccgcctcgcggatcttctgtttcatgacgttcttggcaaggacgaccgccgcacgtccgaattcctggatattgacttcctcatccaccagatcgcccagctgatagttcttgttgatgcgctgtgcgtcttccagcgagatctccatctcgtcgtcttccacattttccacgacctgccgttcctggaacaccttgatcgcgccggtcttctcactgatgtcgacacgcaccagcgcatccgggatctcgatgtgcttgcggtaagccttgatcagcgcttcttccagcgcgcttaccacgatttccttggtcagcttgcggtcattctcgatcgcctgcatggcatccataaacattttcagtttcatcttcctgttcctctctatattttaacggataagcgtatcaatgcgatattttccggatcgatcgtgatcttcttcttgacggccttggccatatactccaccacgatcccatcctcatcataagcggtcatggttcccttgacactgtccattccggctttgggatccttcagtttgacaaacacgtattctcccacggcagcagcgatctcctgcggcgtgcgcagctcgcgttccgcccctggagagcagacctccagaaaatactcatgggaaatgaagtcgctttcatccagcagcgctgatatgccctctgaaacgatcgcgcatgtgtctatgtccatcgatccgtccgcgtgcatgatggagacttgcagcacccgcatctttccatcctgcacccatcgcagatcatacagagaacatgcgttctgttccagaaccggctgaatcatcgtcctgatctgtgaaatctggtccataacacttctccttctcatcataatgaaggagtgggcataacccactcctcgttcacgtacatgttcagtctatcacagaatcatgccgtccgcaaccgaaaaatcgcattttccgccctcaggcagaaaaaaaataagaagtcgccttcttatttctcaactacggtccttccgttgtattcaccgcattcgcacatcttgtgtgccatcttgtactcaccgcatgcagggcacttcaccagtgtcggcgcagccagcttgtaatgagttctgcgttttgcttttctcgtttttgaattacgtctttgctgtacagccatgttcgcacctcctacttaatcttccactttgaattctcgcaactttgctaaacggggatcgatctcctgttctttttcttttctgagatcttcttccctgattactttccagccctttccctgcggatattccccgatcccaggctttacgaccttcaggggaacctccatgaggatcagctgaaagataaccggcaacaactcaacgacatcaccttttgtctcatgcacatccgcatcttcgctcttgacgaaagagaactgttcggatgattccgagtggaactcaacctcaacgtcttccagagttattgaacacggtacaatcatcactcctgtaaccgacagatccgcatatacgcgctcgcttacaacatcgtaatgaatttctccgctcacatgaacgcggggaacagatcggatgtgatgcatccgggcaaacgcctcaggctcaaaactgatgtcctcgtccaacgcgatggtattgttctcagcctgcaggaaatctgctttggaatatctcaccgacttcaccacctcatgtcaacgaaaacattataaagaaatagaggatcaaagtcaagaatattttaaaattcacaaaaccacgcggatcagccttcccaagggcgcatgctttccatccaggaaagcagatcctgcatcatttcctgcgcgcagcgatcatggaaaagctcatgacgggcgtgcggatacgccttcttcacgatgcgcgcatagccgcttttcttcagccgctgcatggaacgcgtccacgcctgcgaagaaccgatctccggatcctcttctcccgaagaagagtggcagatccggctgacggcagagccagccttcttcatcataggcatcgtacatgagcgcgaacagattctgatatccattgagcgtaaaggtaaaggagcagagcggatctgcctcatacgccttcacggcatcttccatcgatgagatccaggcatgcctgccctgagggaacgccttttcatacggacccagggtcaatgcatggaacaggcggctgtgcgcatgatcgccctgg

SEQ ID NO: 1056 - DNA, 2925 bp, Unknown
  16S sequences of unknown bacteria
ccacctttgcatggttcaccgacacggcaagcacctcggtcaacaaaattcagtcgggaaatcttgacgttcagctcgtcaaggaggacggcgtaaccgagcttaccgaggcgctcaagtgggtaaaggccgcgggaacagagaacgaaaaggttctttgggagcccggcgcaagctatgaccttgagggctttaaggtcaaaaacaacggaaatctcgcccttaaatataaggtcgtcatttcgggaatcgtgggcgacaacgcccttaaggacgccatcgacttcaccatgaaaagcggaaacggtgccgccgcaccgcttgccgattttgagggacatctgtcggccggtgcaaccaccgacgtcatcaccataaacggcaaaaagaaggaaaccgccggaaacgaatatatgaacaagacggtaaacggcattgcgatcaccgtcatagccactcagtataccgaggagcacgacagcttcggaaacacctatgacgaaaacgccgaatatcccgttgtaaaaaacgccaccctcgaggaggcctttgacggcgtggatttcggatacggcaatactgccgacgaggcggtcagcattgacggaaagggaataactgtcatcgacaactggaccgattcctatttcaattccgacaccaccgttaagggtgttaccttcaaaaacggcgcaagcattaccgcccaaaacagcaacatcacggtcacctttgaggattgcaccttctatgcctgcgaccagcagcttgcggcaaaaaccctcggcataaccgatgaaaacggaaccggaaacaacggcagaaacaacattctcacaaacagcggcgcgggaatgtgtcttaatctcgagcagaaaaacggcaccgccggagttaaattcgtcgttaaaaactgcaccttcatcggcgaaaacgacgagacccttcccgtttacggaaataaatacaacggaaaaggctcggtagatgacaaatataaaaagcgcggccatgcaatagctctcaacgccataagcggcggcggaacagcgggtgttctcgattccatgaccgtcgagggctgcacaatgagcggcgtgcgcggaaatgcaattcagctttacggcagcacgggaaacatcacaatcaaggataccaaaatcaattcctggggcgttaacagcggcgcatatgtaaacggctccggccagaccaaggacgccgacagcgcggcaatcagaggcgatttcaccgtcggcggcgcaagaaccctcacccttgaaaacgtatatttcggacttaatgaaaattccgatgagggacacgccataaagcacgttaacgtgggcgctttccccggaaataccgacggaacaagagctgcgggaacctattaaaaatcaaaaccgactaaagcaaaatacaaaatcataagcgaatgagctcggcggcctgtcgggctcattttttcagcggtggaaaaaagtccttttcggccgcattttttccgtcggttctttattttcaaaaaatttaaaaaattgattgatttaacggtaaaagtgtgttatcatagaaaagccaaaggcacagctttttttacggagtaatttcatatatttcggcgtatgtacgcgcgggccctgagcgaccgacaatcatgaatcatgtcaggcggggaaccgagcagcattaagtgatccgttcggtgcgacgcagtaagtctgtgcgtgcatacaccaaagtatatgattttgctcttttttatttatacgtttaggaggcataaaatgtatcgggttctctatcggaaatggcggccgaaatcctttttcgacgttgtcgggcaggagcacataaccgtcaccctcaaaaacgaaataatgacctcgaaaatttctcatgcctaccttttcaccggctcgagaggaaccggcaagaccacctgcgccaaaattttcgcaaaggcggtcaactgccttcatccgaaggacggcgagccctgcaacgaatgtgaaatatgcaggggtatcgacgacggaacggttctcgacgtggaggaaatagacgccgcctccaacaacggcgtggacaacatcagggagataagggacgaggtcaatttcgcccccgccaaggcaaaataccgcgtgtatataatcgacgaggttcatatgctgtcctccggtgcatttaacgccctgctcaaaacccttgaggagccgccggctcacgttattttcattctcgccaccaccgaggtgcacaagctcccggccaccattctttcccgctgccagcggttcgatttccgccgcattcccaccgaaagtattgcgggtcggcttaaattcgtcgccaaaaacgagggtatcgacattgacgacgaggcggccgtgctcatctcccgcattgccgacggcggcatgagagacgcactttctcttcttgaccgctgtaacgacggcgggcgggtgaccgaggaaagagcctcgcaaattctcggccttgcctcaaaatcggcgctttttaacatttcttcggcgctgtgttcgggaaatcttgccgcctgtctcaaaaccgtgacggcgttgtgcgacgcctcgagcgacgtttcccgcgtggccgaacagctgatacttcatttcagaaatctgatgattgcaaagtcggtcaaaaatcccgccgagcttatagtttgcccgaaagaggagcttgttcggtatatgaacgccgccgacggcttttccatggagcggattttgcaaattctcgacgcccttttgcagtgcggcgaaaagatgagaaccgcttcaaacaagcgggtggagcttgaaatgacctttgtgtcgctttgtgccgagccgctgcccgaaagaaaggcggcgccggtcctgccgcaaaagaatttgaccgaaaatttga

SEQ ID NO: 1057 - DNA, 2936 bp, Unknown
  16S sequences of unknown bacteria
gctgctcttcacgcggctcagctgccacgggctcaggctcgggctcgggcacggtgttgagcgggacgtcggcaaagcgggagcggtacccgccctggccctcttcctcctcgccctgctgcttgcgcgccaggtcggccgccgccttcttcttggcggcgcgataccacgacggcaggccgtcatcgggatcgggcgcagcaggaggctgcggggcagcctgcgcgggcgccacgggcggaatctcgtcgaccggcttggtcgggatggagacgacgttggactggaccgcatcttcggacgtcttggcaaacaggtcgtcggaaagcggctggtaggtcgggtgcgcgccgtcatcggaaccggatgcggtcgcggtggcctcctcggctgctgcgggctcgcccgcctcggcaggcgcctgggcatctccctctgcggaaaccggctgcatgatctgcgtttcggcagaagcggcatcggcgacaggagcagacgcgtcgagcgccggaagcccggtctcggggtcgatcggaggcaagacggtagtctgctgcgaggaggccgcgtcgtattcaatcgtcgcgccctcggggacgacgcccgcctcggctgccgcctgggcgtcgtggacctcgacctgcgcatcctcggccgcgagcttcgcgtccagctcctcggccgctgccttggccttggccgcgcggcgctcggccgccttcgcgcgctcgtcgggatcgagcaggcgctttgccaccgtcagcatgaccgcgacagcggaggcgttgtcgttggctcccgagatgtagggcatgaagcggttggccacgatgcagccggcggcgacgagcgcgtacaggctgccgatgagcgagacgatccacagcacgaggtcgatggcatcgggccacggcagcgggagcgcacgcacgatgacaatcgcggcgagcgcgatcatgtcgtagtacagaatctttctgagcagcggggtgtgctgcacgagctgcggcatgacctcgggctgggcgcgcaccgtatcgacgtgcgccacgacgaccaccttgcggctgcgcgtgtcgcgcgccaccgaggccgggacgtgcttggccacgacgttttgcgagacgccgccggcgcgcagcttggacagaaacgggttgtggttgagttcggtgtagtagacgaacacgcccgcggcgacgagcacgatgccgacgacgaacatcgacagcgcgatgcccggcacgaagatgccgattccggaaacgaccgttccaagcgcaacggcgacaaacgccagggcgtacgcccagcgcgtcccggttggagtggcgaattcgtcgacgttgacctcgaaaccgctgtcggtgagttcttgcgcgacatatagtgaggtctggtgctcttcttctgtgctcacgggtcgtgggccgatttgatcggcgagcaccctcacatggtccatgagttcggccatagggccctcctcctgcgtttcgatatattccgctctattctagcctaactgcatattgctgtgttattgcaggtgataatgcccgtcggactccacaagcgtgatgggaacaccaaataggtggcgcaggtgcggcgtggtgaggacctcctctttggggccgtccgccacgatgtgcgcatcctggagcatgatgacgcgctcgaactccggcacgatgtcggcgacgtcgtgggtgatgagcagcacggtgtgcccgtgctttgccagcgccgaaagcgactggcgcagattccacacggcctcgggatcgagcccggtgcacggctcgtcgaacacgagcacgtcgggaccgttgatgagcgcgcgggctatgagcgcacggcgcgcctgaccggtcgagagcgtgagcatgtcgcgctccgccaggctcgcgatgccgagctcgcggatggcctgatgggccttgctgacctgctcgtcggaagcgccgaggtgaaacggcacgccgacgctgccaaagaagccgccgaggacgatgtcgagcacggtgcggtggaccatcatacggtcttgcacgctcgtcgagacgaccccgacggtctggttgatttctgcgagggtagcgcgtgggttgccgcggaacacgacaggcggctcctctttccacagggggaggtactccctcgtgaggagcttgatgagcgtggacttgcccgacccgttggggccaaggatggccacgtgctcgccttcctcgatcaccaggtcgtcgacgtccaagatgatgttgccgtctcttctgacctgtgcgtcgtgcagcctgagaagctctctacccaacttcgttcacctcagcaatcactatttgcccagggcacgcgcgcgctccttcttgcgcgcaaccttgtcgagcgtgcgcttgcgcaggcgaatcgacttgggcgtgacctcgacgagctcgtcgtcggcaatgtactcgagcgcctcttcgagcgtgaacttgaccggcggggtgaggagaattgccttgtccgccgtggacgagcgctggttgccgagctgcttggtcttggagacgttgacgtccatgtcgccttctttggagctctcgccgacgatcatgccctcgtagcactcgtcgcccggctcgacgaacatcgtgccgcgctgctggagcgtgtcgagcgcgtaggcgacggccttgtccgtggacatggcgaccatcgcgccgttcttgcggccgccgatgctgccgttgtacgggccgtactcgctgaagcgatggctgaagatggcctcgccgtggctggcgtttaggaccttggtgcgcagtcccatgatgccgcgcgtcggaatcttgaagtcgaggctcgtctggtcctcgtgcgtggccatgttgaccatctcgccgccggccgtgccgaacagctcgatgatcttgcccgcgtactcgctc

SEQ ID NO: 1058 - DNA, 8178 bp, Unknown
  16S sequences of unknown bacteria
agctgaaagcagcgaataaagcgatgaccaaggcagcccaggagctgtgggagatcgtgacgaaggcagaactggaagctctgatcgaagccgcaaacggctacctcgatggtgattacacggcagaaagcctggaagcactgcagacagcgatcgaagctgcacagaccgtggcaatcgatgacgatgccacaacgagcgaggtcactgacgccatcaccagcctggcgaacgcgattgcttctctggaagaaatcacgctggatacgagcgcgctcgaacacgagatcgaacttgtcagcgagatgatcgccaacatcggcaactatgtgccttctacagtggaaggactgcaggagaagctggatgcagcgaagacggccctgggcaatgcgacgacccaggcagagatcgatgccgctactgagagcttgcgtgaagcacgtctgagcgcgagaacgaaggcggatgtgagcgctctggaagagctgatcgcttatgtgaacagccttgatctgcgtgcgtacacgttagacagcgtcgtgccggtgaaccggatgatgagcaagctgacacaggcgatgaatgacgaagagatcacgcaggaaaaggtcgatgagctggccgcagagatgcaggcagccatcgatggactgcagccgaatgtcatgccggaaacaggagatacggctaacggcagtaccgatacaggatcggcgaacactgcggcagcgatgcagacaggcatgatgcttacgctgttggcagccgcaggcgttgcggtgatgatcctccgcagaaagcgcagctaagcggtattgagatgttggatcaaaagaaacagaccggcttgcaatgataaagctattgcgctgaagcacttcatctgaaagtgatgaatattgaagcaaagagagcagatacggccgaaatgtatctgctctccttttatacattgcttgttttgaccatgcactcttttcgatagaaggctgccccatattttaagatatcctgataaccttcttgtctgagcgtgtactcatatttcatcgtttcgatctgggcgagtgcttcatcacattttgtctccaattccatatagttttttgcgactttgatctcgatgatcatggccttgccttgaacgcttggatattttaccaggatatctggtcggccatttcccgactcacgattagacaggattatgtaattcttcatattctttaacatcccggtcaaaaatccgtgataatagctttcttgatgatcatagaaactgatcgtttccatcagattcgctgacaagatctttgttattgttttggtgtcaccgtttaacaggctttcatacaatggtgaaagttcttctttttcggtccgctcctcaaaccatcgtaagactgcgtgtttatagatataacgaacctcgcgattaggaatggacattgctgcgtaaatggtgtccccttcctgccactcacggtttattttcagataaccagtaaagagcaaaaagttccagaggttgttttgcgtagagtcgatatcatcataagtcatgtcttcatgtatcggtttttcgatgtcatcgcctgcaatcagtcgttcgatttcttcctttgccgtgatatccgcatgttcgatcagctttcgtacgatgctgttagaacttgtgttagaccaataaggcttagcaaaaggatgtttatcctgataacatgaattgacatagttgatcacgctccaaggattatagaccgcagtttcgccaaattgataaccatcataccaatctcgtactgtttctgcgttttcttcaagatcataatcttttaataactgcgctgtttctttttgcgtaaatccgaagtgttcagcaaaatgatgattggtgatagaaatcacgttcagattattcaggccagtaaagatcgattctttgctgatgcgcaggcagccggtgattacggcaaattctaggttgtcattggttttcaacgctgattcaaacagagagcggatcaagttgatcatgcgctcataaaacccgccgaaatacgcgttttccagcggaacatcatattcatcgatcaagatgatcacttttctgtcataggcttgagcaaggcattttgataaaaacttcagtgcgctcagatattcttccgggtgggcgtcctgttcgacgaaacgaagaaatttttttctgtctgcgtcataagtgaggtgaggcaatatttcatcatgccgctgaaattcattggctatcgtttctttcatacaatagaaagtctcttcatatgaggattgcttcattgatttcagcgtaagcgagattaccggatatttgcccatatgggtcagatatgtttttccggcatccatgatcttcagaccttggaaaagatcttgagttgcgctgatctcaaaaaaatatctgagcatgctcatatttaatgttttgccgaagcggcggggacgggtgaacaggtttacttttcccttcatatcaagaagatctttgataaagagcgttttgtctataaaataatacctttgtctcaattctgcaaagtcttcgattccgaccggcaatggtgtccaagccataaaaatgcctcctctccagatatattttcattttactacaacctgaatattgagacaagtttgtgcacaaatgaccagcgccaaagagcaaacagcggtattcaaaacgattgatttttttcttctccagcatcttgcttttcactttcatcgcgttctcatcgtcactatatgcatgtgtcagcccgtatccgtggttctttcatcagttcttcttgtgcaagtttcatataggctgattatgtgggtcatgatgaagctgtccatttcaaaacacgttcttttacatcatttcttgtgataagcggccaagcgtcttgtatctcgctggaaaatctttcgatttcgtgttacctttatgaggaaaaggagcgtgtgtcatgaagatcatcatctcaccagccaagaagatgaaagaaggcgtggattttgcggatgcggtgtcactgccgcgatatttagataagacgcagcagctgctcgatcatctgaaggcattgaaccatgatgagctgaagcaattgttggcttgcagcgatgccatcacgctgcagaatgaaaagcgttttgcgacgatggatctcaagatgaacacgatgccggcattgctggcatatcagggcattcagtatcaatatatggctccggatgtcttcgaagaaggatatttttcttatgtacagaagcatctgcgtattctttcaggtttttatggcatcctgaagccttttgacggcatcgtgccttatcgtctggagatgcaggcacgtttaaaaagcgctttctgcgagaacctgtatgacttctggagcgatctgttatatcgtgatcttgtcgaagatgacgcgctgatcctgaatctggccagcgcggaatacagccgctgcatcacccgttatcttgagccgcatgtgcgtatcgtccgctgtgtgtttgctcagcgtcagaaagatggacgcattcgtgaaaagggtgtctatgtgaagatggccagaggtgagatggtgcgctacatggccgaaaagggcatcgagcgcatcgaggacatccgcacgtttgaccgacagggctatcattttgatgaggatcgttcagatgcacagacatatgtatttgtgaatgaggaggaatgaacatgttgaaagcaggaacgaaagcacctgattttaccttgagcgacgcgcagggcaatcaagtttcgctcagtgactttgtcggaaagaaagtcgtggtctacttttatccaaaggacaacacgccgggctgtacgcggcaggcttgcgcatttgcggccgcatatgaggatttccgcaaagcggatatcatcgtcatcggcatcagcaaagattcacagcgttcgcatgctaactttgtgaagaaatatgatctgcctttcatcttgctcagcgatccagagcgccaggcgatcgaagcatatgatgtctggaaagagaagaagctgtatggcaaagtcagcatgggcgtcgtgcgcagcacttatgtcatcgatgaacatggggtgatcgaaaaggtgtttgaaaaagcaaagccggatacgaacgcggccgagatccttgcttggctgaatggtgagaaggcctgatctgcaagagttcttcatacggagagctcttttttgagaatggaggggcgagatgaaatttctgcatttgggagaccttcacttaggcaaagttgtccatcagtattcgatgctggaggatcaaaggcaattgctcgatcaagtatgcgcatgtgccgaaagcgagcatgcggacgcggtgatcatcgccggagatgtgtatgaccgccatttgccgccggaagaagcggtgaacttgctcgatgactttctgacggaactgaccgctcgcggcttggaggtgttcatgatcgccggcaatcatgacagccgcatgcgacttcgcttcggttcacggctgttgtcggccaaaggactgcatatcgcctgtgatccgcaagacgcgctgcgcccgatcaccatgcgcgatgcatggggcgagctgcatgtctggatgctgcccttcatcaagccggtctatgttcgctcttttctagaccgagagatcgagggctggcaggacgcggtgtctgcgatgatcgccgccatggaaatcgatcagcaggcgcgcaatgtgctcatcgctcatcagttcgtggctggcgcccagacctgtgattccgagcaagccgccatggtcggcggcgtggatcagatcgcggtatctacctttgcggcatttgattatgtcgcgctgggtcatctgcattccccgcagcaggtcggccggccccatgtgcgctacagcggttctctgatgaagtattcgttctcagaggcggcgcagcataaacaaatggtctttgctgatctgcgcgaaaaaggtgagatcaagctttcctttgttccgtttcagctgccgcacgacatgcgcatactgcgtggcacttatgatgaactggccgcaagcgggcatgaagacgcgcatcgcgaagattatctgcgcatcatcctgacggatgaggagccggtgcctgacgcgctggccagattgcgtacggtctatccgcatatcatggagctggagtatgacaatatccgcacatcgctgcagcagcaagtagaaagcaaagtgaaagagcgcggcgccatggagctcatggcggagctgtatgcgctgcaaaataaccagccgctcagcgacaagcagcgtgactgcctgcgtgccttgctggaagcgagcgaggagggagaagcatgagaccattgcagctggagatgtgcgggctcggaccctatgctcatcggaccttgatcgattttacagctttcgcgcgtggttctttgtatctgatcagcggcagccccggcgccggcaagacgatgatctttgatgccatcgtgttcgcgctgtatggggagaccagcggcggcacgcggctgccggcgatgctgcgctcgctgcaggcagcggcagatgagccgacatacgtgaagctgtgctttgcctgtcatgaccatatctatgaggtcacgcgcaatccgcgttatgagcgcaaggcattgcgcggcaataagatggtccagcaaaatccggatgccgcgctgtgtgaaggggaaaaagtgcttgccagcggctacgatgaagtcagcaaggtcatcagtgccatcatcggcctggactgtgatcagtatcgccagaccgcaatgctggcccagggggattttcagcgtctgctgctggcgcagacaaaagagcgtgagcagatctttaggcatttgtttgccacacagcgtttcgcagatgtgcaggaacggctcaaagaaaaggcgcgaagctgtgcgcagcgcctgcaggcccagcgcgatcagctgcacggcgcgctgagccgtgtggaatgtgacgcactgcatcaggaacagctgcagcagctgctcgccatgcaaggctatggggagcatgaggagatcaaggctttcctcacttatatcctgaatgaagacgaacagcagtggcagcagcaaagcaaggccgttgctgatctcgaacaacagctggagcgtctgcgtatcgtacagcagcagcttgcgcgccgcaagcaactgcagcaggaagccgaaaagcgccagcgcgcggcatcagcgcaaaagctggaggagctgcagcggcagcagccagaacgcgagcaaaagcgccgcaccctggctcttctggaacaagaagaacagcagctggatgccttgctcgcgcagcaagaagcgatgaaacaggaatatcatgatctgcagcaaaagcagctgcagcgccagcagcttgatgacgcaagacagaaacaagaaaaagaacttgccgcgctgcaagcacagctgtccgcacaaggcgatgagggcatggctttgttggaaaatgcccatgctttgcagcagctgcgacagcagcaggaggaactggataaaacaggccagcgcttgagacagctcacgcagctgcaagcacagctcaagcagcaggaaagccgctatcaagagagctttgtccgctatcagcaagcgcagcagcaattactgcagaaagagcagcaattctatgatgcgcaggcaggcatcctcgcgcgccagcttgaagaaggcaagccatgcccggtgtgcggttctctgcatcatcctgatccggcacgtggaaaagacagcgaagtgacgcgtgaatggctggatgcacagcgtcaggccagcgatgcgctgcgcactcggatggaggagcaaagccgtcagagcgcccggctgcatacacaggcagaaacattgcagcagacgcttggtgaacagctgcaagcgtcgccggatcagttcatgcagacgtggacgcagcgccagacacaattggatgcgcaaaacaagcggctgcagcaggcgcaggtgcgccgcaagcaaggagaacagcgcgctgaagcacttgcgcgttctatccagcagcagaaagagcagctggatgcgctcgttcaggaatgcacccggctgcgcgccgcatgggacagccgcaaggaacagctgcagcaaaggctggatgctttgcatgtccatgatatgcagctcttgcgccggcagctgaaggatctgcgcgaagagctgaaggccgcgcagacgctgcaagatgcgctcatccagaaacatcaggatgccctggcgcattgctcccgtctggaaggcatgctggacaatgtcgatcaagagctgcggacgctgcctgagccaaaggaaaaggaagcgggcgctgacatggaacagctgcggcaggagaaggagcaagcgcagatccaagaacgccggctcagcctgcgtctgagcgccaaccgccgcatcctgaaagagctggatgagctgtccgtttcctttgatgaagcgcaaaaggaatatcgctggctgaaaagcctgagcgatacgatgaacggcacgctggatcaaaaagaacggatcaccctggaagcgttcgtgcagcaggcgtatttcgagcaagtactgcgctacgcgaacttgcggctgatgcggatgagcagcggccagtatgagctgcgccgcgaaaacagcggttcgcgcaagtcgcgcagcgggcttgacctgtgcgtgatggatcatcatatcggcatgccgcgcagcgtgcgtacgctgtcaggcggagagagcttcatggcctcactttccctggcgctgggcctttcggacaccgtgcaggcgaaggctggcggcatccagctggatgccatgttcgtggatgaaggattcggcaccctggatgaagaaacgctgcaggcagctatgcgcgtgctgcaggagctgacgcagggcaaccgccagatcggcatcatcagccatgtggcagaactgcgcgagcagatcgcgcagcagatcatcgtcacgaaagacgcgcagggcatcagcaccgcccgcctgagcagagaataaaaaagagctgtgtaccttttgagattaaagtggtacccgtaaggaggacagcaccttgacagtgctggcgcctttcaggt

SEQ ID NO: 1059 - DNA, 4315 bp, Unknown
  16S sequences of unknown bacteria
ggcgggacgtatatcaggcacggtcgagatcagcacaccggcgttcagggcgaccgcctctccgggttcgagatatacttcaagcccgcgttttcgcatacgttcaatgcacctctcaagcctcggaatgtcatacccatcccgcgtgatgtggtgcccgccgccgaagtttatccaccggagtcccggaaggtcgaagagaaaaccgaaacgcgactccacagcgtcaagagtagtctcaagcgcgtcgctgtcctgctcgcacagggtgtggaaatgtacgccgtcgagcattccgcacagcttccggaacttttcaggagagagagacgcgaactcatcaagccttgtcccgaggcggcttccgggcgcgcaggggtcgtatatctcgtgcccgttctgtgtcgagcactccgggttcaggcgcagacctacgctctttcccgccgcctttgccctctcgccgtatctctcaagctcagacagactgttgaagacgatatgatcggcgtattcaagtatctcatcgaactcgtcagaacggtacgcggcggagaagacatgacactcccgaccgggcatcttatcatgtccgagcctcgcctcataaagcccgctcgcctccgtgccgtcaaggtactccgagaggatatcgtagacctcatagttcgaaaagcacttctgggcgagcaggacacggcatccggtgcgctcacgcagaccctctattatctccccgttgtgtctcagcgcgctctccgagatgacatagcacggagttcggaggttatcccttgtcatcagtcgacggtcaccggtgagaatgtctcgctgaacggcagaccgtacttcgagagagcgtcaaggtacggatccggatcgaactcctcgaccgtgtaaactccagccttatcccacttcccggtgagaagcatcagcgcgccgcacatcgccggaacacctgtagtgtaggcgaccgcctgcgagccgacctcgcgatagcactcctcgtggtcgcagatgttgtagatatagtaatctttcggctttccgtcctttgtgccgtggaatatgcaccctatgttcgtctttcccttcgtgcgcggaccgagcgtcgccgggtcggggagaagagccttcagaaactgtatcggcacgatctcctgtccgttatagtttatcggggtggtggagagcataccgacattctcgaggcagcgcatatgcgtgagatagctctcgccgaaggtcatgaagaaacgtatccgcttcactcccggaatgttcttcgcgagcgactcgatctcctcgtgatggagaaggtacatatccttgtgcccgactccctcgaaatcgtactcgcgcttcacgctcatcgccggaatctcaatccactttccgtcctcgacatagctgccgggcgcgctgacctctctcaggtttatctccgggttgaagttcgtcgcgaaggcgtagccgtggtcgccgccgttgcagtcgagaatgtctatcgtctcgatagtgtcgaactggtgcttcagggcgtacgcgcagtaagcctgtgtgacgccggggtcgaagccgctgccgagcagagcggtcaatccggctttctcaaaacgctccttgtacgcccactgccacgagtaatcaaagtacgccgagaaaccgagctcacggcagcgcttctcgtatatctttctccactcgggatcgtcggtatcttccggctcgaagttcgcggtgtccatgtagttaactccgcactcaaggcaggcgtccattatcgcgagatcctgatacgggagagctatgttcatgacaagatcaggcttgtactcatttatgagcgcggcaacctcttctgacttcgacgcgtcgacctttgccgttgttatgaccgtcttcgttgtcggtctgagcttttccgcgagggcttcgcagttttccctgtggcggctcgcgatgcagatctcggaaaagacctccggaacggcacagcacttgtgaatcgcgacgctcgctaccgcgccgcagcctattataagaactcttgacattttatgttcctccataaattatattttatatatgtaaatctcacgaaagggcgagcagaacctcacgcgtcagcttgcacgcgagcgcggtcgagatacccgaagagtcaagcgtcggggcgagctcgacaagatcggctccgaccacgcggcagctccggcagacaagctcaagcgcgtcccgaagctccgtgaagcgcactccgcccgcctctggcgtacccgtacccggaaactcagacgggtcgagaacatcgagatcgactgtcagatacaccgggacatttctctctgacagctccgacacggtctcggaaagcccgacaagcgacagcgggtggaaatcagtgtgttcccttccgaacctgaactcggagcgctcgccgctgcgtatgccgaactggtgtatcctgccgtctccgaggatatcgtggcatctgcgtatcacacacgcgtgggacagcggcgctccgaggtaatcctccctcagatcggcgtgcgcgtcaaaatggatgatgtgcatatccgggaatctctcggacagcaccctcaccggagcgagcgtcacaaggtgctccccgccgagcatgagcggcagttttccggcgtcggctattgccttcgctctttcctcaagcgccgccagcgccttttccgcgtctccgaagcacatctcaacgtccccgctgtcaaagacgcttatgtcctcaaggtcgcggtcctgatacgggctgtaggtctcgattccgtagctctcatgccttatagcggacgagccgaacctcgcgccggggcgatagcttgtcgtcgagtcaaaaggcgcgccgtatatcacaattcccgcctcatcgaactccgcaccacagccgatgaaggtctcgatattcttattcaacacttaaaagcatctcctcaaggaacgccggaagatagaagctcccgacgtgcagtctcgtcgtgtagtactgtgtcttcagccccagctcacgccacctctcaggcttcaggtcgtcgaccgggtgatatttcttgctcgcgaagccgaacagccagtagcccgccgcgtaactcggtatatgcgcctgataagttctggcgaccgggaatgtgctcgctatgcgcctgtgactgcgctgcatggcgaacgcgtcctctttgtagaaagggcttccctgctgattcaccattattccgtcctctttcagcgccttgtagcagctcccgtaaaactccttcgtgaagagcccctcggagggtccgaacgggtcagggctgtcgattattatgaggtcgtactcgttctcgtgccggcgcatatatttgaggccgttctcgtagtggatgtggacgcgcgggttctcgagctcacaggcgttgttcgggaggtacttcttgcacgcctcggctaccatcgggtccatctcgacaaggtctatgttcgtgacccacgggtatctcgtcagctccttgacgacgccgccgtctccgactcctatgacgagtatgttctcagccctcggatgaaccgccatcgggacgtggactatcatctcgtcatacacgaactcatccctctcggtgagcattatgtccccgtcgagcacaagcacccgtccgaactcccggctgtcgaatatgtctatcttctggtactcgctctccgccgaatagagctgtctgtcgacccggaggctgaactgcacgtccgacgtgtgtttttcactgaaccataattccatctctcgttctcccctatttgataacgttcaggcgctcgatcgcctcgtcctgcggtccggtcatgctgcatcccttttccttcgcgtaggttatgtatctgagaatatcggcggtgatgacctctccgggcgctaaaaccggtattccgggcgggtagcacatcacgaactccgaacatatcctgccctcagtctcgcggagcggcaggctctccttctccgcgtagaacgcctcctgcgggctcatcatgaccctcggctctatgtactcctgtgacagcagtccgaccttgtcccgctcgaagcgccgccttatgtccgccagggcgcttatcagtctctcaagctccggcatccggtcgcccatagatatgtacgcgagaatgttgccgatgtcgccgaactctatctggatgtcatactcgtcgcgaaggatgtcgtagacctcaatccccgcgagccccacgtcaagcgtatgcacagacaatttcgtagtgtcgaaagcgaagacagacc

SEQ ID NO: 1060 - DNA, 12678 bp, Unknown
  16S sequences of unknown bacteria
gtgctggccggcgtggtcgaaccagccagtgcgaccccggtcatcatcgaggacaatgtgctggtcggtgccaatgcggtcatcatcgaaggcgtgcatgtcggtgaaggcgctgtcgtcgccgccggggccatcgtcatcgaagatgttccggcacataccgtggtggctggcacgccggctcgcgtcatcaagcagaaggatgagcaggcggcacagaagacggcgctggtttccgcgctgcgctcgctgtgagcaatggagagaagatgaaacaggaacgatttgaacggatctatcagcagggccatctcacggtgaccgagatctgggtagaccgggagacgggggtaaattacctgtggcatgaggatggctacagcggcggcctcaccccgctgcttgacgcgcgaggcaatgtggtcgtgacgccatttcaagaccgagagaaagaatgaatcagctttgtcgtaaagctcatttcatgatgtaagcttgcaaatcactatatatgatcaatagcggcgttgtttctgacaaggaaacaacgcttttgacgttttccccttcttggtgtcgcaactgtataaaaatgcaacattcgtgttgtgatattgccaacgatgtgctaaaatataaacaggagaaagcggtttctcgtttgtgagcaaggaggtgaagagaccgagaaggcctgctttccgggaggaggatgaaaatggcagtgaaagactgtatgaaaaaagttctgatgtccgggctctccgtgctgatggcagtctctatgttcaatattcccgcgcgtgcgcaggaaaacagagcggctgatggcgtaaccactctgggaacgatcgaaagcatggatgatatccaggtcagtgacaatgtggtcgatatctctacttcgaatgccggagaaaagatcaagatcacctttgtcagtgatacgatattccgcctgaatgtcgaacctgaaggaaaatttgtggaagaaccagaaacggcccgtgatgattatgtggccaagatgctggttaagccgatttctgagtatgaaggcgtcgtgcctaatgtcagtgagacagatacagattatgtgatcggcactgataaagtagagctcgtgatcagtaaggcggattcccgtatgcgcatgatcaatgcgcagactgacgaggtggtctggtccgaaaaagcaccattgcagtatggcaatggcaagacgacccagaccttgaatgaaggagaagatgagtatttctttggcggaggattccaaaatggttatttctctcataagaatcagaagctccagatcaatatcgtagccacaagcggaaactggggagacggaatggtttcttcaccgactccattctatatgtcgaccaatggttatggtgtcatgcgttatacgtggagaaacggtgtctatgacttcggttatgatgatccgaccacgacgaccacgatgcataacgaagagcgcttcgatggaatctatttcctcggagatattccttctgtgctcgatcagtacacggatctgacgggcaagccggtcatgcttccggaatattcttattatcttggtcacgcaaactgctataatcgtgactattgggtagaagatcctaatggaaagtatgagatcaacggtgtccgttatacagagaagggttcctctaatccaggcggaaacgcgttcctggaaacgctgaatgatacaccggtcagcgcaagaacggtattggattggtatcagcaggaggatatgccgctgggctggttcctgcctaatgatggctatggctgcggatatggtcaggatgacacagataccacaccagataccgcagatgcggaagctatcgacatcaatgtgaacaacctgaagcggtttacggactatgcgaattccaagggtgtcgaagtcggattgtggacccagtcagatctgaaaccaacgctgtacgataacgaaggaaaagtcatcgcgccgcatttgcgccgtgatgtagaaaaagaagtcaatatcggcggtgtccgtgccgtcaagacggacgttgcatgggtaggcagtggtttctccatggcgctgaactcagtaaagaccgcggcagatacgatcgaagaagcacagtatcgcccgtttgtcgtttctttgtttggctggaatggtacgcagcgctatgccacgatctggtctggtgatcagaagggcggcctgtgggagtacatccgtttccatattccttcttatatcggcgccggcctgagcggtatcccgtatgtcggcagcgatatggatggtatctatggcggtgacgcaccgatcatccagactcgtgattatcagtggaaagcatttactccggtcatgatcgacatggacggctggggcagcacggtaaagaacccggcagctaacggcggtatctatgcgtcgatcaaccgtatgtatctgaagctgaaggcacagatgctcccttataactattcaaatacgtatgaggcaaatcagaccggcatgccgctgatccgtgccatgttgctggagtatcctgaagatccgaatacatacacgaccatgacgcagtatcagtatatgtggggcgagaatctgctcatcgcgccgatctaccaggatacggcatctgatgatcagggaaatgatatccgtaacgatatctatctgccggatgaagatcaggtatggatcgattatttcactggtgagcagtatcagggcggaagagtgatcaacggctttgatgcgccagtatggaagaccccggtattcgtcaagaatggcgcgatcatcccgatggcagaagaaaacaattctcctgcaggagtcaagggcgcttctccgcgtatctttgaggtatggccttctggtgaaacggacttcacgctgtttgaagatgatggatattctaccgattattataacggcgcatacgcgctgacgaatatcacgtcaaacgcgccgaagagcggcagcggaacagcaacgatccatgtcgatgcggccgataccaatggacaggattatgctgaagtaactaagtttgacaaggaacgtgagacacagttcgtggtcaacgttcaggaaagacctgaaagcatcagcgctgaagtaggcggcaaagcagtagaattcaaggaagttggttctgagacagaattcaacgaagctgaaggaaatgtatatttctacaatgaagcaccgaacctgaataagtataacctggaaggcgaagcgtttgccgatacgaagatcatcacgacaccgaaattgtatgtgaagatcgccgcgaatgatgtttctgccaatgcgatcgatctgaccatcgaaggctttaacaatacgatggcaccgaaggatgatggatctactgcagctccggctgttccggaaggactgcacgcggtagaagaaggcatccaggatacttccctgcagctgcagtgggatccggtcgaaggtgaaaatggcgcgtcttattatgagcttcgcgtcaatggtgaaaatggatatgtactgagcaatctggaagatactacatttgtccacggaaatctgacgcaggctacggaatatacttatgaggtacgtgctgtaaatacagctggcaagtctgcttggtctgaaccgatcagcgtatcgacgcagcttgaccgttatcgcaatgtcgttccggatttctcattgacgtcaccgagcgctaatgatggaaccacgaccaatctgacaaacagagatatgaacgatatgtggttctctaagtttgacaacaacaatgcggaagtggcaaagggagaaaagtatttctattttgacctgaaagaagtttatcagatggataagcttgagctgtatggcgtaacaggctacacctctggcaatatcacgaatgcgacgatcgaaacaagcatcgatggcattcattacaccacgcttttggatcatgtcaatgtaacttggacagataagaacctgagagctgagatcgacctgaagggcgcatcgatgcgttatatgcgcatgaccgtgcatcagccatacaacagctggctggcattgtctgaagtcatgccgtataaggtagatggctctaagccagcgccgatgggcgatgtcaatggtgatcgtcagatcgatgagggcgatatgaccttcatgtccaattatgtcggtgtcaacagcgcgtctacgacctgggtacaggtatctcaggctgatttcaatggtaatggattgatcgatggatttgaccttgcgtttgtcgcagccaatgtctatggtcagggatcttccagccaggatgtggcaggaagcatcgttgcgatcccgtctaagaatcatcttaaggccggagaggaattcaccatcgacatttatggaaatggctttaacgatgtcaattccttgagcttccagcttgaagatgtaaacaatcatttcacgatcaataaccgcgcagaaagcgcagacgcattggatggcatgatcgtctatccgatgaactatggttcacgtgtcacgctggcagcgacaaatcgcggcggcagcggagcgaaactgaatggcaatatgaagatcgctacgataaaggcagccgcaaaagtggatactgtctttgacatggaactgaccaatgcgatcattgtcggccctgggctctctgaagcttccgcgatcgccgctgtagtcgatccggatacagaaatgccggcagtagatgatcagacacgtctgctcgtcaatcgcaaagacttcacgctgagttccagcacgccagacaagttccagagcggttatggactggagaacatcgcagatggcagcctggctactgtttctgagctgaagtggaatgctggagcggaatgcccgctgaactggacattcaatctgtctggagagaaagagatttcttccatgatcgtttataagcgtccgaatggaaatggttcactgaagaagatcgagatgatcgcttaccataatggtgaggaagtagctcgtgaactgaaggacaatatcgaaaacggcgctgaatcggttgaattcaccctgccggaaaatacgatggtagataaggtcgaattcaatgccttggattctcatcaggcatctgacagcacgaagtatatgacgttgagagagatcgaactgtatggacggaataactctgtcgtgaccggaatcgaagcagacgactctaacgtttatacgatggattatgatacgagcatgatctatcgcgcgaatgtcttgcctgcaacggccctgaatcgtcagtatacggtgacttcttctgatccgaatctgatccgtgtcagccgaattcaggatgaaagcggcaatatctcttatctgctcacagcagctgaaagcggagaagaaggcgctaaggtgacgatcaccgctaaggcagtggccggagatttctctgtaagcaaagagatcacgctgggcggcggaagcacacagccggaatatggaaagcttccggaaagcatgatgagcgcgtcagcgtccagtgaatgcccggatggttatgagaatcatggcaaggcatatgacgtattggataatgatgcttccacatattggcattctgactggaccgtagatggccatacacttccgcagtgggtaatgatcacacttgatcagccgtctgcgatctcacagatggatgttctcccgagagacagcggtaatggcagcatcactgattatgagatctatgtaagcgaaacaggagaagatgattcctttgtcctggctgctaagggcacatgggatggcggaactgacctggaaacggtcaagtttgatgagccgttcaagaatatcacagcggtcaagctcgtggctttgggatccagacattcttctgatgccaacaatgtcgctgctgttgcggaaatcgatctgtatggcaagattggagcaagcgagatcactaaggatgcgctgaatgaagccattgctgcagcagaaaagatcagcgctgatgagtatacgacatcaagctggaataccctgcagcaggcgctgactgctgcaaaggatgtcgctgccgatgattccgctgatcaggagacgatcgatgcggctgccgcggcgctgaatagcgcggtagaagctctgcaggtcaaggcgagccagccatctctcgatgcgctgcagaacatggtagaaaaagcagaagcgcttgaaggctatactgaagaagaactgaaagatgtgaatgcggccgttgcggctgccaaggcactgatcgaggatcctgatgatgcgtcctctgcggcagtcgttgcagtaacgctgcagctgagcgaggccatcagtgatctcagcacattgccgagcattgacgcgctgcgtaaggatctgcaggattctatcgactttgtcaaggaaaatatcctgaatgatactgaaggtctgcgtcctggaaaggtacaggcactgaaggatgctgtgaaagcggcagaggatgtgctcaaagatgcggacgcgtcaagagaagagctcatcgcggcaagcaaagcgatcactaaggcagcgcatgagctttgggagatcgtatccaaagctgagcttaatgcgttgatcgaagcagctaaaggatatgctgaagaagagtataccgaggaaagcttcgcggcgctgagcaaagcgcttgaagtcgcaaaggctactgcgatcgatgaagatgcaagcgttgatgaagtgacacaggccatcactggtcttgccacggcaattgccggacttgaaaaggtcacgctggatacgagcgcgctcgaatacgagatcaatctggcggaagaaatgcttgcggatatcgactcttacattccgtctacagtagaaggcttgaaggaaaagctggacgatgcgaaaaatgcactggagacagcaacagatcagacacagatcgatgaagctacgcggatcctgcgtgaggctcgtctgagcgcaagaacgaaagcggataaatctgcgcttgaagctgcgatcgatgctgcaaacagctttgatctgagtttgtacaccgcggacagcgcaaaggatgtaaaaactgcgctgaaaaaagcggaagcaatgatgagcaaagaggatgctacacaggaagaagtaaatgcaactgtggcggcactgaatgcggcagtgaacaaactggtcaaggaagaggtcaacgctccggatgtccaggatccgtcgatcaaggatcctgctcagggcgcagaccagtctgtcaacgcggtgccggataagacggataccgctgcacagagcggcatgagcgcaatgttcgctgtcatgctggcagcaggtgcgggcgcagcattgcttgcactgcgtaagaaaagaagctgatcgctgagacacgacagggatgatcagatcctagtgttgaagagatagcagaaagggtcctgcgagatggtcatgccattgcgcagggccttttgctacttgctcatgcttggcatagtatggttttatttgacgtaacagccgtttcatgatagattattacttgtaaaagggagtagttggcatctacgatgttatatagatcgacagcacgctgtgaaacgcagccggtttatataggaagtaacgagacttttattccgcatgcgggatgaaagtctcttttgctcatattccctttagaagagttcagaaaaaaaagggagtgatggtttgtggactcgataccccagcaacttctggtacaggtcatattgatcttgttgaacgcattgtttgcggcaacagaaattgcggtgctttccctgaatgggacaaaactgaaaaaactgaaggaaaaaggtgacaagacggcagacaagctgttaaagcttgtagaagagccatccggctttctgtccacgattcagatcggcatcacgcttgctggtttcctgggcagtgccttcgcggcagagggattctctgatccgctggtgcattggctttatgacgatctgggatttacgacattctcactgggcacgctgaacacgcttgcggtcattgtcattacgatcatattgtcatattttacattgatcttcggtgagcttgtgcctaagcggatcgcgatgcagaaatcgtatgaagtagcaaagctctcctgcggcatcgtacgcgccgtcgccttcgtcatgcggccggtcgtcgcgtttctttcgttctctaccaatgcgatcctgcgcctgctgcatctgaagaccgaagcggaagaagaacaagtcagtgaagaggagatccggatgatggtcgatctcggcgaagagaccggggtgttggatgaagatgaaaaagaatggatcaccaatgtcttcgaatttgatgatacgccggtcagggacatcatggtccgtgccggtgaagtgatcgcggtgagcatcgatgcgaccaaagaagagatccttaagctgatcagcgaggagggcatttcccgccttccggtctatggagagaacctcaatgatatcatcggaatcctgcatgcaaaggactttctgatcgaactgcagaaaaagcagccgttcaatctgaaggagatgctgcacagcgcttatttcgtgccggaacaagtgacggcagatgtgctgttcaaagatatgcagacacgccgcctgcactttgcggtcgtgatcaatgagttcggcgaagtgagcggtatcgtgaccatggaagatctgctggaagagatcgtaggcaacatctatgatgaatatgacgatcaggaacagccggagatccgcaagctgtcagagaacaaatggaaagtcagcggcaatatcgatatcgaggatctgctggaggagattccgcttccggtggagcctaatgacgcatacgatacgctgggcggtcttgtgttgtatatgttgggcagtgtcccaaaagatggcacccgcttccgtctggaactggaggggtattcactgctggtgatcaatgtcgatcatcatcgcatccaggaagtcatcattgaaaaaaatgaaggacataaagagcaagatgaagctgcagagcaatgatctgcggcttttctttttagggcattgattgtgcggcaggaaagcgtataatagacggcggaaaaaggggatatgaaatgaaaagaaattatgaactagacatgtgcaatggcccgctgttaagtcacatcatcatctttgcactgccgctgatgctttcaggtatcctgcagctgctcttcaatgcggcggacatcatcgtggtcggccggtttaccggcagtgaggcactggcggccgttggttccaccagttcgctgatcaatctgctcgtcaatctgtttttgggcatctcggtcggcggcaatgtgttgatggcgcgctattgcggggcaagggatgaacgaaacgcaagagaaacggtacataccgccatctgcatctcgatcattggcgggatcctgatgatcttcatcggcaaccttctggccagaccgctgctggaatggatgggcacgccggctgatgtgatcgatctgtcggtggtgtatatgcgcatctattttctcggcatgccggcttttattacatatgacttcggtgcggcgctgctgagggccgtcggcgatacacgtcgtccgctctattttctgtttgcggccggcgtcatcaacgtcatcttcaacctgatctttgtcattgtgtttcatctgggcgtggccggcgttgccctggcgaccatcatctcccagaccatctctgcgctcctggtcctcatctgtctcatccgttcagatggcgtgctgcatctgtgcaaaggagaactgcgcattcatccggacaaggtcaaaggaatgctgcggatcggactgcctgcgggcattcagggctgtatcttcaatatttccaatgtgctgatccagtcttcagtgaactcgttcggatcgctggtgatggcaggcaataccgccgccagcaacatcgaaggctttgtctatacttccatgaacgcggtgtatcagacttcgctgagctttaccggacagaacatgggcgcacgcaattatcagcgagtggatcggatcttgtttatgtgtctgggcgtggtcgctgtcgttggcatcgtattgggcgggggcgcggtgttgttcggcacaccattgcttggcatctataccaatgatccgcaggtcattgcctatgggctgcagcggctgcacgtcgtcgcgctcacttacttcggcatcatggatccgctggtcggcagcctgcgcggcatcggctattccatcatgccgatgatcgtctcgctgagcggcgcctgtttgtttcgggtcttttggatctttacgatcttccaggccttgcacacacagttttctctttatgtctcttacccgatctcatggatcctgaccgcatcggtccatgcgctctgttatctggccgtgcgcaaaagggcctttgcgaagagagaggcagaatatgcacagagcatgacacagtgacgcctacacggacaaggatcaagacgccttgtccttttttgcgcagacatcatcgaatgagcgtggatagtcggacatgtgatgctggatgtggtataatgatacttaagagctttataaaaaacaaggggaaggtgatcagatgaggatcctcagtacagagatcgaacaattgtcacgcaacaaatacaacatccaggcatctgcccgcatgaacattcaggccatgctgcgtgagctggatatcgaacagcgcggcgaggtgttgttcatcagcggttcgctgagccatgccgggcatgtcaatgaattcgcgctggagatctcatcgcatggagagatctttgcgcacgactgttcctgttcgtttcatcggcctcatgatgcctgcggccacatcatcgcgctgtgccggtatctggccgaacgggaatataagctcccttatcatttccggcgggaagaggaaggaaatccgcagatgcgcatgcactcggcgatggacatcgaacggctgatgcagcgtcaggccatgcgcgatacgcatgactggctgcaagaggcgacgcgcagccgtctcgacctgcatctttcttctgatcatgcggagcccatcaggctgtacatgatcttcgagatggatgtgacgctgttttaccgccagctgaacctgaccttcaagatcggccggagcggaaagaagatgtatgtcgtcaaagacatcgcgcagctgctctccatggtggatgaaggtgtctggcatcagtacggaaagggcctggagttttatcatcagatggaagcgtttgatgaagaaagccgggagatcctcagcatgatcaggatcctgtgcgggaatgatgatctgggaacgtgtgacaagcgctgcatccacctcagcgtggcagggctggaacggatgatggatctgctcagcaccctgccgcagtcttattataatattcgcctggatgcgcgtcctctgcatcttgtccttgagatcggccgggaaaaagatgcggtcaccatcgaactgctcgatctggacagcgacgatgagatcatcgagcaagggacgatcgggggaaaagcgctctatgattttgattccgcgcatcagcgtctcatctgttatgaggcagatgatgaaggacttgtctgcggactattggagagattgaacagttccggagagctgctgatgagcgaggaggacttttcgctgtttcaccagatgtatctgcaggactgcgcagagttcatcagctgggaaggcagcctgaacgggatcaagatcgaagagatggaacaccagatcaagctgttcctcgatgtggatgagcatggccaggagctgttgatgaggctggaattctgctatgatcagaaaacggcatatgggtttgaacgacatggtgattgtctgctttctccgaatgcgtctgcgatcgagcagttcctctcgcattgggtcgcctttgtggatgatcggcattttgcgcatgtgcagccgaacgtggattggggacagatgagcgaggagctcccgcagctgctaagtccgtattgcgagatctatgtcagcgaacagctgcgcaaggcggcgaagccaaagcagctgagcatgaacatcggcgtacgggtggaaaaccagctgctgacgctggatttcgacttggacggcatggagatgagcgagctgcagaatgtgctgaaaagctatcggcgcaagaagaagttccatcggctgaagaacggcgacatgatcgatctggagggacaggcggtcaaggaggccagcgacctgttcgaacagctgcagctgaatggacggtcgtttgatgacaacagcgtcaccctccctggctacaggctgtataatatggacgtgctcagcgatgagcagcagaacatccgatatgatcgttcctcgatcttgaaggaagaggagctgttcctcgcacagcctgagcgatatgagatcccgaaaaactatgaggaccgcctgcgcgattatcagaaggaaggatatcagtggctgaggacgctttccgcctgcagcctgggcggcctgctggcctggggggtgtatctgctgatgggcctggtggtggcccaggatgtgctccgggttttcgtggcc
